United States Patent Application Publication US 2007/0214517 A1 - sequence listing, part 75

SEQ ID NO: 97957 - DNA, 1751 bp, Arabidopsis thaliana
  misc_feature (1)..(1751): Ceres Seq. ID no. 13578815
  misc_feature: MA Experiment ID: 20000179 Result: Up-regulated in Transcription
  misc_feature: MA Experiment 20000179 PARAMETER Experiment Name: At_Germinating_Seeds_P Parameter: Age (hr) Value: 6 vs. 0
  misc_feature: MA Experiment 20000179 PARAMETER Experiment Name: At_Germinating_Seeds_P Parameter: Tissue Value: Germinating Seeds
  misc_feature: MA Experiment ID: 20000180 Result: Up-regulated in Transcription
  misc_feature: MA Experiment 20000180 PARAMETER Experiment Name: At_Germinating_Seeds_P Parameter: Age (hr) Value: 24 vs. 0
  misc_feature: MA Experiment 20000180 PARAMETER Experiment Name: At_Germinating_Seeds_P Parameter: Tissue Value: Germinating Seeds
  misc_feature: MA Experiment ID: 20000182 Result: Down-regulated in Transcription
  misc_feature: MA Experiment 20000182 PARAMETER Experiment Name: At_2mM_SA_P Parameter: Age (day) Value: 14
  misc_feature: MA Experiment 20000182 PARAMETER Experiment Name: At_2mM_SA_P Parameter: Organism Value: A. thaliana
  misc_feature: MA Experiment 20000182 PARAMETER Experiment Name: At_2mM_SA_P Parameter: Plant Line Value: WS
  misc_feature: MA Experiment 20000182 PARAMETER Experiment Name: At_2mM_SA_P Parameter: Timepoint (hr) Value: 6
  misc_feature: MA Experiment 20000182 PARAMETER Experiment Name: At_2mM_SA_P Parameter: Tissue Value: Aerial
  misc_feature: MA Experiment 20000182 PARAMETER Experiment Name: At_2mM_SA_P Parameter: Treatment Value: 2mM SA vs. No Treatment
cttagccaacaaaaaatggcagaacttattccttggtactacacttcagggtcagggatcgtacttgtacttcaaaccatttttctcttctcgatcgtacgtgctgatttaccaggctcatgggaactcattgtacaagacgccggtatagcttctatgcacacggcggtgacccggttcaacacggtcatccttctagaccgaactaacatcggaccgtcgagaaaggctcttgaccgtcaccggtgccggagagacccaaaagacgccgctttgaaacgcgattgttacgctcactcggttctgttcgaccttggtacaaatcagatcagaccactgatgatacaaaccgacacgtggtgctcgtcgggccagtttttatccgacggatcgttgctacaaacgggtggggataaagacgggtttaaaaagatacgtaaattcgaaccctgtgacccgaacgaaacgtgcgattgggtggagcttcaagataccgaattgataaccggacgctggtacgcttctaaccagatattaccggatggttcggttatcatcgtcggtggtagaggaactaatacggttgagtattaccctccacgcgaaaacggtgccgttccgtttcagtttcttgctgacgtggaagacaaacaaatggataatctctatccgtacgttcatctcctccccgacgacgacggtggcaatctcttcatcttcgccaacagtcgcgccgttaaatacgatcaccggataaacgccgtcgtgaaagagtatccaccgttagacggtggtccgaggaattatccgtcaggtggatcatcggcgatgctagctatccaaggagatttcaccacagcggagattctaatctgcggcggagcacaatccggagccttcacagcgcgtgcaattgatgctccggcgcatggaacctgcggacgaatcgtagctaccgcggcggatcctgtttgggtgacggaggagatgccgttcgggagaatcatgggagatatggtgaatttaccgacgggagagattctgatcataaacggagctcaagccggaagccaaggattcgaaatgggatccgatccgtgtttatacccgcttttataccgacccgatcaaccaattggtttacgattcatgacgttgaacccaggaactgtaccgagaatgtaccattccacggcgaatcttttaccggacggtagaattcttctcgccggaagcaatcctcactatttctacaaattcaacgccgaattcccaacggagctacggatcgaagcgttttcaccggagtatctgtcaccggatcgagctaatctccgaccagagatccaagaaatcccgcagatcatacggtacggagaggttttcgacgtgttcgtgaccgtgccgttgccggtggtggggataattcagatgaattggggaagtgcgccttttgcgactcattcgttttctcaaggtcaacggctcgttaagttgaccgttgctccgtctgtgcctgacggagtaggtcgttataggattcagtgtacggctccacctaacggcgccgtttctccgcctgggtattatatggccttcgctgttaaccagggagttcctagcattgctcgatggatacgaatagtttcttgatttaaaaccagaggagatatttaaaatgttaatttgttaaatagttaaacacatcatgtaatataaatattttcatggaaaaacttactccgcaaagt

SEQ ID NO: 97958 - protein, 550 aa, Arabidopsis thaliana
  peptide (1)..(550): Ceres Seq. ID no. 13578816
  misc_feature (6)..(550): Homolog of NCBI NO: 15232379 NR Description: expressed protein [Arabidopsis thaliana]
  misc_feature (28)..(548): Homolog of NCBI NO: 15222300 NR Description: hypothetical protein [Arabidopsis thaliana]
  misc_feature (22)..(548): Homolog of NCBI NO: 15223699 NR Description: expressed protein [Arabidopsis thaliana]
  misc_feature (41)..(548): Homolog of NCBI NO: 15230360 NR Description: expressed protein [Arabidopsis thaliana]
  misc_feature (53)..(548): Homolog of NCBI NO: 25352604 NR Description: hypothetical protein F6F9.4 [imported] - thaliana >gi|10086483|gb|AAG12543.1|AC007797_3 Unknown Protein
  misc_feature (39)..(548): Homolog of NCBI NO: 25352602 NR Description: F14L17.20 protein - Arabidopsis thaliana Weak similarity to glyoxal oxidase (glx2) from Phanerochaete
  misc_feature (39)..(545): Homolog of NCBI NO: 15223754 NR Description: expressed protein [Arabidopsis thaliana]
  misc_feature (35)..(548): Homolog of NCBI NO: 34911116 NR Description: putative glyoxal oxidase [Oryza sativa (japonica group)] >gi|20161084|dbj|BAB90014.1| putative glyoxal oxidase
  misc_feature (38)..(549): Homolog of NCBI NO: 15220398 NR Description: glyoxal oxidase (glx1) -related [Arabidopsis >gi|9828629|gb|AAG00252.1|AC002130_17 F1N21.11 [Arabidopsis >gi|27754377|gb|AAO22637.1| putative glyoxal oxidase glyoxal
  misc_feature (39)..(549): Homolog of NCBI NO: 15241135 NR Description: expressed protein [Arabidopsis thaliana]
LSQQKMAELIPWYYTSGSGIVLVLQTIFLFSIVRADLPGSWELIVQDAGIASMHTAVTRFNTVILLDRTNIGPSRKALDRHRCRRDPKDAALKRDCYAHSVLFDLGTNQIRPLMIQTDTWCSSGQFLSDGSLLQTGGDKDGFKKIRKFEPCDPNETCDWVELQDTELITGRWYASNQILPDGSVIIVGGRGTNTVEYYPPRENGAVPFQFLADVEDKQMDNLYPYVHLLPDDDGGNLFIFANSRAVKYDHRINAVVKEYPPLDGGPRNYPSGGSSAMLAIQGDFTTAEILICGGAQSGAFTARAIDAPAHGTCGRIVATAADPVWVTEEMPFGRIMGDMVNLPTGEILIINGAQAGSQGFEMGSDPCLYPLLYRPDQPIGLRFMTLNPGTVPRMYHSTANLLPDGRILLAGSNPHYFYKFNAEFPTELRIEAFSPEYLSPDRANLRPEIQEIPQIIRYGEVFDVFVTVPLPVVGIIQMNWGSAPFATHSFSQGQRLVKLTVAPSVPDGVGRYRIQCTAPPNGAVSPPGYYMAFAVNQGVPSIARWIRIVS

SEQ ID NO: 97959 - protein, 545 aa, Arabidopsis thaliana
  peptide (1)..(545): Ceres Seq. ID no. 13578817
  misc_feature (1)..(545): Homolog of NCBI NO: 15232379 NR Description: expressed protein [Arabidopsis thaliana]
  misc_feature (23)..(543): Homolog of NCBI NO: 15222300 NR Description: hypothetical protein [Arabidopsis thaliana]
  misc_feature (17)..(543): Homolog of NCBI NO: 15223699 NR Description: expressed protein [Arabidopsis thaliana]
  misc_feature (36)..(543): Homolog of NCBI NO: 15230360 NR Description: expressed protein [Arabidopsis thaliana]
  misc_feature (48)..(543): Homolog of NCBI NO: 25352604 NR Description: hypothetical protein F6F9.4 [imported] - thaliana >gi|10086483|gb|AAG12543.1|AC007797_3 Unknown Protein
  misc_feature (34)..(543): Homolog of NCBI NO: 25352602 NR Description: F14L17.20 protein - Arabidopsis thaliana Weak similarity to glyoxal oxidase (glx2) from Phanerochaete
  misc_feature (34)..(540): Homolog of NCBI NO: 15223754 NR Description: expressed protein [Arabidopsis thaliana]
  misc_feature (30)..(543): Homolog of NCBI NO: 34911116 NR Description: putative glyoxal oxidase [Oryza sativa (japonica group)] >gi|20161084|dbj|BAB90014.1| putative glyoxal oxidase
  misc_feature (33)..(544): Homolog of NCBI NO: 15220398 NR Description: glyoxal oxidase (glx1) -related [Arabidopsis >gi|9828629|gb|AAG00252.1|AC002130_17 F1N21.11 [Arabidopsis >gi|27754377|gb|AAO22637.1| putative glyoxal oxidase glyoxal
  misc_feature (34)..(544): Homolog of NCBI NO: 15241135 NR Description: expressed protein [Arabidopsis thaliana]
MAELIPWYYTSGSGIVLVLQTIFLFSIVRADLPGSWELIVQDAGIASMHTAVTRFNTVILLDRTNIGPSRKALDRHRCRRDPKDAALKRDCYAHSVLFDLGTNQIRPLMIQTDTWCSSGQFLSDGSLLQTGGDKDGFKKIRKFEPCDPNETCDWVELQDTELITGRWYASNQILPDGSVIIVGGRGTNTVEYYPPRENGAVPFQFLADVEDKQMDNLYPYVHLLPDDDGGNLFIFANSRAVKYDHRINAVVKEYPPLDGGPRNYPSGGSSAMLAIQGDFTTAEILICGGAQSGAFTARAIDAPAHGTCGRIVATAADPVWVTEEMPFGRIMGDMVNLPTGEILIINGAQAGSQGFEMGSDPCLYPLLYRPDQPIGLRFMTLNPGTVPRMYHSTANLLPDGRILLAGSNPHYFYKFNAEFPTELRIEAFSPEYLSPDRANLRPEIQEIPQIIRYGEVFDVFVTVPLPVVGIIQMNWGSAPFATHSFSQGQRLVKLTVAPSVPDGVGRYRIQCTAPPNGAVSPPGYYMAFAVNQGVPSIARWIRIVS

SEQ ID NO: 97960 - protein, 498 aa, Arabidopsis thaliana
  peptide (1)..(498): Ceres Seq. ID no. 13578818
  misc_feature (1)..(498): Homolog of NCBI NO: 15232379 NR Description: expressed protein [Arabidopsis thaliana]
  misc_feature (1)..(496): Homolog of NCBI NO: 15222300 NR Description: hypothetical protein [Arabidopsis thaliana]
  misc_feature (1)..(496): Homolog of NCBI NO: 15223699 NR Description: expressed protein [Arabidopsis thaliana]
  misc_feature (1)..(496): Homolog of NCBI NO: 15230360 NR Description: expressed protein [Arabidopsis thaliana]
  misc_feature (1)..(496): Homolog of NCBI NO: 25352604 NR Description: hypothetical protein F6F9.4 [imported] - thaliana >gi|10086483|gb|AAG12543.1|AC007797_3 Unknown Protein
  misc_feature (1)..(496): Homolog of NCBI NO: 25352602 NR Description: F14L17.20 protein - Arabidopsis thaliana Weak similarity to glyoxal oxidase (glx2) from Phanerochaete
  misc_feature (1)..(493): Homolog of NCBI NO: 15223754 NR Description: expressed protein [Arabidopsis thaliana]
  misc_feature (1)..(496): Homolog of NCBI NO: 34911116 NR Description: putative glyoxal oxidase [Oryza sativa (japonica group)] >gi|20161084|dbj|BAB90014.1| putative glyoxal oxidase
  misc_feature (1)..(497): Homolog of NCBI NO: 15220398 NR Description: glyoxal oxidase (glx1) -related [Arabidopsis >gi|9828629|gb|AAG00252.1|AC002130_17 F1N21.11 [Arabidopsis >gi|27754377|gb|AAO22637.1| putative glyoxal oxidase glyoxal
  misc_feature (1)..(497): Homolog of NCBI NO: 15241135 NR Description: expressed protein [Arabidopsis thaliana]
MHTAVTRFNTVILLDRTNIGPSRKALDRHRCRRDPKDAALKRDCYAHSVLFDLGTNQIRPLMIQTDTWCSSGQFLSDGSLLQTGGDKDGFKKIRKFEPCDPNETCDWVELQDTELITGRWYASNQILPDGSVIIVGGRGTNTVEYYPPRENGAVPFQFLADVEDKQMDNLYPYVHLLPDDDGGNLFIFANSRAVKYDHRINAVVKEYPPLDGGPRNYPSGGSSAMLAIQGDFTTAEILICGGAQSGAFTARAIDAPAHGTCGRIVATAADPVWVTEEMPFGRIMGDMVNLPTGEILIINGAQAGSQGFEMGSDPCLYPLLYRPDQPIGLRFMTLNPGTVPRMYHSTANLLPDGRILLAGSNPHYFYKFNAEFPTELRIEAFSPEYLSPDRANLRPEIQEIPQIIRYGEVFDVFVTVPLPVVGIIQMNWGSAPFATHSFSQGQRLVKLTVAPSVPDGVGRYRIQCTAPPNGAVSPPGYYMAFAVNQGVPSIARWIRIVS

SEQ ID NO: 97961 - DNA, 4270 bp, Arabidopsis thaliana
  misc_feature (1)..(4270): Ceres Seq. ID no. 13578874
  misc_feature: MA Experiment ID: 20000235 Result: Up-regulated in Transcription
  misc_feature: MA Experiment 20000235 PARAMETER Experiment Name: At_Siliques_P Parameter: Age (day) Value: 21
  misc_feature: MA Experiment 20000235 PARAMETER Experiment Name: At_Siliques_P Parameter: Organism Value: A. thaliana
  misc_feature: MA Experiment 20000235 PARAMETER Experiment Name: At_Siliques_P Parameter: Plant Line Value: WS
  misc_feature: MA Experiment 20000235 PARAMETER Experiment Name: At_Siliques_P Parameter: Tissue Value: 5-10mm Siliques vs. Whole Plant
  misc_feature: MA Experiment ID: 20000495 Result: Up-regulated in Transcription
  misc_feature: MA Experiment 20000495 PARAMETER Experiment Name: At_Guard_Cells_P Parameter: Harvest Date Value: 8/2/2002
  misc_feature: MA Experiment 20000495 PARAMETER Experiment Name: At_Guard_Cells_P Parameter: Organism Value: A. thaliana
  misc_feature: MA Experiment 20000495 PARAMETER Experiment Name: At_Guard_Cells_P Parameter: Tissue Value: Guard Cells vs. Leaves
atatttcgtctcgggacaattcacacgcactgaatcatctctctcacgaggactattcagccatttgcaaacgcacacacaaacgcacacgcgtttatttttttttcgccaaatcaaatctgaagagttcctgtatcttttaaccgctcttcttcttcttcagagagcttcgttgattgaacggaaaaaatggtggttcctggacggagaaccgtctgggattgtgtgattgagctgacaaagatggctcaagagaactgtgtcgatcctcgtctttgggcttctcagttatcatcgaatttgaaattcttcgccgtggagttaccgtcgacggagcttgcggaggttattgtttcgtacatttgttgggataataacgttcctattgtttggaagtttcttgaaagagctatggctttgaagcttgtttctcctctcgttgttcttgctcttctcgctgacagagttgttccaacccggtctacgcaacaagcagcttatagaatttacttggagctgctcaagagaaatatgttcaccattaaagatcatattagtggacctcactaccagaaggtcatgatttcagtatccaatattcttcgtctttcagagttatttgatctggacacaagcaaacctggtgtgcttttagtagagtttgtttttaagatggtgtcacaattgctagatgcagcgttaagtgatgaaggtttgctagagctaagccaagactcgagctcccagtggctagttaagtctcaagatatggaaattgatgctcctgagagatataatgaaaagactggatcactagagaagttacagagtttgaataccatcatggctattgagttgatagcggaattcctcagaaatacagtgattgcgagattgctatacttggtatcttccaacagggcttcgaagtggcatgaatttgtccagaaagtgcagcttcttggagaaaattcatcggctttaaaacactcaaaggttctaaattctggggatctattacaattgatttcgaatagacgatttgggtattcttatgatagcaaagtaacttcagcacggaaatccaatgcaattgtggattttggatctctctcttcctatgctggcttatgccatggagcaagtctctcttcactttggcttcctcttgatctagtatttgaagatgcaatggatggatatcaagtaaacccaactagtgcgattgaaatcattaccggtctagctaaaacacttaaagaaattaatgggagcacttggcatgacactttcttggggctttggatagcagctctccgacttgttcaaagggaaagggatcctattgagggacctattcctcgactggacacaaggctgtgcatgtcattatgtattgtgcctcttgtggtcgcaaaccttattgaagaggggaaatacgaatctgtcatggaaaagctgcgagatgaccttgttacaagtttgcaggtcctcggtgatttccctggattgctggctcctcccaaatgcgttgtttctgctgccaacaaggctgccacaaaggcaatcttgtttttgtctggtggcaatgttggaaagtcatgttttgatgtcataaacatgaaggacatgcctgtcaactgctctggaaacatgcgccacctgatagtcgaggcttgtattgcaagaaacatactggatatgtcggcttattcgtggcctggctatgttaatggccgaatcaaccaaatacctcagagtctgccgaatgaagtaccctgctggtcatcatttgtgaaaggggctccactaaatgccgcaatggtgaatacattagtttcagttcctgcttcaagcttagcagagctcgagaaactatttgaggttgcagtcaaaggatcggatgacgagaagatatctgctgctacagttctttgcggggcatctctcacacggggttggaacatacaggaacacactgttgaatatcttacaagattactatccccacccgttccagcagattattccagggctgaaaatcatttgattggttatgcctgcatgttgaatgttgttattgttgggataggatctgttgacagcattcaaattttctctttacatggcatggttccgcaacttgcttgctcactaatgccaatttgtgaagagtttggatcttacaccccgagtgtatcatggactcttccttctggagaagcaatatcagcatattctgttttctcaaatgcattcactcttcttttaaagctatggagattcaatcatcctcctattgagcatggtgtgggagatgttcccacagttggctcccaactcactcctgaacatcttctttcagtgcgtaattcttatcttgtttcgtcggagatccttgatagagaccgaaacagaaagagactttcagaagttgcaagggcagcatcttgccagcccgtgtttgtggactcgttccccaagctgaaagtctggtataggcagcaccaaagatgcatagcagccacattatctggacttacacatggatctcccgttcatcagacagttgaagcacttctcaacatgacgttcggaaaggtcagaggcagtcagactttaaatccagtaaattcgggcacaagcagttcatcaggagctgcaagtgaagatagcaatattagacctgagtttcctgcttgggatatcctcaaagccgttccatatgttgtcgatgctgctttaaccgcttgtactcatggaaggctttcgcctcgtcagttagctacagggctgaaagacttagcagattttctcccggcatcattagcaacgatagtaagctatttctcagctgaggtgagtagaggtgtttggaagccagtattcatgaacggcgtggattggccaagtccagctacaaatctatccactgttgaggaatatataacgaaaattcttgcaacaacaggcgtcgatatccctagccttgctccaggagggagttctccggcaacgcttcctttacctctagccgcatttgttagtctaaccattacttacaaaattgacaaagcctcagagcggtttctcaacctggctggcccagctctggagtgcttggctgcaggctgcccttggccttgcatgcccattgtagcttcattatggacccaaaaggcgaaacgttggtttgacttccttgttttctctgcctctcgcaccgtcttccttcacaaccaagacgctgtgattcagctcctcagaaactgcttcagtgccactctgggtttgaatgctgcccccatgtcaaatgatggtggcgttggagctcttcttggccatggattcggctctcatttctatggagggatctctcctgtagcaccagggattctttatctccgtatgtatcgtgctctcagagatactgtctccgtatcggaagagattctctctctgctgatacattcggtggaggatatagcccagaacaggctctcaaaggagaagctggaaaagctgaagacagtgaagaacggatcaagatacggccaaagttctctagcaacagcaatgactcaagtgaagcttgctgcttcgctgagtgcctcgttggtatggctaaccggtggcttaggtgtggtccacgttctcatcaaagaaacgatcccatcttggtttctatcaactgacaaatcagaccgagaacaaggaccatcggatctagttgcagagctaagaggtcatgcccttgcctactttgtggtcctatgtggagcacttacttggggcgtggattcaagatcatctgcatccaaacgccgccgccaagcaatcttgggaagccacttggagttcatcgcgagtgccttagatgggaaaatatcagtgggatgtgaaacagcaacttggcgaacatatatttccggtttggtgagtctaatggtgagctgtttgccgctctgggtgacagagatcgatacagaagtgttaaagagtctaagcaatggactaagaaaatggggaaaagacgagctagcgattgtattactctccttgggaggtctcaaaacaatggattacgcagctgatttcatcattcatttgcgttcatagcttcttaaaaagttttgatcttctccagatttcagatagttgtttgatagatgtttttcttctagtgtttgcttccttgttgtgacttgtgttctctagctccagtgttgtgtgatgaaatcaatcacgcatatgtatagagagaaacagg

SEQ ID NO: 97962 - protein, 1309 aa, Arabidopsis thaliana
  peptide (1)..(1309): Ceres Seq. ID no. 13578875
  misc_feature (214)..(382): Homolog of NCBI NO: 18407529 NR Description: hypothetical protein [Arabidopsis thaliana]
  misc_feature (13)..(1305): Homolog of NCBI NO: 33146668 NR Description: unknown protein [Oryza sativa (japonica
  misc_feature (376)..(960): Homolog of NCBI NO: 20197556 NR Description: unknown protein [Arabidopsis thaliana]
  misc_feature (8)..(247): Homolog of NCBI NO: 20197556 NR Description: unknown protein [Arabidopsis thaliana]
  misc_feature (214)..(382): Homolog of NCBI NO: 20197556 NR Description: unknown protein [Arabidopsis thaliana]
  misc_feature (487)..(1305): Homolog of NCBI NO: 33146669 NR Description: unknown protein [Oryza sativa (japonica
  misc_feature (963)..(1305): Homolog of NCBI NO: 1223579 NR Description: cDNA101 [Arabidopsis thaliana]
  misc_feature (987)..(1305): Homolog of NCBI NO: 34394478 NR Description: unknown protein [Oryza sativa (japonica
MVVPGRRTVWDCVIELTKMAQENCVDPRLWASQLSSNLKFFAVELPSTELAEVIVSYICWDNNVPIVWKFLERAMALKLVSPLVVLALLADRVVPTRSTQQAAYRIYLELLKRNMFTIKDHISGPHYQKVMISVSNILRLSELFDLDTSKPGVLLVEFVFKMVSQLLDAALSDEGLLELSQDSSSQWLVKSQDMEIDAPERYNEKTGSLEKLQSLNTIMAIELIAEFLRNTVIARLLYLVSSNRASKWHEFVQKVQLLGENSSALKHSKVLNSGDLLQLISNRRFGYSYDSKVTSARKSNAIVDFGSLSSYAGLCHGASLSSLWLPLDLVFEDAMDGYQVNPTSAIEIITGLAKTLKEINGSTWHDTFLGLWIAALRLVQRERDPIEGPIPRLDTRLCMSLCIVPLVVANLIEEGKYESVMEKLRDDLVTSLQVLGDFPGLLAPPKCVVSAANKAATKAILFLSGGNVGKSCFDVINMKDMPVNCSGNMRHLIVEACIARNILDMSAYSWPGYVNGRINQIPQSLPNEVPCWSSFVKGAPLNAAMVNTLVSVPASSLAELEKLFEVAVKGSDDEKISAATVLCGASLTRGWNIQEHTVEYLTRLLSPPVPADYSRAENHLIGYACMLNVVIVGIGSVDSIQIFSLHGMVPQLACSLMPICEEFGSYTPSVSWTLPSGEAISAYSVFSNAFTLLLKLWRFNHPPIEHGVGDVPTVGSQLTPEHLLSVRNSYLVSSEILDRDRNRKRLSEVARAASCQPVFVDSFPKLKVWYRQHQRCIAATLSGLTHGSPVHQTVEALLNMTFGKVRGSQTLNPVNSGTSSSSGAASEDSNIRPEFPAWDILKAVPYVVDAALTACTHGRLSPRQLATGLKDLADFLPASLATIVSYFSAEVSRGVWKPVFMNGVDWPSPATNLSTVEEYITKILATTGVDIPSLAPGGSSPATLPLPLAAFVSLTITYKIDKASERFLNLAGPALECLAAGCPWPCMPIVASLWTQKAKRWFDFLVFSASRTVFLHNQDAVIQLLRNCFSATLGLNAAPMSNDGGVGALLGHGFGSHFYGGISPVAPGILYLRMYRALRDTVSVSEEILSLLIHSVEDIAQNRLSKEKLEKLKTVKNGSRYGQSSLATAMTQVKLAASLSASLVWLTGGLGVVHVLIKETIPSWFLSTDKSDREQGPSDLVAELRGHALAYFVVLCGALTWGVDSRSSASKRRRQAILGSHLEFIASALDGKISVGCETATWRTYISGLVSLMVSCLPLWVTEIDTEVLKSLSNGLRKWGKDELAIVLLSLGGLKTMDYAADFIIHLRS

SEQ ID NO: 97963 - protein, 1291 aa, Arabidopsis thaliana
  peptide (1)..(1291): Ceres Seq. ID no. 13578876
  misc_feature (196)..(364): Homolog of NCBI NO: 18407529 NR Description: hypothetical protein [Arabidopsis thaliana]
  misc_feature (1)..(1287): Homolog of NCBI NO: 33146668 NR Description: unknown protein [Oryza sativa (japonica
  misc_feature (358)..(942): Homolog of NCBI NO: 20197556 NR Description: unknown protein [Arabidopsis thaliana]
  misc_feature (1)..(229): Homolog of NCBI NO: 20197556 NR Description: unknown protein [Arabidopsis thaliana]
  misc_feature (196)..(364): Homolog of NCBI NO: 20197556 NR Description: unknown protein [Arabidopsis thaliana]
  misc_feature (469)..(1287): Homolog of NCBI NO: 33146669 NR Description: unknown protein [Oryza sativa (japonica
  misc_feature (945)..(1287): Homolog of NCBI NO: 1223579 NR Description: cDNA101 [Arabidopsis thaliana]
  misc_feature (969)..(1287): Homolog of NCBI NO: 34394478 NR Description: unknown protein [Oryza sativa (japonica
MAQENCVDPRLWASQLSSNLKFFAVELPSTELAEVIVSYICWDNNVPIVWKFLERAMALKLVSPLVVLALLADRVVPTRSTQQAAYRIYLELLKRNMFTIKDHISGPHYQKVMISVSNILRLSELFDLDTSKPGVLLVEFVFKMVSQLLDAALSDEGLLELSQDSSSQWLVKSQDMEIDAPERYNEKTGSLEKLQSLNTIMAIELIAEFLRNTVIARLLYLVSSNRASKWHEFVQKVQLLGENSSALKHSKVLNSGDLLQLISNRRFGYSYDSKVTSARKSNAIVDFGSLSSYAGLCHGASLSSLWLPLDLVFEDAMDGYQVNPTSAIEIITGLAKTLKEINGSTWHDTFLGLWIAALRLVQRERDPIEGPIPRLDTRLCMSLCIVPLVVANLIEEGKYESVMEKLRDDLVTSLQVLGDFPGLLAPPKCVVSAANKAATKAILFLSGGNVGKSCFDVINMKDMPVNCSGNMRHLIVEACIARNILDMSAYSWPGYVNGRINQIPQSLPNEVPCWSSFVKGAPLNAAMVNTLVSVPASSLAELEKLFEVAVKGSDDEKISAATVLCGASLTRGWNIQEHTVEYLTRLLSPPVPADYSRAENHLIGYACMLNVVIVGIGSVDSIQIFSLHGMVPQLACSLMPICEEFGSYTPSVSWTLPSGEAISAYSVFSNAFTLLLKLWRFNHPPIEHGVGDVPTVGSQLTPEHLLSVRNSYLVSSEILDRDRNRKRLSEVARAASCQPVFVDSFPKLKVWYRQHQRCIAATLSGLTHGSPVHQTVEALLNMTFGKVRGSQTLNPVNSGTSSSSGAASEDSNIRPEFPAWDILKAVPYVVDAALTACTHGRLSPRQLATGLKDLADFLPASLATIVSYFSAEVSRGVWKPVFMNGVDWPSPATNLSTVEEYITKILATTGVDIPSLAPGGSSPATLPLPLAAFVSLTITYKIDKASERFLNLAGPALECLAAGCPWPCMPIVASLWTQKAKRWFDFLVFSASRTVFLHNQDAVIQLLRNCFSATLGLNAAPMSNDGGVGALLGHGFGSHFYGGISPVAPGILYLRMYRALRDTVSVSEEILSLLIHSVEDIAQNRLSKEKLEKLKTVKNGSRYGQSSLATAMTQVKLAASLSASLVWLTGGLGVVHVLIKETIPSWFLSTDKSDREQGPSDLVAELRGHALAYFVVLCGALTWGVDSRSSASKRRRQAILGSHLEFIASALDGKISVGCETATWRTYISGLVSLMVSCLPLWVTEIDTEVLKSLSNGLRKWGKDELAIVLLSLGGLKTMDYAADFIIHLRS

SEQ ID NO: 97964 - protein, 1235 aa, Arabidopsis thaliana
  peptide (1)..(1235): Ceres Seq. ID no. 13578877
  misc_feature (140)..(308): Homolog of NCBI NO: 18407529 NR Description: hypothetical protein [Arabidopsis thaliana]
  misc_feature (1)..(1231): Homolog of NCBI NO: 33146668 NR Description: unknown protein [Oryza sativa (japonica
  misc_feature (302)..(886): Homolog of NCBI NO: 20197556 NR Description: unknown protein [Arabidopsis thaliana]
  misc_feature (1)..(173): Homolog of NCBI NO: 20197556 NR Description: unknown protein [Arabidopsis thaliana]
  misc_feature (140)..(308): Homolog of NCBI NO: 20197556 NR Description: unknown protein [Arabidopsis thaliana]
  misc_feature (413)..(1231): Homolog of NCBI NO: 33146669 NR Description: unknown protein [Oryza sativa (japonica
  misc_feature (889)..(1231): Homolog of NCBI NO: 1223579 NR Description: cDNA101 [Arabidopsis thaliana]
  misc_feature (913)..(1231): Homolog of NCBI NO: 34394478 NR Description: unknown protein [Oryza sativa (japonica
MALKLVSPLVVLALLADRVVPTRSTQQAAYRIYLELLKRNMFTIKDHISGPHYQKVMISVSNILRLSELFDLDTSKPGVLLVEFVFKMVSQLLDAALSDEGLLELSQDSSSQWLVKSQDMEIDAPERYNEKTGSLEKLQSLNTIMAIELIAEFLRNTVIARLLYLVSSNRASKWHEFVQKVQLLGENSSALKHSKVLNSGDLLQLISNRRFGYSYDSKVTSARKSNAIVDFGSLSSYAGLCHGASLSSLWLPLDLVFEDAMDGYQVNPTSAIEIITGLAKTLKEINGSTWHDTFLGLWIAALRLVQRERDPIEGPIPRLDTRLCMSLCIVPLVVANLIEEGKYESVMEKLRDDLVTSLQVLGDFPGLLAPPKCVVSAANKAATKAILFLSGGNVGKSCFDVINMKDMPVNCSGNMRHLIVEACIARNILDMSAYSWPGYVNGRINQIPQSLPNEVPCWSSFVKGAPLNAAMVNTLVSVPASSLAELEKLFEVAVKGSDDEKISAATVLCGASLTRGWNIQEHTVEYLTRLLSPPVPADYSRAENHLIGYACMLNVVIVGIGSVDSIQIFSLHGMVPQLACSLMPICEEFGSYTPSVSWTLPSGEAISAYSVFSNAFTLLLKLWRFNHPPIEHGVGDVPTVGSQLTPEHLLSVRNSYLVSSEILDRDRNRKRLSEVARAASCQPVFVDSFPKLKVWYRQHQRCIAATLSGLTHGSPVHQTVEALLNMTFGKVRGSQTLNPVNSGTSSSSGAASEDSNIRPEFPAWDILKAVPYVVDAALTACTHGRLSPRQLATGLKDLADFLPASLATIVSYFSAEVSRGVWKPVFMNGVDWPSPATNLSTVEEYITKILATTGVDIPSLAPGGSSPATLPLPLAAFVSLTITYKIDKASERFLNLAGPALECLAAGCPWPCMPIVASLWTQKAKRWFDFLVFSASRTVFLHNQDAVIQLLRNCFSATLGLNAAPMSNDGGVGALLGHGFGSHFYGGISPVAPGILYLRMYRALRDTVSVSEEILSLLIHSVEDIAQNRLSKEKLEKLKTVKNGSRYGQSSLATAMTQVKLAASLSASLVWLTGGLGVVHVLIKETIPSWFLSTDKSDREQGPSDLVAELRGHALAYFVVLCGALTWGVDSRSSASKRRRQAILGSHLEFIASALDGKISVGCETATWRTYISGLVSLMVSCLPLWVTEIDTEVLKSLSNGLRKWGKDELAIVLLSLGGLKTMDYAADFIIHLRS

SEQ ID NO: 97965 - DNA, 2839 bp, Arabidopsis thaliana
  misc_feature (1)..(2839): Ceres Seq. ID no. 13578909
  misc_feature: MA Experiment ID: 20000794 Result: Up-regulated in Transcription
  misc_feature: MA Experiment 20000794 PARAMETER Experiment Name: At_Petals_P Parameter: Age (day) Value: 23-25 days
  misc_feature: MA Experiment 20000794 PARAMETER Experiment Name: At_Petals_P Parameter: Plant Line Value: WS
  misc_feature: MA Experiment 20000794 PARAMETER Experiment Name: At_Petals_P Parameter: Tissue Value: Petals vs. Whole plant
  misc_feature: MA Experiment ID: 20001451 Result: Down-regulated in Transcription
  misc_feature: MA Experiment 20001451 PARAMETER Experiment Name: At_Far-red-induction_P Parameter: Age (day) Value: 7
  misc_feature: MA Experiment 20001451 PARAMETER Experiment Name: At_Far-red-induction_P Parameter: Light Value: Far-red vs. White
  misc_feature: MA Experiment 20001451 PARAMETER Experiment Name: At_Far-red-induction_P Parameter: Organism Value: A. thaliana
  misc_feature: MA Experiment 20001451 PARAMETER Experiment Name: At_Far-red-induction_P Parameter: Plant Line Value: Columbia
  misc_feature: MA Experiment 20001451 PARAMETER Experiment Name: At_Far-red-induction_P Parameter: Timepoint (hr) Value: 24
  misc_feature: MA Experiment 20001451 PARAMETER Experiment Name: At_Far-red-induction_P Parameter: Tissue Value: Whole Plant
gtcaccgcaaactaggcagattatctggttttccggcggtttctcgttatctacgagagagtgagagaggaaatacctcggggtgaactcgctgcgtagccaaagcctcttcaattttgctcttttgttcaattccgtcgcttaattatctggttttgcgtattttgaagagtcagtttgacgaatttatgctgaaatttcgttctttctctgtttatctttcagcgacgatttttctgggtttttcagttttggatcaatccataatctgtcgtgattagggttttataccttgatgaggatttactgaattagttgtattaaagatggcgagaaaagctaacaatagttttttccttgaagaatggttaaggactgtgagtggaagtagtgtctctggtgatctagtgaagcaaaattctgctccatctgctaggtcgattattcaagcatggtctgagattcgtgaatctcttcaaaaccaaaactttgattcacgttaccttcaagctttgagagctttggttagctctgagtccactatccatgttgcagatccccaagcaaagctacttatttctatactagcttttcaagatgtatctcttccgtctgagtcttacacacttgttctcagactactctatgtgtggattaggaaagcatttcgaccgtctcaagcacttgttggtgtagcggttcaggccattcgtggcgttgttgatgacaggcgtaatctccaaccagccttagtagcgcagagtgttctggtttctggtgcgtttgcgtgtgttccttctctgtcaggagacgtgaaagtcttatgcttggaattgttatgcaggcttttggaagaagagtactctttagtgggatctcaagaagaacttgttcctgtagtgcttgcaggaattgggtatgctttatcttcttcgttggatgttcattacgtcagactattggatttattgtttggcatttggttaaaagacgagggtcctcgtggcactgtcacttacggtctgatgattcttcatttgattgagtgggttgtgtcaggttatatgcggtctaattctatcaacaagatgtctctttttgcgaacgaggtactagagacttctaaggaaaagtatgctgttttcgctgtcttcatggcagcagctggggtagtgagagcttccacggcaggattcagtagtggtgcacagagtttggagatttctaaactaagaaattcagctgaaaagcgaatagaatttgtagctcaaattttagtttctaatggtaatgttgttacacttccaaccacacagagagaaggtcccctgttgaagtgctttgctattgcattggctcgatgtgggtctgtttcttcctctgctcctctgcttttgtgtctcacttctgcattgttaactcaggtatttcctttaggccagatatatgaatcattttgcaatgcttttggcaaagagcctattggaccaagactcatttgggtcagggagcatctttctgatgttcttttcaaggaatcaggggccatatctggggctttctgcaatcaatattcatcagcaagtgaagagaacaagtatattgtggagaatatgatttgggatttctgtcaaaatctctacttacagcaccgtcaaattgctatgttgctttgtggtagaagatacattgcttggagacatcgagaaaattgcagaatcatctttccttatggttgtcgtctttgcgctagctgttacgaaacaatggctaaaaccaatagtgtctaaagaaagaaaaatggtgacatcagttaagatattagtttcgttctcctgtgtagagtatttcaggcatattcgtttacctgaatacatggagacaattagagaggtgatttcatgtgtccaggagaatgatgctccttgtgtttcatttgtagagtccattcctgcctatgatagcttgacgaatccgaaagacttgtttacgcaaaggataaaatatgaatggtcaagagatgatgtgcagacatctcgaatattgttttatcttcgagtaatcccaacttgcatcggacggttatctgcttctgccttcaggggagtggttgcatcaaccatgtttttatatattggacatcctaacagaaaagtggcgcaagcatctcatacgttgttggcagcatttctctcttcagcaaaagaatcagaggaggacgaacgaactcaattcaaagaacaacttgttttctattacatgcaacgatctttggaggtttaccctgagatcacaccttttgaaggtttagcttccggcgttgcaaccttggtccagcatctacctgcgggaagtcctgctatattttattctgttcatagccttgttgagaaggcttctacatttagcaccgaatcattgcaaggcagaaagtctgatcctggtaatcagattcttgagttgcttttgcgacttgtctctttggttgatatacaagtgttgccatatcttatgaagtcattggcacagctagttataaagttaccaaaagaaagacagaacgttgtgcttggtgaattgtatggtcaagtggctgagtcagacgatgtgattcgcaagccttctttggtctcttggctacagtcactgaactacttatgttctaataaccgtactgaagttttagcttctggatcaacgatagacacttcgaaccagttggctgctcgactctagggatctcctcatagtttacaaacatgtgaaatagaataaagtttgtatgacttgtatcatggaattatgttgaaaagaattataaattaacatcatctccatt

SEQ ID NO: 97966 - protein, 487 aa, Arabidopsis thaliana
  peptide (1)..(487): Ceres Seq. ID no. 13578910
MARKANNSFFLEEWLRTVSGSSVSGDLVKQNSAPSARSIIQAWSEIRESLQNQNFDSRYLQALRALVSSESTIHVADPQAKLLISILAFQDVSLPSESYTLVLRLLYVWIRKAFRPSQALVGVAVQAIRGVVDDRRNLQPALVAQSVLVSGAFACVPSLSGDVKVLCLELLCRLLEEEYSLVGSQEELVPVVLAGIGYALSSSLDVHYVRLLDLLFGIWLKDEGPRGTVTYGLMILHLIEWVVSGYMRSNSINKMSLFANEVLETSKEKYAVFAVFMAAAGVVRASTAGFSSGAQSLEISKLRNSAEKRIEFVAQILVSNGNVVTLPTTQREGPLLKCFAIALARCGSVSSSAPLLLCLTSALLTQVFPLGQIYESFCNAFGKEPIGPRLIWVREHLSDVLFKESGAISGAFCNQYSSASEENKYIVENMIWDFCQNLYLQHRQIAMLLCGRRYIAWRHRENCRIIFPYGCRLCASCYETMAKTNSV

SEQ ID NO: 97967 - protein, 334 aa, Arabidopsis thaliana
  peptide (1)..(334): Ceres Seq. ID no. 13578911
  misc_feature (61)..(205): Homolog of NCBI NO: 15221101 NR Description: expressed protein [Arabidopsis thaliana]
MVVVFALAVTKQWLKPIVSKERKMVTSVKILVSFSCVEYFRHIRLPEYMETIREVISCVQENDAPCVSFVESIPAYDSLTNPKDLFTQRIKYEWSRDDVQTSRILFYLRVIPTCIGRLSASAFRGVVASTMFLYIGHPNRKVAQASHTLLAAFLSSAKESEEDERTQFKEQLVFYYMQRSLEVYPEITPFEGLASGVATLVQHLPAGSPAIFYSVHSLVEKASTFSTESLQGRKSDPGNQILELLLRLVSLVDIQVLPYLMKSLAQLVIKLPKERQNVVLGELYGQVAESDDVIRKPSLVSWLQSLNYLCSNNRTEVLASGSTIDTSNQLAARL

SEQ ID NO: 97968 - protein, 311 aa, Arabidopsis thaliana
  peptide (1)..(311): Ceres Seq. ID no. 13578912
  misc_feature (38)..(182): Homolog of NCBI NO: 15221101 NR Description: expressed protein [Arabidopsis thaliana]
MVTSVKILVSFSCVEYFRHIRLPEYMETIREVISCVQENDAPCVSFVESIPAYDSLTNPKDLFTQRIKYEWSRDDVQTSRILFYLRVIPTCIGRLSASAFRGVVASTMFLYIGHPNRKVAQASHTLLAAFLSSAKESEEDERTQFKEQLVFYYMQRSLEVYPEITPFEGLASGVATLVQHLPAGSPAIFYSVHSLVEKASTFSTESLQGRKSDPGNQILELLLRLVSLVDIQVLPYLMKSLAQLVIKLPKERQNVVLGELYGQVAESDDVIRKPSLVSWLQSLNYLCSNNRTEVLASGSTIDTSNQLAARL

SEQ ID NO: 97969 - DNA, 1070 bp, Arabidopsis thaliana
  misc_feature (1)..(1070): Ceres Seq. ID no. 13578948
  misc_feature: MA Experiment ID: 20000180 Result: Up-regulated in Transcription
  misc_feature: MA Experiment 20000180 PARAMETER Experiment Name: At_Germinating_Seeds_P Parameter: Age (hr) Value: 24 vs. 0
  misc_feature: MA Experiment 20000180 PARAMETER Experiment Name: At_Germinating_Seeds_P Parameter: Tissue Value: Germinating Seeds
  misc_feature: MA Experiment ID: 20000794 Result: Up-regulated in Transcription
  misc_feature: MA Experiment 20000794 PARAMETER Experiment Name: At_Petals_P Parameter: Age (day) Value: 23-25 days
  misc_feature: MA Experiment 20000794 PARAMETER Experiment Name: At_Petals_P Parameter: Plant Line Value: WS
  misc_feature: MA Experiment 20000794 PARAMETER Experiment Name: At_Petals_P Parameter: Tissue Value: Petals vs. Whole plant
  misc_feature: MA Experiment ID: 20001904 Result: Up-regulated in Transcription
  misc_feature: MA Experiment 20001904 PARAMETER Experiment Name: At_Drought_Reproduction_P Parameter: Age (day) Value: 37
  misc_feature: MA Experiment 20001904 PARAMETER Experiment Name: At_Drought_Reproduction_P Parameter: Organism Value: A. thaliana
  misc_feature: MA Experiment 20001904 PARAMETER Experiment Name: At_Drought_Reproduction_P Parameter: Plant Line Value: WS
  misc_feature: MA Experiment 20001904 PARAMETER Experiment Name: At_Drought_Reproduction_P Parameter: Timepoint (day) Value: 7
  misc_feature: MA Experiment 20001904 PARAMETER Experiment Name: At_Drought_Reproduction_P Parameter: Tissue Value: Rosettes
  misc_feature: MA Experiment 20001904 PARAMETER Experiment Name: At_Drought_Reproduction_P Parameter: Treatment Value: Drought vs. No Drought
aatctcactttttccctttctctgtacatcatcatccttcaagctcggagctctctcttcccgccggcgatctcctccgcttctctccgattttaagtcgatcgaatggggaaaatcaagaaagtgaatcaaaggggtcatattgctacaccgtatccatcaccatgttgtaagaaagaatgggctggctcaacctgtccagtatgcttggagtctccacacaatgcggttcttctcctgtgttcgtcttatcacaaaggatgccgtccttacatgtgtgctacaagcagccgttttgccaactgccttgatcaatacaggaaatcctacggtaacgaaaactcaggacaacccgagcttttgtgtccactgtgtagaggtcaagtgaaaggctggactgttgtgaaagatgctcggatgcattttaactccaagagaaggacttgtatgcaggataactgttcctttttaggaaatttccgaaagctcaagaaacacatgaaggaaaaacacccacatgcttgcccaagagccattgatccagctttagaaactaaatggaagaggcttgagagggaaagagacagaagagacgtgataagcacgataatgtcatcgacaccaggtgctgttgtgttgggagattatgtgatagagccgcataaccgaggtgtttatgatgaagaagacgaagaagaagattacagctcagatgactctctaagcaacgggatactggatctagaatcatcatggcaaggacaaagccatcatattcggtttcttgatatggaatcaagtgacttcgcatcctcttccagctcccctgcttctccaagccgttcgcttcaccgtttgctctttccaaggaaccagagaggcggcaatagaggagcagtataaaaaggctaacatgactagccaattagccatacacagggaattggaaaaaaaaaactcgcagtcgtccctttcttttatttattttcatgtaaattattgtattctgtgtaattgtattattgtttctgcattgttgtactttaatgaggaatgatctcttatgcctc

SEQ ID NO: 97970 - protein, 265 aa, Arabidopsis thaliana
  peptide (1)..(265): Ceres Seq. ID no. 13578949
  misc_feature (1)..(265): Homolog of NCBI NO: 30699285 NR Description: expressed protein [Arabidopsis thaliana] unknown protein [Arabidopsis thaliana]
  misc_feature (1)..(263): Homolog of NCBI NO: 25365932 NR Description: unknown protein T32E8.10 [imported] - Arabidopsis
  misc_feature (23)..(213): Homolog of NCBI NO: 15236507 NR Description: expressed protein [Arabidopsis thaliana]
  misc_feature (23)..(213): Homolog of NCBI NO: 7487028 NR Description: hypothetical protein T15F16.1 - Arabidopsis >gi|3377813|gb|AAC28186.1| T15F16.1 gene product [Arabidopsis
  misc_feature (19)..(233): Homolog of NCBI NO: 15221290 NR Description: expressed protein [Arabidopsis thaliana]
  misc_feature (23)..(203): Homolog of NCBI NO: 38344827 NR Description: OSJNBa0064H22.8 [Oryza sativa (japonica
  misc_feature (78)..(194): Homolog of NCBI NO: 15230170 NR Description: expressed protein [Arabidopsis thaliana] gb|AAF16548.1~gene_id:K7P8.3~similar to unknown protein thaliana] >gi|19715579|gb|AAL91615.1| AT3g24740/K7P8_3
  misc_feature (24)..(83): Homolog of NCBI NO: 15230170 NR Description: expressed protein [Arabidopsis thaliana] gb|AAF16548.1~gene_id:K7P8.3~similar to unknown protein thaliana] >gi|19715579|gb|AAL91615.1| AT3g24740/K7P8_3
  misc_feature (26)..(204): Homolog of NCBI NO: 7486671 NR Description: hypothetical protein F8F16.230 - Arabidopsis >gi|2827536|emb|CAA16544.1| hypothetical protein [Arabidopsis >gi|7270044|emb|CAB79859.1| hypothetical protein [Arabidopsis
  misc_feature (26)..(204): Homolog of NCBI NO: 18417801 NR Description: expressed protein [Arabidopsis thaliana] expressed protein [Arabidopsis thaliana] AT4g31410/F8F16_230 [Arabidopsis thaliana]
MGKIKKVNQRGHIATPYPSPCCKKEWAGSTCPVCLESPHNAVLLLCSSYHKGCRPYMCATSSRFANCLDQYRKSYGNENSGQPELLCPLCRGQVKGWTVVKDARMHFNSKRRTCMQDNCSFLGNFRKLKKHMKEKHPHACPRAIDPALETKWKRLERERDRRDVISTIMSSTPGAVVLGDYVIEPHNRGVYDEEDEEEDYSSDDSLSNGILDLESSWQGQSHHIRFLDMESSDFASSSSSPASPSRSLHRLLFPRNQRGGNRGAV

SEQ ID NO: 97971 - protein, 209 aa, Arabidopsis thaliana
  peptide (1)..(209): Ceres Seq. ID no. 13578950
  misc_feature (1)..(209): Homolog of NCBI NO: 30699285 NR Description: expressed protein [Arabidopsis thaliana] unknown protein [Arabidopsis thaliana]
  misc_feature (1)..(207): Homolog of NCBI NO: 25365932 NR Description: unknown protein T32E8.10 [imported] - Arabidopsis
  misc_feature (1)..(157): Homolog of NCBI NO: 15236507 NR Description: expressed protein [Arabidopsis thaliana]
  misc_feature (1)..(157): Homolog of NCBI NO: 7487028 NR Description: hypothetical protein T15F16.1 - Arabidopsis >gi|3377813|gb|AAC28186.1| T15F16.1 gene product [Arabidopsis
  misc_feature (1)..(177): Homolog of NCBI NO: 15221290 NR Description: expressed protein [Arabidopsis thaliana]
  misc_feature (1)..(147): Homolog of NCBI NO: 38344827 NR Description: OSJNBa0064H22.8 [Oryza sativa (japonica
  misc_feature (22)..(138): Homolog of NCBI NO: 15230170 NR Description: expressed protein [Arabidopsis thaliana] gb|AAF16548.1~gene_id:K7P8.3~similar to unknown protein thaliana] >gi|19715579|gb|AAL91615.1| AT3g24740/K7P8_3
  misc_feature (1)..(27): Homolog of NCBI NO: 15230170 NR Description: expressed protein [Arabidopsis thaliana] gb|AAF16548.1~gene_id:K7P8.3~similar to unknown protein thaliana] >gi|19715579|gb|AAL91615.1| AT3g24740/K7P8_3
  misc_feature (1)..(148): Homolog of NCBI NO: 7486671 NR Description: hypothetical protein F8F16.230 - Arabidopsis >gi|2827536|emb|CAA16544.1| hypothetical protein [Arabidopsis >gi|7270044|emb|CAB79859.1| hypothetical protein [Arabidopsis
  misc_feature (1)..(148): Homolog of NCBI NO: 18417801 NR Description: expressed protein [Arabidopsis thaliana] expressed protein [Arabidopsis thaliana] AT4g31410/F8F16_230 [Arabidopsis thaliana]
MCATSSRFANCLDQYRKSYGNENSGQPELLCPLCRGQVKGWTVVKDARMHFNSKRRTCMQDNCSFLGNFRKLKKHMKEKHPHACPRAIDPALETKWKRLERERDRRDVISTIMSSTPGAVVLGDYVIEPHNRGVYDEEDEEEDYSSDDSLSNGILDLESSWQGQSHHIRFLDMESSDFASSSSSPASPSRSLHRLLFPRNQRGGNRGAV

SEQ ID NO: 97972 - protein, 161 aa, Arabidopsis thaliana; identical to SEQ ID NO: 48641
  peptide (1)..(161): Ceres Seq. ID no. 13578951
  misc_feature (1)..(161): Homolog of NCBI NO: 30699285 NR Description: expressed protein [Arabidopsis thaliana] unknown protein [Arabidopsis thaliana]
  misc_feature (1)..(159): Homolog of NCBI NO: 25365932 NR Description: unknown protein T32E8.10 [imported] - Arabidopsis
  misc_feature (1)..(109): Homolog of NCBI NO: 15236507 NR Description: expressed protein [Arabidopsis thaliana]
  misc_feature (1)..(109): Homolog of NCBI NO: 7487028 NR Description: hypothetical protein T15F16.1 - Arabidopsis >gi|3377813|gb|AAC28186.1| T15F16.1 gene product [Arabidopsis
  misc_feature (1)..(129): Homolog of NCBI NO: 15221290 NR Description: expressed protein [Arabidopsis thaliana]
  misc_feature (1)..(99): Homolog of NCBI NO: 38344827 NR Description: OSJNBa0064H22.8 [Oryza sativa (japonica
  misc_feature (1)..(90): Homolog of NCBI NO: 15230170 NR Description: expressed protein [Arabidopsis thaliana] gb|AAF16548.1~gene_id:K7P8.3~similar to unknown protein thaliana] >gi|19715579|gb|AAL91615.1| AT3g24740/K7P8_3
  misc_feature (1)..(100): Homolog of NCBI NO: 7486671 NR Description: hypothetical protein F8F16.230 - Arabidopsis >gi|2827536|emb|CAA16544.1| hypothetical protein [Arabidopsis >gi|7270044|emb|CAB79859.1| hypothetical protein [Arabidopsis
  misc_feature (1)..(100): Homolog of NCBI NO: 18417801 NR Description: expressed protein [Arabidopsis thaliana] expressed protein [Arabidopsis thaliana] AT4g31410/F8F16_230 [Arabidopsis thaliana]
  misc_feature (1)..(76): Homolog of NCBI NO: 18404727 NR Description: expressed protein [Arabidopsis thaliana] gb|AAF16548.1~gene_id:MPE11.8~similar to unknown protein thaliana] >gi|15983783|gb|AAL10488.1| AT3g25910/MPE11_6

SEQ ID NO: 97973 - DNA, 1392 bp, Arabidopsis thaliana
  misc_feature (1)..(1392): Ceres Seq. ID no. 13578952
  misc_feature: MA Experiment ID: 20001911 Result: Up-regulated in Transcription
  misc_feature: MA Experiment 20001911 PARAMETER Experiment Name: At_Drought_Reproduction_P Parameter: Age (day) Value: 40
  misc_feature: MA Experiment 20001911 PARAMETER Experiment Name: At_Drought_Reproduction_P Parameter: Organism Value: A. thaliana
  misc_feature: MA Experiment 20001911 PARAMETER Experiment Name: At_Drought_Reproduction_P Parameter: Plant Line Value: WS
  misc_feature: MA Experiment 20001911 PARAMETER Experiment Name: At_Drought_Reproduction_P Parameter: Timepoint (day) Value: 10
  misc_feature: MA Experiment 20001911 PARAMETER Experiment Name: At_Drought_Reproduction_P Parameter: Tissue Value: Flowers
  misc_feature: MA Experiment 20001911 PARAMETER Experiment Name: At_Drought_Reproduction_P Parameter: Treatment Value: Drought vs. No Drought
gctcacggtttagtacatgcacacaaagcaaaaacgctggtttgtcttttaaaaaaaaagaacttcgtttctcttcaattccgttaccgtcactgtcaccgttcacctccgtttatctcatcctcaccgttcatcttcttcgatctaactcgccgtcgttcaccttataatggacaccgtcaacgattccttttcgccgggatcttcccgaccttcgccggcgacgctttctcgtgaagattgctggagcgaggaagcgaccttcacgctcatccaagcctggggtaatcgctacgtcgacctcagccgaggtaatctccgtcagaaacactggcaagaggtggctaacgccgttaacgaccgtcactacaacaccggtcgaaacgtttccgccgccaaatcgcagccgtatcgcaccgacgttcagtgtaaaaaccggatcgatactctgaagaagaagtacaaagtcgagaaggctagggtttcggaatccaatcccggtgcctacatcagcccttggcctttcttctccgctctcgatgaccttctccgggaaagctttccgacgtctagtaatcctgattcaactgataacatcccgcaccagaggctatcacttccgatgtccattaatccagttccggtcgctccacgatcggcgatccccagacgtccggcgacatcgccggcgattatacctcacgccggtgacgatttactcggatttcgcgggaatctcaacgcattcgcggcagccgcagcggcggcggcgtgtccggcgtctgaagatgactcggaaggttcaaggtctagatcgagcggtcgtagcgggagtaacaagaagcgggagaggaaaattgagaagaagcaaggctacaaggaagttgccgacgcaattgagaggcttggacagatatacgagagagtcgaggagaagaagaggaaggaaatggttgaattggagaagcagagaatgagattcgctaaggaattggaatgccataggatgcaactgttcacggagatgcaggtacgtcttcataagctccggcgtacctctggctccaaaggaccgacttcctccgcctccgccgctcttgattatgggatgatggatttccctagttacttctagagcatcatgagtttgtgattgtagccattttgatgaagatgagagaaagtcagcgttcttccaccaaccaatagaagatatggtaacaaagaaacatgagtttctctttgttttgtaaattttaacccttttagaagattccgattccaacccaggattgaaaaaaaaattggtgacgttatattggtatatctacacaatgaaacagtacaagaaacagttttcagcaaaattatattggttagtattgtttggtt

SEQ ID NO: 97974 - protein, 321 aa, Arabidopsis thaliana
  peptide (1)..(321): Ceres Seq. ID no. 13578953
  misc_feature (1)..(321): Homolog of NCBI NO: 30694843 NR Description: expressed protein [Arabidopsis thaliana] unknown protein [Arabidopsis thaliana]
  misc_feature (1)..(308): Homolog of NCBI NO: 11357442 NR Description: hypothetical protein F14P22.220 - Arabidopsis >gi|6735380|emb|CAB68201.1| putative protein [Arabidopsis
  misc_feature (7)..(274): Homolog of NCBI NO: 18149189 NR Description: 6b-interacting protein 1 [Nicotiana tabacum]
  misc_feature (77)..(299): Homolog of NCBI NO: 18149189 NR Description: 6b-interacting protein 1 [Nicotiana tabacum]
  misc_feature (3)..(127): Homolog of NCBI NO: 10178132 NR Description: gb|AAF01512.1~gene_id:MOP10.9~similar to unknown
  misc_feature (186)..(305): Homolog of NCBI NO: 10178132 NR Description: gb|AAF01512.1~gene_id:MOP10.9~similar to unknown
  misc_feature (3)..(127): Homolog of NCBI NO: 18414919 NR Description: expressed protein [Arabidopsis thaliana] AT5g05550/MOP10_9 [Arabidopsis thaliana]
  misc_feature (186)..(301): Homolog of NCBI NO: 18414919 NR Description: expressed protein [Arabidopsis thaliana] AT5g05550/MOP10_9 [Arabidopsis thaliana]
  misc_feature (3)..(127): Homolog of NCBI NO: 30680994 NR Description: expressed protein [Arabidopsis thaliana]
  misc_feature (186)..(292): Homolog of NCBI NO: 30680994 NR Description: expressed protein [Arabidopsis thaliana]
MDTVNDSFSPGSSRPSPATLSREDCWSEEATFTLIQAWGNRYVDLSRGNLRQKHWQEVANAVNDRHYNTGRNVSAAKSQPYRTDVQCKNRIDTLKKKYKVEKARVSESNPGAYISPWPFFSALDDLLRESFPTSSNPDSTDNIPHQRLSLPMSINPVPVAPRSAIPRRPATSPAIIPHAGDDLLGFRGNLNAFAAAAAAAACPASEDDSEGSRSRSSGRSGSNKKRERKIEKKQGYKEVADAIERLGQIYERVEEKKRKEMVELEKQRMRFAKELECHRMQLFTEMQVRLHKLRRTSGSKGPTSSASAALDYGMMDFPSYF

SEQ ID NO: 97975 - protein, 170 aa, Arabidopsis thaliana
  peptide (1)..(170): Ceres Seq. ID no. 13578954
  misc_feature (1)..(170): Homolog of NCBI NO: 30694843 NR Description: expressed protein [Arabidopsis thaliana] unknown protein [Arabidopsis thaliana]
  misc_feature (1)..(157): Homolog of NCBI NO: 11357442 NR Description: hypothetical protein F14P22.220 - Arabidopsis >gi|6735380|emb|CAB68201.1| putative protein [Arabidopsis
  misc_feature (1)..(123): Homolog of NCBI NO: 18149189 NR Description: 6b-interacting protein 1 [Nicotiana tabacum]
  misc_feature (1)..(148): Homolog of NCBI NO: 18149189 NR Description: 6b-interacting protein 1 [Nicotiana tabacum]
  misc_feature (35)..(154): Homolog of NCBI NO: 10178132 NR Description: gb|AAF01512.1~gene_id:MOP10.9~similar to unknown
  misc_feature (35)..(150): Homolog of NCBI NO: 18414919 NR Description: expressed protein [Arabidopsis thaliana] AT5g05550/MOP10_9 [Arabidopsis thaliana]
  misc_feature (35)..(141): Homolog of NCBI NO: 30680994 NR Description: expressed protein [Arabidopsis thaliana]
  misc_feature (38)..(160): Homolog of NCBI NO: 12321891 NR Description: hypothetical protein; 14486-13072 [Arabidopsis
  misc_feature (38)..(141): Homolog of NCBI NO: 6016685 NR Description: hypothetical protein [Arabidopsis thaliana]
  misc_feature (38)..(141): Homolog of NCBI NO: 18399118 NR Description: expressed protein [Arabidopsis thaliana]
MSINPVPVAPRSAIPRRPATSPAIIPHAGDDLLGFRGNLNAFAAAAAAAACPASEDDSEGSRSRSSGRSGSNKKRERKIEKKQGYKEVADAIERLGQIYERVEEKKRKEMVELEKQRMRFAKELECHRMQLFTEMQVRLHKLRRTSGSKGPTSSASAALDYGMMDFPSYF

SEQ ID NO: 97976 - DNA, 2721 bp, Arabidopsis thaliana
  misc_feature (1)..(2721): Ceres Seq. ID no. 13578971
  misc_feature: MA Experiment ID: 20000185 Result: Up-regulated in Transcription
  misc_feature: MA Experiment 20000185 PARAMETER Experiment Name: At_Roots__P Parameter: Age (day) Value: 7 vs. 21
  misc_feature: MA Experiment 20000185 PARAMETER Experiment Name: At_Roots__P Parameter: Organism Value: A. thaliana
  misc_feature: MA Experiment 20000185 PARAMETER Experiment Name: At_Roots__P Parameter: Tissue Value: Roots vs. Whole Plant
  misc_feature: MA Experiment ID: 20001451 Result: Down-regulated in Transcription
  misc_feature: MA Experiment 20001451 PARAMETER Experiment Name: At_Far-red-induction_P Parameter: Age (day) Value: 7
  misc_feature: MA Experiment 20001451 PARAMETER Experiment Name: At_Far-red-induction_P Parameter: Light Value: Far-red vs. White
  misc_feature: MA Experiment 20001451 PARAMETER Experiment Name: At_Far-red-induction_P Parameter: Organism Value: A. thaliana
  misc_feature: MA Experiment 20001451 PARAMETER Experiment Name: At_Far-red-induction_P Parameter: Plant Line Value: Columbia
  misc_feature: MA Experiment 20001451 PARAMETER Experiment Name: At_Far-red-induction_P Parameter: Timepoint (hr) Value: 24
  misc_feature: MA Experiment 20001451 PARAMETER Experiment Name: At_Far-red-induction_P Parameter: Tissue Value: Whole Plant
gaaaataatttctcgaaagagaaaaaaagagagagagagagagagatggagcttctacagtactaaaagctgagtgaatcccaanaaatctccgccaacggaatattttttttctgggagctgaaaatcgttggtgacgatggcggattctctttctagggtttacggaactctgtttagtggtgttaatatatctctcttctcggatccaccgttgaaaaccccctgaagagtgtttttttttccgggtttaaggtcttttacgtttcgttttttcttgagatttcgtcttccgctgtgagtttctgttctcgcggcgagtttttgtgtagatctgagggttttcaaggcaagagaaagtgtcggtgatgtcgattttctcactcgcgagctcttctgattcacaaagagatgacctaataatggcgttgaaggcggtggttattgtatattgtgtggtttctctcgtcagtgttcaattagctgatgctcaacatgaaggactgccagtttcaccaacgttatcaccttcaacttcaccagttatcactgatctgcccctaccagctgaatttccgcggtttcacagaaagtatttcgcaccacaacaagcagaagcacctcagcattctcccccttatagtcgtttggtcgcttctgatcatccccctaccagctcacatttctccaaaccttccatgaaaaggaatgctcagtctcctggagccggcttggctgatattgctccagcacaatctagcaatggtgttcttcctgatgccttaactcagccacctttgtcgccctccatttcaaattgttgcaaatcagatatggtgcttaaacgaagaagtattggttgccactgcgtgtatcctataaaactggacatccttctcttgaatgtttcagaaactcctagttggaacatgttcttgaacgaatttgctacccagcttggtctcctacctcaccaaatcgagctgattaacttctatgtgctaagcttatcaaggatgaacatatcgatggatatcacccctcattctggaattagtttctcagctagtcaggcatccgcaataaactcttcccttatcagccacaagattcaatttagccctactttggtgggagattacaaacttctaaaccttacttggtttgaggcccctgcaccttcgcaagcacctctagtggcttcttcacctcataaagcaccatcacaaggatcctcagcaactacgtcagtaagatctccagggaaaaagaggcatcccaatcttattcttatcttttctatagccgctggtgtgcttatacttgccataatcactgtacttgttatttgttcccgcgcactccgagaagagaaagctccagatcctcacaaagaagctgtaaaaccaaggaacctggacgctggttcatttgggggatctcttcctcacccagcaagtacacggtttctgtcatatgaagaactcaaagaggcaactagcaattttgaatctgctagcattctaggagaaggtgggtttggcaaggtttacagaggcatcttagccgatggtactgctgtagcgattaagaagctcacaagtggtgggccacaaggtgataaagaattccaggtggagattgatatgcttagccgtcttcatcatcgtaatcttgtgaaacttgtgggttactatagtagtcgagattcttctcagcacctactttgttatgagcttgttccaaatggcagcctcgaggcttggctccatgggcctctcgggttgaactgtcctcttgattgggacaccagaatgaagattgcacttgatgctgcaagaggacttgcataccttcatgaagactcgcaaccctccgttatacacagagattttaaagcctctaatatactccttgaaaacaacttcaacgccaaagttgcagattttggcctagccaaacaagctcctgaaggcaggggtaatcacttatctactcgtgttatgggcacatttggatatgttgcgcctgaatatgcaatgacgggacacctactcgtcaagagtgatgtttatagttacggtgtggtccttctcgaattgttaactggtagaaaacctgtggatatgtcacaaccttcaggccaagaaaatctcgtcacttggacaaggccagttttaagagacaaagaccggttagaagaactagtcgattcaagacttgaaggaaaatacccgaaagaagatttcataagagtatgcacaatcgctgcagcttgtgttgcacctgaagctagccagagaccaacgatgggcgaagtggttcagtcacttaaaatggttcaacgggtggttgagtatcaagacccggttttaaacacttcaaataaagctcgtcctaaccggagacaatcatcagctacgttcgagtcagaagtaacctcttctatgttctcttctggtccttattctggtctaagcgcttttgatcatgaaaatattacacgaacaactgttttctcagaagatcttcacgaaggccgatgatagaagccagggttttcttctttttatttgtttttctcccacttacggtgagaaaatttccaccagagaagcttttgagtttgggacattattacagctctttggattttggattctcctttattggaggatagaattttgtatatatttttgcgttaattaattaatatttgcc

SEQ ID NO: 97977 - protein, 725 aa, Arabidopsis thaliana; identical to SEQ ID NO: 48790
  peptide (1)..(725): Ceres Seq. ID no. 13578972
  misc_feature (21)..(725): Homolog of NCBI NO: 34902828 NR Description: unnamed protein product [Oryza sativa (japonica group)] >gi|6498464|dbj|BAA87853.1| unnamed protein product
  misc_feature (144)..(658): Homolog of NCBI NO: 30680947 NR Description: protein kinase family [Arabidopsis thaliana] putative protein kinase [Arabidopsis thaliana]
  misc_feature (354)..(724): Homolog of NCBI NO: 20453162 NR Description: At5g56885 [Arabidopsis thaliana]
  misc_feature (354)..(724): Homolog of NCBI NO: 22327898 NR Description: protein kinase family [Arabidopsis thaliana]
  misc_feature (364)..(658): Homolog of NCBI NO: 25287641 NR Description: probable protein kinase [imported] - Arabidopsis >gi|4512705|gb|AAD21758.1| putative protein kinase [Arabidopsis
  misc_feature (352)..(699): Homolog of NCBI NO: 34903544 NR Description: putative protein kinase APK1AArabidopsis thaliana
  misc_feature (306)..(658): Homolog of NCBI NO: 34910468 NR Description: putative protein kinase [Oryza sativa (japonica group)] >gi|13366186|dbj|BAB39409.1| putative protein kinase
  misc_feature (366)..(655): Homolog of NCBI NO: 34894174 NR Description: putative protein kinase [Oryza sativa (japonica group)] >gi|13486635|dbj|BAB39873.1| putative protein kinase
  misc_feature (352)..(683): Homolog of NCBI NO: 15240947 NR Description: protein kinase family [Arabidopsis thaliana] contains similarity to protein kinase~gene_id:MBB18.10 thaliana] >gi|15983497|gb|AAL11616.1|AF424623_1
  misc_feature (364)..(720): Homolog of NCBI NO: 15222649 NR Description: protein kinase family [Arabidopsis thaliana]

SEQ ID NO: 97978 - protein, 707 aa, Arabidopsis thaliana; identical to SEQ ID NO: 48791
  peptide (1)..(707): Ceres Seq. ID no. 13578973
  misc_feature (3)..(707): Homolog of NCBI NO: 34902828 NR Description: unnamed protein product [Oryza sativa (japonica group)] >gi|6498464|dbj|BAA87853.1| unnamed protein product
  misc_feature (126)..(640): Homolog of NCBI NO: 30680947 NR Description: protein kinase family [Arabidopsis thaliana] putative protein kinase [Arabidopsis thaliana]
  misc_feature (336)..(706): Homolog of NCBI NO: 20453162 NR Description: At5g56885 [Arabidopsis thaliana]
  misc_feature (336)..(706): Homolog of NCBI NO: 22327898 NR Description: protein kinase family [Arabidopsis thaliana]
  misc_feature (346)..(640): Homolog of NCBI NO: 25287641 NR Description: probable protein kinase [imported] - Arabidopsis >gi|4512705|gb|AAD21758.1| putative protein kinase [Arabidopsis
  misc_feature (334)..(681): Homolog of NCBI NO: 34903544 NR Description: putative protein kinase APK1AArabidopsis thaliana
  misc_feature (288)..(640): Homolog of NCBI NO: 34910468 NR Description: putative protein kinase [Oryza sativa (japonica group)] >gi|13366186|dbj|BAB39409.1| putative protein kinase
  misc_feature (348)..(637): Homolog of NCBI NO: 34894174 NR Description: putative protein kinase [Oryza sativa (japonica group)] >gi|13486635|dbj|BAB39873.1| putative protein kinase
  misc_feature (334)..(665): Homolog of NCBI NO: 15240947 NR Description: protein kinase family [Arabidopsis thaliana] contains similarity to protein kinase~gene_id:MBB18.10 thaliana] >gi|15983497|gb|AAL11616.1|AF424623_1
  misc_feature (346)..(702): Homolog of NCBI NO: 15222649 NR Description: protein kinase family [Arabidopsis thaliana]

SEQ ID NO: 97979 - protein, 615 aa, Arabidopsis thaliana; identical to SEQ ID NO: 48792
  peptide (1)..(615): Ceres Seq. ID no. 13578974
  misc_feature (1)..(615): Homolog of NCBI NO: 34902828 NR Description: unnamed protein product [Oryza sativa (japonica group)] >gi|6498464|dbj|BAA87853.1| unnamed protein product
  misc_feature (34)..(548): Homolog of NCBI NO: 30680947 NR Description: protein kinase family [Arabidopsis thaliana] putative protein kinase [Arabidopsis thaliana]
  misc_feature (244)..(614): Homolog of NCBI NO: 20453162 NR Description: At5g56885 [Arabidopsis thaliana]
  misc_feature (244)..(614): Homolog of NCBI NO: 22327898 NR Description: protein kinase family [Arabidopsis thaliana]
  misc_feature (254)..(548): Homolog of NCBI NO: 25287641 NR Description: probable protein kinase [imported] - Arabidopsis >gi|4512705|gb|AAD21758.1| putative protein kinase [Arabidopsis
  misc_feature (242)..(589): Homolog of NCBI NO: 34903544 NR Description: putative protein kinase APK1AArabidopsis thaliana
  misc_feature (196)..(548): Homolog of NCBI NO: 34910468 NR Description: putative protein kinase [Oryza sativa (japonica group)] >gi|13366186|dbj|BAB39409.1| putative protein kinase
  misc_feature (256)..(545): Homolog of NCBI NO: 34894174 NR Description: putative protein kinase [Oryza sativa (japonica group)] >gi|13486635|dbj|BAB39873.1| putative protein kinase
  misc_feature (242)..(573): Homolog of NCBI NO: 15240947 NR Description: protein kinase family [Arabidopsis thaliana] contains similarity to protein kinase~gene_id:MBB18.10 thaliana] >gi|15983497|gb|AAL11616.1|AF424623_1
  misc_feature (254)..(610): Homolog of NCBI NO: 15222649 NR Description: protein kinase family [Arabidopsis thaliana]

SEQ ID NO: 97980 - DNA, 2598 bp, Arabidopsis thaliana
  misc_feature (1)..(2598): Ceres Seq. ID no. 13578980
  misc_feature: MA Experiment ID: 20000173 Result: Up-regulated in Transcription
  misc_feature: MA Experiment 20000173 PARAMETER Experiment Name: At_42deg_Heat_P Parameter: Age (day) Value: 14
  misc_feature: MA Experiment 20000173 PARAMETER Experiment Name: At_42deg_Heat_P Parameter: Organism Value: A. thaliana
  misc_feature: MA Experiment 20000173 PARAMETER Experiment Name: At_42deg_Heat_P Parameter: Plant Line Value: WS
  misc_feature: MA Experiment 20000173 PARAMETER Experiment Name: At_42deg_Heat_P Parameter: Temperature (deg C) Value: 42 vs. 22
  misc_feature: MA Experiment 20000173 PARAMETER Experiment Name: At_42deg_Heat_P Parameter: Timepoint (hr) Value: 6
  misc_feature: MA Experiment 20000173 PARAMETER Experiment Name: At_42deg_Heat_P Parameter: Tissue Value: Aerial
  misc_feature: MA Experiment ID: 20000180 Result: Up-regulated in Transcription
  misc_feature: MA Experiment 20000180 PARAMETER Experiment Name: At_Germinating_Seeds_P Parameter: Age (hr) Value: 24 vs. 0
  misc_feature: MA Experiment 20000180 PARAMETER Experiment Name: At_Germinating_Seeds_P Parameter: Tissue Value: Germinating Seeds
  misc_feature: MA Experiment ID: 20000184 Result: Up-regulated in Transcription
  misc_feature: MA Experiment 20000184 PARAMETER Experiment Name: At_Shoots__P Parameter: Age (day) Value: 7
  misc_feature: MA Experiment 20000184 PARAMETER Experiment Name: At_Shoots__P Parameter: Tissue Value: Shoots vs. Whole Plant
  misc_feature: MA Experiment ID: 20000438 Result: Up-regulated in Transcription
  misc_feature: MA Experiment 20000438 PARAMETER Experiment Name: At_Shoots__P Parameter: Age (day) Value: 14
  misc_feature: MA Experiment 20000438 PARAMETER Experiment Name: At_Shoots__P Parameter: Tissue Value: Shoots vs. Whole Plant
  misc_feature: MA Experiment ID: 20000794 Result: Up-regulated in Transcription
  misc_feature: MA Experiment 20000794 PARAMETER Experiment Name: At_Petals_P Parameter: Age (day) Value: 23-25 days
  misc_feature: MA Experiment 20000794 PARAMETER Experiment Name: At_Petals_P Parameter: Plant Line Value: WS
  misc_feature: MA Experiment 20000794 PARAMETER Experiment Name: At_Petals_P Parameter: Tissue Value: Petals vs. Whole plant
  misc_feature: MA Experiment ID: 20001248 Result: Down-regulated in Transcription
  misc_feature: MA Experiment 20001248 PARAMETER Experiment Name: At_Far-red-induction_P Parameter: Age (day) Value: 7
  misc_feature: MA Experiment 20001248 PARAMETER Experiment Name: At_Far-red-induction_P Parameter: Light Value: Far-red vs. White
  misc_feature: MA Experiment 20001248 PARAMETER Experiment Name: At_Far-red-induction_P Parameter: Organism Value: A. thaliana
  misc_feature: MA Experiment 20001248 PARAMETER Experiment Name: At_Far-red-induction_P Parameter: Plant Line Value: Columbia
  misc_feature: MA Experiment 20001248 PARAMETER Experiment Name: At_Far-red-induction_P Parameter: Timepoint (hr) Value: 4
  misc_feature: MA Experiment 20001248 PARAMETER Experiment Name: At_Far-red-induction_P Parameter: Tissue Value: Whole Plant
  misc_feature: MA Experiment ID: 20001757 Result: Down-regulated in Transcription
  misc_feature: MA Experiment 20001757 PARAMETER Experiment Name: At_50mM_NH4NO3_L-to-H_P Parameter: Timepoint (hr) Value: 6
  misc_feature: MA Experiment 20001757 PARAMETER Experiment Name: At_50mM_NH4NO3_L-to-H_P Parameter: Tissue Value: Leaf
  misc_feature: MA Experiment 20001757 PARAMETER Experiment Name: At_50mM_NH4NO3_L-to-H_P Parameter: Treatment Value: 50mM NH4NO3 vs 100mM Mannitol
  misc_feature: MA Experiment ID: 20001905 Result: Down-regulated in Transcription
  misc_feature: MA Experiment 20001905 PARAMETER Experiment Name: At_Drought_Reproduction_P Parameter: Age (day) Value: 40
  misc_feature: MA Experiment 20001905 PARAMETER Experiment Name: At_Drought_Reproduction_P Parameter: Organism Value: A. thaliana
  misc_feature: MA Experiment 20001905 PARAMETER Experiment Name: At_Drought_Reproduction_P Parameter: Plant Line Value: WS
  misc_feature: MA Experiment 20001905 PARAMETER Experiment Name: At_Drought_Reproduction_P Parameter: Timepoint (day) Value: 10
  misc_feature: MA Experiment 20001905 PARAMETER Experiment Name: At_Drought_Reproduction_P Parameter: Tissue Value: Rosettes
  misc_feature: MA Experiment 20001905 PARAMETER Experiment Name: At_Drought_Reproduction_P Parameter: Treatment Value: Drought vs. No Drought
ggtagaagagctactacttcatcaaccacaaccactatctcctcaaaatctctctctaccgatcgatggaagcagcagtgccacgtctcgtcaattgcggaccggagccaattcgattctccgtctcctcccgccgctccttcgtctccgggattcctcaccgtaataaacgctctcgccagattctagccgtcgctactgatcctaaacctacacagactagtccacccaagtccaccaccgtaaacggatcttcttctccatcgtctgcgtcaaaagtagtcaacaacaatgtttccactagaattaacgatgtatcaaaagagattaaaagagtacgagctcaaatggaagaagatgaacagttatctgtgttgatgagagggcttcgtggccagaatttgaaggattcggtttttgctgatgataatattcagctaaggcttgttgagactggtgaaagcagtgagttcttacctttggtatatgatccggagaccatttctgcctattgggggaaacggcctcgtgctgttgcttctcgagttatccagttgctttcggttgctggagggtttctatcgcgtattgcaggggatgtaataaacaagaaagttaaagagaatgaggttgctagggcaattgaattgagggaaattgtaacttccttgggtccagcatacattaaacttgggcaagctttgagtattcgaccagatatattgtcacccgctgcaatgacagagctacaaaagttgtgtgataaggtcccttcatatcctgatgatgtagcaatggctctaattgaggaggagcttgggaagccatggtacgacgtttattccgagctctctccttccccaatcgctgctgcatccctgggacaagtttataagggaagactaaaggaaaatggggatctagtggcagtaaaagtacagaggcctttcgttctcgagactgtgactgttgacttgtttgtgatacggaatttaggtctatttctgcggaagttccctcaggtgtcagtagatgttgttggactggttgatgaatgggctgctcgcttttttgaggagctggattatgttaacgagggagaaaatggaacatattttgcagaaatgatgaagaaagatcttccacaagttgttgtacctaaaacctaccaaaagtacacgtcaaggaaggttcttacaacctcatggattgatggtgagaaactgtcacaaagtattgagagtgatgtcggcgaacttgtgaatgttggtgttatttgttacctaaagcagttgctcgatactgggtttttccatgctgaccctcatcctggaaatatgatccgtaccccagacgggaaactagccatcctcgattttggtcttgttaccaagttgactgatgatcagaagtacggaatgattgaagccattgcacacttaattcaccgagattatgatgccatagtaaaagattttgttaaactcggtttcatccctgatggggtcaatctggctcctatattacctgtcctggccaaggtttttgatcaggcgctcgaaggtggtggagcaaaaaacatcaattttcaagagttggcagcagatttggcacagataacttttgactatcctttcagaattcccccttatttcgccctaattattagggcaattggtgtgctagaaggtatagctctagtggggaatcctgaatttgctattgtggatgaggcttatccttatatcgctcagcggctccttacggatgaatcacctcgcttgagagaggctttacgctacacaatatatgggaagactggcgtttttgatgctgaaagattcatcgatgtgatgcaagcctttgagactttcattacagcagccaaaagtggaggaggggaagatatgaatggaggcatggcagagatggctcttatgcaaagtaagacaagcagtttggttcctatgtttccagctagtgcatcccaaccggaccagccagttcaaacaagagtcgctttgtcttttctgctttcggagaaagggaacttcttccgcgagtttctattggatgagatagtaaaaggtatcgatgcaatcacaagagaacagctggtgcaagcaatggcggtattcggattcagaaacgcgacaccaatcttcggtatgttaccaccaacactgggacccttcaagcctgcagcacttcttccatccgtgacggaagaagacaaggtcatcttgaacaatgttcagaaagtaatcgagttccttaccgcaagaagctccatgtcgaataatcctgatcaggtagtagatgtatctcaagttgttcgggaactgcttccagtgttgcctggaatctctgccacagtactgcctgagattttgagtcggcttgggtcaagggtcatggcgagaatagtccgggatgcgtttttgtgaatattggattaaactttgtacaattgtgcatataagttgcattttaaagttactacaaagaaatatatagctgattaagttgcattattaacacatatacacttgatgttatatacacagttgcaatggaacaatgactttgccttcctta

SEQ ID NO: 97981 - protein, 793 aa, Arabidopsis thaliana
  peptide (1)..(793): Ceres Seq. ID no. 13578981
  misc_feature (249)..(368): Pfam Name: ABC1 family Pfam Description: ABC1 family
  misc_feature (129)..(598): Homolog of NCBI NO: 23042448 NR Description: hypothetical protein [Trichodesmium erythraeum
  misc_feature (652)..(687): Homolog of NCBI NO: 23042448 NR Description: hypothetical protein [Trichodesmium erythraeum
  misc_feature (139)..(721): Homolog of NCBI NO: 17232452 NR Description: hypothetical protein [Nostoc sp. PCC 7120]
  misc_feature (141)..(598): Homolog of NCBI NO: 22298493 NR Description: ORF_ID:tll0950~hypothetical protein
  misc_feature (652)..(686): Homolog of NCBI NO: 22298493 NR Description: ORF_ID:tll0950~hypothetical protein
  misc_feature (127)..(598): Homolog of NCBI NO: 16331408 NR Description: ABC1-like [Synechocystis sp. PCC 6803]
  misc_feature (127)..(592): Homolog of NCBI NO: 38344898 NR Description: OSJNBb0079B02.1 [Oryza sativa (japonica
  misc_feature (653)..(793): Homolog of NCBI NO: 38344898 NR Description: OSJNBb0079B02.1 [Oryza sativa (japonica
  misc_feature (140)..(598): Homolog of NCBI NO: 18412437 NR Description: expressed protein [Arabidopsis thaliana] F20B17.3 [Arabidopsis thaliana] >gi|18086325|gb|AAL57626.1|
  misc_feature (141)..(632): Homolog of NCBI NO: 37522693 NR Description: hypothetical protein glr3124 [Gloeobacter
MEAAVPRLVNCGPEPIRFSVSSRRSFVSGIPHRNKRSRQILAVATDPKPTQTSPPKSTTVNGSSSPSSASKVVNNNVSTRINDVSKEIKRVRAQMEEDEQLSVLMRGLRGQNLKDSVFADDNIQLRLVETGESSEFLPLVYDPETISAYWGKRPRAVASRVIQLLSVAGGFLSRIAGDVINKKVKENEVARAIELREIVTSLGPAYIKLGQALSIRPDILSPAAMTELQKLCDKVPSYPDDVAMALIEEELGKPWYDVYSELSPSPIAAASLGQVYKGRLKENGDLVAVKVQRPFVLETVTVDLFVIRNLGLFLRKFPQVSVDVVGLVDEWAARFFEELDYVNEGENGTYFAEMMKKDLPQVVVPKTYQKYTSRKVLTTSWIDGEKLSQSIESDVGELVNVGVICYLKQLLDTGFFHADPHPGNMIRTPDGKLAILDFGLVTKLTDDQKYGMIEAIAHLIHRDYDAIVKDFVKLGFIPDGVNLAPILPVLAKVFDQALEGGGAKNINFQELAADLAQITFDYPFRIPPYFALIIRAIGVLEGIALVGNPEFAIVDEAYPYIAQRLLTDESPRLREALRYTIYGKTGVFDAERFIDVMQAFETFITAAKSGGGEDMNGGMAEMALMQSKTSSLVPMFPASASQPDQPVQTRVALSFLLSEKGNFFREFLLDEIVKGIDAITREQLVQAMAVFGFRNATPIFGMLPPTLGPFKPAALLPSVTEEDKVILNNVQKVIEFLTARSSMSNNPDQVVDVSQVVRELLPVLPGISATVLPEILSRLGSRVMARIVRDAFL

SEQ ID NO: 97982 - protein, 699 aa, Arabidopsis thaliana
  peptide (1)..(699): Ceres Seq. ID no. 13578982
  misc_feature (155)..(274): Pfam Name: ABC1 family Pfam Description: ABC1 family
  misc_feature (35)..(504): Homolog of NCBI NO: 23042448 NR Description: hypothetical protein [Trichodesmium erythraeum
  misc_feature (558)..(593): Homolog of NCBI NO: 23042448 NR Description: hypothetical protein [Trichodesmium erythraeum
  misc_feature (45)..(627): Homolog of NCBI NO: 17232452 NR Description: hypothetical protein [Nostoc sp. PCC 7120]
  misc_feature (47)..(504): Homolog of NCBI NO: 22298493 NR Description: ORF_ID:tll0950~hypothetical protein
  misc_feature (558)..(592): Homolog of NCBI NO: 22298493 NR Description: ORF_ID:tll0950~hypothetical protein
  misc_feature (33)..(504): Homolog of NCBI NO: 16331408 NR Description: ABC1-like [Synechocystis sp. PCC 6803]
  misc_feature (33)..(498): Homolog of NCBI NO: 38344898 NR Description: OSJNBb0079B02.1 [Oryza sativa (japonica
  misc_feature (559)..(699): Homolog of NCBI NO: 38344898 NR Description: OSJNBb0079B02.1 [Oryza sativa (japonica
  misc_feature (46)..(504): Homolog of NCBI NO: 18412437 NR Description: expressed protein [Arabidopsis thaliana] F20B17.3 [Arabidopsis thaliana] >gi|18086325|gb|AAL57626.1|
  misc_feature (47)..(538): Homolog of NCBI NO: 37522693 NR Description: hypothetical protein glr3124 [Gloeobacter
MEEDEQLSVLMRGLRGQNLKDSVFADDNIQLRLVETGESSEFLPLVYDPETISAYWGKRPRAVASRVIQLLSVAGGFLSRIAGDVINKKVKENEVARAIELREIVTSLGPAYIKLGQALSIRPDILSPAAMTELQKLCDKVPSYPDDVAMALIEEELGKPWYDVYSELSPSPIAAASLGQVYKGRLKENGDLVAVKVQRPFVLETVTVDLFVIRNLGLFLRKFPQVSVDVVGLVDEWAARFFEELDYVNEGENGTYFAEMMKKDLPQVVVPKTYQKYTSRKVLTTSWIDGEKLSQSIESDVGELVNVGVICYLKQLLDTGFFHADPHPGNMIRTPDGKLAILDFGLVTKLTDDQKYGMIEAIAHLIHRDYDAIVKDFVKLGFIPDGVNLAPILPVLAKVFDQALEGGGAKNINFQELAADLAQITFDYPFRIPPYFALIIRAIGVLEGIALVGNPEFAIVDEAYPYIAQRLLTDESPRLREALRYTIYGKTGVFDAERFIDVMQAFETFITAAKSGGGEDMNGGMAEMALMQSKTSSLVPMFPASASQPDQPVQTRVALSFLLSEKGNFFREFLLDEIVKGIDAITREQLVQAMAVFGFRNATPIFGMLPPTLGPFKPAALLPSVTEEDKVILNNVQKVIEFLTARSSMSNNPDQVVDVSQVVRELLPVLPGISATVLPEILSRLGSRVMARIVRDAFL

SEQ ID NO: 97983 - protein, 689 aa, Arabidopsis thaliana
  peptide (1)..(689): Ceres Seq. ID no. 13578983
  misc_feature (145)..(264): Pfam Name: ABC1 family Pfam Description: ABC1 family
  misc_feature (25)..(494): Homolog of NCBI NO: 23042448 NR Description: hypothetical protein [Trichodesmium erythraeum
  misc_feature (548)..(583): Homolog of NCBI NO: 23042448 NR Description: hypothetical protein [Trichodesmium erythraeum
  misc_feature (35)..(617): Homolog of NCBI NO: 17232452 NR Description: hypothetical protein [Nostoc sp. PCC 7120]
  misc_feature (37)..(494): Homolog of NCBI NO: 22298493 NR Description: ORF_ID:tll0950~hypothetical protein
  misc_feature (548)..(582): Homolog of NCBI NO: 22298493 NR Description: ORF_ID:tll0950~hypothetical protein
  misc_feature (23)..(494): Homolog of NCBI NO: 16331408 NR Description: ABC1-like [Synechocystis sp. PCC 6803]
  misc_feature (23)..(488): Homolog of NCBI NO: 38344898 NR Description: OSJNBb0079B02.1 [Oryza sativa (japonica
  misc_feature (549)..(689): Homolog of NCBI NO: 38344898 NR Description: OSJNBb0079B02.1 [Oryza sativa (japonica
  misc_feature (36)..(494): Homolog of NCBI NO: 18412437 NR Description: expressed protein [Arabidopsis thaliana] F20B17.3 [Arabidopsis thaliana] >gi|18086325|gb|AAL57626.1|
  misc_feature (37)..(528): Homolog of NCBI NO: 37522693 NR Description: hypothetical protein glr3124 [Gloeobacter
MRGLRGQNLKDSVFADDNIQLRLVETGESSEFLPLVYDPETISAYWGKRPRAVASRVIQLLSVAGGFLSRIAGDVINKKVKENEVARAIELREIVTSLGPAYIKLGQALSIRPDILSPAAMTELQKLCDKVPSYPDDVAMALIEEELGKPWYDVYSELSPSPIAAASLGQVYKGRLKENGDLVAVKVQRPFVLETVTVDLFVIRNLGLFLRKFPQVSVDVVGLVDEWAARFFEELDYVNEGENGTYFAEMMKKDLPQVVVPKTYQKYTSRKVLTTSWIDGEKLSQSIESDVGELVNVGVICYLKQLLDTGFFHADPHPGNMIRTPDGKLAILDFGLVTKLTDDQKYGMIEAIAHLIHRDYDAIVKDFVKLGFIPDGVNLAPILPVLAKVFDQALEGGGAKNINFQELAADLAQITFDYPFRIPPYFALIIRAIGVLEGIALVGNPEFAIVDEAYPYIAQRLLTDESPRLREALRYTIYGKTGVFDAERFIDVMQAFETFITAAKSGGGEDMNGGMAEMALMQSKTSSLVPMFPASASQPDQPVQTRVALSFLLSEKGNFFREFLLDEIVKGIDAITREQLVQAMAVFGFRNATPIFGMLPPTLGPFKPAALLPSVTEEDKVILNNVQKVIEFLTARSSMSNNPDQVVDVSQVVRELLPVLPGISATVLPEILSRLGSRVMARIVRDAFL

SEQ ID NO: 97984 - DNA, 1197 bp, Arabidopsis thaliana
  misc_feature (1)..(1197): Ceres Seq. ID no. 13579055
  misc_feature: MA Experiment ID: 20000169 Result: Up-regulated in Transcription
  misc_feature: MA Experiment 20000169 PARAMETER Experiment Name: At_100uM_ABA_P Parameter: Age (day) Value: 14
  misc_feature: MA Experiment 20000169 PARAMETER Experiment Name: At_100uM_ABA_P Parameter: Organism Value: A. thaliana
  misc_feature: MA Experiment 20000169 PARAMETER Experiment Name: At_100uM_ABA_P Parameter: Plant Line Value: WS
  misc_feature: MA Experiment 20000169 PARAMETER Experiment Name: At_100uM_ABA_P Parameter: Timepoint (hr) Value: 6
  misc_feature: MA Experiment 20000169 PARAMETER Experiment Name: At_100uM_ABA_P Parameter: Tissue Value: Aerial
  misc_feature: MA Experiment 20000169 PARAMETER Experiment Name: At_100uM_ABA_P Parameter: Treatment Value: 100uM ABA vs. No Treatment
  misc_feature: MA Experiment ID: 20000180 Result: Up-regulated in Transcription
  misc_feature: MA Experiment 20000180 PARAMETER Experiment Name: At_Germinating_Seeds_P Parameter: Age (hr) Value: 24 vs. 0
  misc_feature: MA Experiment 20000180 PARAMETER Experiment Name: At_Germinating_Seeds_P Parameter: Tissue Value: Germinating Seeds
  misc_feature: MA Experiment ID: 20000436 Result: Up-regulated in Transcription
  misc_feature: MA Experiment 20000436 PARAMETER Experiment Name: At_Drought_P Parameter: Age (day) Value: 7
  misc_feature: MA Experiment 20000436 PARAMETER Experiment Name: At_Drought_P Parameter: Organism Value: A. thaliana
  misc_feature: MA Experiment 20000436 PARAMETER Experiment Name: At_Drought_P Parameter: Plant Line Value: WS
  misc_feature: MA Experiment 20000436 PARAMETER Experiment Name: At_Drought_P Parameter: Timepoint (hr) Value: 12
  misc_feature: MA Experiment 20000436 PARAMETER Experiment Name: At_Drought_P Parameter: Tissue Value: Whole Plant
  misc_feature: MA Experiment 20000436 PARAMETER Experiment Name: At_Drought_P Parameter: Treatment Value: Drought vs. No Drought
  misc_feature: MA Experiment ID: 20000437 Result: Up-regulated in Transcription
  misc_feature: MA Experiment 20000437 PARAMETER Experiment Name: At_Drought_P Parameter: Age (day) Value: 8
  misc_feature: MA Experiment 20000437 PARAMETER Experiment Name: At_Drought_P Parameter: Organism Value: A. thaliana
  misc_feature: MA Experiment 20000437 PARAMETER Experiment Name: At_Drought_P Parameter: Plant Line Value: WS
  misc_feature: MA Experiment 20000437 PARAMETER Experiment Name: At_Drought_P Parameter: Timepoint (hr) Value: 24
  misc_feature: MA Experiment 20000437 PARAMETER Experiment Name: At_Drought_P Parameter: Tissue Value: Whole Plant
  misc_feature: MA Experiment 20000437 PARAMETER Experiment Name: At_Drought_P Parameter: Treatment Value: Drought vs. No Drought
  misc_feature: MA Experiment ID: 20000496 Result: Up-regulated in Transcription
  misc_feature: MA Experiment 20000496 PARAMETER Experiment Name: At_Guard_Cells_P Parameter: Harvest Date Value: 7/19/2002
  misc_feature: MA Experiment 20000496 PARAMETER Experiment Name: At_Guard_Cells_P Parameter: Organism Value: Canola
  misc_feature: MA Experiment 20000496 PARAMETER Experiment Name: At_Guard_Cells_P Parameter: Tissue Value: Guard Cells vs. Leaves
  misc_feature: MA Experiment ID: 20001557 Result: Down-regulated in Transcription
  misc_feature: MA Experiment 20001557 PARAMETER Experiment Name: At_Drought_Soil_Dry_P Parameter: Age (day) Value: 27
  misc_feature: MA Experiment 20001557 PARAMETER Experiment Name: At_Drought_Soil_Dry_P Parameter: Organism Value: A. thaliana
  misc_feature: MA Experiment 20001557 PARAMETER Experiment Name: At_Drought_Soil_Dry_P Parameter: Plant Line Value: WS
  misc_feature: MA Experiment 20001557 PARAMETER Experiment Name: At_Drought_Soil_Dry_P Parameter: Post Timepoint (hr) Value: 3
  misc_feature: MA Experiment 20001557 PARAMETER Experiment Name: At_Drought_Soil_Dry_P Parameter: Post-Treatment Value: Re-Water vs. No Drought
  misc_feature: MA Experiment 20001557 PARAMETER Experiment Name: At_Drought_Soil_Dry_P Parameter: Timepoint (day) Value: 13
  misc_feature: MA Experiment 20001557 PARAMETER Experiment Name: At_Drought_Soil_Dry_P Parameter: Treatment Value: Drought vs. No Drought
  misc_feature: MA Experiment ID: 20001558 Result: Down-regulated in Transcription
  misc_feature: MA Experiment 20001558 PARAMETER Experiment Name: At_Drought_Soil_Dry_P Parameter: Age (day) Value: 27
  misc_feature: MA Experiment 20001558 PARAMETER Experiment Name: At_Drought_Soil_Dry_P Parameter: Organism Value: A. thaliana
  misc_feature: MA Experiment 20001558 PARAMETER Experiment Name: At_Drought_Soil_Dry_P Parameter: Plant Line Value: WS
  misc_feature: MA Experiment 20001558 PARAMETER Experiment Name: At_Drought_Soil_Dry_P Parameter: Post Timepoint (hr) Value: 6
  misc_feature: MA Experiment 20001558 PARAMETER Experiment Name: At_Drought_Soil_Dry_P Parameter: Post-Treatment Value: Re-Water vs. No Drought
  misc_feature: MA Experiment 20001558 PARAMETER Experiment Name: At_Drought_Soil_Dry_P Parameter: Timepoint (day) Value: 13
  misc_feature: MA Experiment 20001558 PARAMETER Experiment Name: At_Drought_Soil_Dry_P Parameter: Treatment Value: Drought vs. No Drought
  misc_feature: MA Experiment ID: 20001910 Result: Up-regulated in Transcription
  misc_feature: MA Experiment 20001910 PARAMETER Experiment Name: At_Drought_Reproduction_P Parameter: Age (day) Value: 37
  misc_feature: MA Experiment 20001910 PARAMETER Experiment Name: At_Drought_Reproduction_P Parameter: Organism Value: A. thaliana
  misc_feature: MA Experiment 20001910 PARAMETER Experiment Name: At_Drought_Reproduction_P Parameter: Plant Line Value: WS
  misc_feature: MA Experiment 20001910 PARAMETER Experiment Name: At_Drought_Reproduction_P Parameter: Timepoint (day) Value: 7
  misc_feature: MA Experiment 20001910 PARAMETER Experiment Name: At_Drought_Reproduction_P Parameter: Tissue Value: Flowers
  misc_feature: MA Experiment 20001910 PARAMETER Experiment Name: At_Drought_Reproduction_P Parameter: Treatment Value: Drought vs. No Drought
gattctcattccttcctcctgtttccgtaccgggggattttgtgatcatcaaaatcaaaaacaatcagatttcttctaccaaacgattaattgccttttgggatacgattcagggcttcttttggggcctctgtttgaattaacaccttgtttgctgcaaacaataataaggaaagataaacgagatggtgtcggacaatgagatgggtctggtattagctgtgtcgtcgagcgtcttcataggttccagcttcattttgaagaagaaaggtctcaagcgcgctgctgctaatggcacccgcgctggtttcggaggttatacatatttgttagagccactttggtgggtaggcttggtaacaatgacttttggagaaattgctaactttgtggcttacgtttatgcacctgctgtactagtcactcctcttggcgcattaagtataatcatcagtgctgttttggcacatttcttgttagacgaaaaacttaggaaaatgggagtttggggatgtgtttgttgcattgtgggctcagttatgatcgtcatacacgcacctcaggagcagactcccaattctgtagaagaaatctggaaactagcaatgcaaccagcttttctaatttacgtagccatatcaatgtcgatagtccttgctttgattctctactgtgaacctctctgcggccaaaccaacattcttgtgtatatcggaatttgttcattgatgggttctctcacagttatgagcatcaaggctgtagggattgccataaagttaacatttgaagggataaaccagatctggtatccagagacttggttttttgccatggttgcagcaatctgtgttgttatgcaaatgatttacctcaacaaggcgctggacacattcaacgcagcaattgtttctccaatctattatgtgatgttcacaacactcacaattgtcgctagtgcaatcatgttcaaggactggaatgggcaaaacacagacagcatagcctctgagatttgtggattcatcacagtgcttacaggaacggttatactccattccacgagagaagaggaacaagcttcgccacgacgaatgagatggcaggattcagggaagagctttgacgaagaacatttgacaagtttgtacagtcctgaatattaggaaggtaacaaagatttaaaccttgtgctga

SEQ ID NO: 97985 - protein, 326 aa, Arabidopsis thaliana
  peptide (1)..(326): Ceres Seq. ID no. 13579056
  misc_feature (1)..(300): Pfam Name: Protein of unknown function (DUF803) Pfam Description: Protein of unknown function (DUF803)
  misc_feature (1)..(326): Homolog of NCBI NO: 26449939 NR Description: unknown protein [Arabidopsis thaliana]
  misc_feature (1)..(326): Homolog of NCBI NO: 30681265 NR Description: expressed protein [Arabidopsis thaliana]
  misc_feature (1)..(326): Homolog of NCBI NO: 25412015 NR Description: hypothetical protein At2g21120 [imported] - thaliana >gi|4803931|gb|AAD29804.1| unknown protein [Arabidopsis
  misc_feature (1)..(300): Homolog of NCBI NO: 18409942 NR Description: expressed protein [Arabidopsis thaliana] unknown protein [Arabidopsis thaliana]
  misc_feature (1)..(295): Homolog of NCBI NO: 25406128 NR Description: unknown protein F17M19.5 [imported] - Arabidopsis
  misc_feature (1)..(295): Homolog of NCBI NO: 18399280 NR Description: purine permease - related [Arabidopsis thaliana]
  misc_feature (1)..(295): Homolog of NCBI NO: 15229534 NR Description: purine permease - related [Arabidopsis thaliana] gb|AAF34307.1~gene_id:F14O13.5~similar to unknown protein
  misc_feature (1)..(295): Homolog of NCBI NO: 18414079 NR Description: expressed protein [Arabidopsis thaliana]
  misc_feature (1)..(295): Homolog of NCBI NO: 21593618 NR Description: unknown [Arabidopsis thaliana]
  misc_feature (1)..(301): Homolog of NCBI NO: 20161440 NR Description: B1065E10.15 [Oryza sativa (japonica
MVSDNEMGLVLAVSSSVFIGSSFILKKKGLKRAAANGTRAGFGGYTYLLEPLWWVGLVTMTFGEIANFVAYVYAPAVLVTPLGALSIIISAVLAHFLLDEKLRKMGVWGCVCCIVGSVMIVIHAPQEQTPNSVEEIWKLAMQPAFLIYVAISMSIVLALILYCEPLCGQTNILVYIGICSLMGSLTVMSIKAVGIAIKLTFEGINQIWYPETWFFAMVAAICVVMQMIYLNKALDTFNAAIVSPIYYVMFTTLTIVASAIMFKDWNGQNTDSIASEICGFITVLTGTVILHSTREEEQASPRRMRWQDSGKSFDEEHLTSLYSPEY

SEQ ID NO: 97986 - protein, 320 aa, Arabidopsis thaliana
  peptide (1)..(320): Ceres Seq. ID no. 13579057
  misc_feature (1)..(294): Pfam Name: Protein of unknown function (DUF803) Pfam Description: Protein of unknown function (DUF803)
  misc_feature (1)..(320): Homolog of NCBI NO: 26449939 NR Description: unknown protein [Arabidopsis thaliana]
  misc_feature (1)..(320): Homolog of NCBI NO: 30681265 NR Description: expressed protein [Arabidopsis thaliana]
  misc_feature (1)..(320): Homolog of NCBI NO: 25412015 NR Description: hypothetical protein At2g21120 [imported] - thaliana >gi|4803931|gb|AAD29804.1| unknown protein [Arabidopsis
  misc_feature (1)..(294): Homolog of NCBI NO: 18409942 NR Description: expressed protein [Arabidopsis thaliana] unknown protein [Arabidopsis thaliana]
  misc_feature (1)..(289): Homolog of NCBI NO: 25406128 NR Description: unknown protein F17M19.5 [imported] - Arabidopsis
  misc_feature (1)..(289): Homolog of NCBI NO: 18399280 NR Description: purine permease - related [Arabidopsis thaliana]
  misc_feature (1)..(289): Homolog of NCBI NO: 15229534 NR Description: purine permease - related [Arabidopsis thaliana] gb|AAF34307.1~gene_id:F14O13.5~similar to unknown protein
  misc_feature (1)..(289): Homolog of NCBI NO: 18414079 NR Description: expressed protein [Arabidopsis thaliana]
  misc_feature (1)..(289): Homolog of NCBI NO: 21593618 NR Description: unknown [Arabidopsis thaliana]
  misc_feature (1)..(295): Homolog of NCBI NO: 20161440 NR Description: B1065E10.15 [Oryza sativa (japonica
MGLVLAVSSSVFIGSSFILKKKGLKRAAANGTRAGFGGYTYLLEPLWWVGLVTMTFGEIANFVAYVYAPAVLVTPLGALSIIISAVLAHFLLDEKLRKMGVWGCVCCIVGSVMIVIHAPQEQTPNSVEEIWKLAMQPAFLIYVAISMSIVLALILYCEPLCGQTNILVYIGICSLMGSLTVMSIKAVGIAIKLTFEGINQIWYPETWFFAMVAAICVVMQMIYLNKALDTFNAAIVSPIYYVMFTTLTIVASAIMFKDWNGQNTDSIASEICGFITVLTGTVILHSTREEEQASPRRMRWQDSGKSFDEEHLTSLYSPEY

SEQ ID NO: 97987 - protein, 267 aa, Arabidopsis thaliana
  peptide (1)..(267): Ceres Seq. ID no. 13579058
  misc_feature (1)..(241): Pfam Name: Protein of unknown function (DUF803) Pfam Description: Protein of unknown function (DUF803)
  misc_feature (1)..(267): Homolog of NCBI NO: 26449939 NR Description: unknown protein [Arabidopsis thaliana]
  misc_feature (1)..(267): Homolog of NCBI NO: 30681265 NR Description: expressed protein [Arabidopsis thaliana]
  misc_feature (1)..(267): Homolog of NCBI NO: 25412015 NR Description: hypothetical protein At2g21120 [imported] - thaliana >gi|4803931|gb|AAD29804.1| unknown protein [Arabidopsis
  misc_feature (1)..(241): Homolog of NCBI NO: 18409942 NR Description: expressed protein [Arabidopsis thaliana] unknown protein [Arabidopsis thaliana]
  misc_feature (1)..(236): Homolog of NCBI NO: 25406128 NR Description: unknown protein F17M19.5 [imported] - Arabidopsis
  misc_feature (1)..(236): Homolog of NCBI NO: 18399280 NR Description: purine permease - related [Arabidopsis thaliana]
  misc_feature (1)..(236): Homolog of NCBI NO: 15229534 NR Description: purine permease - related [Arabidopsis thaliana] gb|AAF34307.1~gene_id:F14O13.5~similar to unknown protein
  misc_feature (1)..(236): Homolog of NCBI NO: 18414079 NR Description: expressed protein [Arabidopsis thaliana]
  misc_feature (1)..(236): Homolog of NCBI NO: 21593618 NR Description: unknown [Arabidopsis thaliana]
  misc_feature (1)..(242): Homolog of NCBI NO: 20161440 NR Description: B1065E10.15 [Oryza sativa (japonica
MTFGEIANFVAYVYAPAVLVTPLGALSIIISAVLAHFLLDEKLRKMGVWGCVCCIVGSVMIVIHAPQEQTPNSVEEIWKLAMQPAFLIYVAISMSIVLALILYCEPLCGQTNILVYIGICSLMGSLTVMSIKAVGIAIKLTFEGINQIWYPETWFFAMVAAICVVMQMIYLNKALDTFNAAIVSPIYYVMFTTLTIVASAIMFKDWNGQNTDSIASEICGFITVLTGTVILHSTREEEQASPRRMRWQDSGKSFDEEHLTSLYSPEY

SEQ ID NO: 97988 - DNA, 3234 bp, Arabidopsis thaliana
  misc_feature (1)..(3234): Ceres Seq. ID no. 13579066
  misc_feature: MA Experiment ID: 20000307 Result: Down-regulated in Transcription
  misc_feature: MA Experiment 20000307 PARAMETER Experiment Name: At_Germinating_Seeds_Sub_P Parameter: Age (hr) Value: 24 vs. 0
  misc_feature: MA Experiment 20000307 PARAMETER Experiment Name: At_Germinating_Seeds_Sub_P Parameter: Organism Value: A. thaliana
  misc_feature: MA Experiment 20000307 PARAMETER Experiment Name: At_Germinating_Seeds_Sub_P Parameter: Plant Line Value: WS
  misc_feature: MA Experiment 20000307 PARAMETER Experiment Name: At_Germinating_Seeds_Sub_P Parameter: Tissue Value: Germinating Seeds
ggatgtgatcgaaacaaaaagctctttgcttcttcttcgtccatttctcgtagcacacttttcacaaagaagatgggttcttcacaatctacgcaaatggaagacgaagaagaagaagaagaggaaactgacaatgaagaagaagaagaagaagataatggcagatcaaacacaagacaattagacaatctcctagtaaagaaagttctagaacaagagcctgagatgttaccatgtcacgcttcagcttcaccactctcaccacaactatcatctctcggtactccaaggcttggaccatcgattaaagtctgggatccttacaacgtcctctctccgccgccgcaaccgccgtctatcttctctcgaatcgtgtctggtgatgaagatcgagctgtgacagaggtttatctgattagccatggtgagtctgatcttaatcttaaacctgatttgattggtgggagatgtcatgtagctgctcttactgctaatggtaaacgtcaagctagggctcttgctgttttcttcaaatctcaaggtgttcggtttaattcggtttattcgtcacctctagatcgagctagatccatggctgtttctgtttgtcaggaaatgagttttccggaggagcatgtacaatcttcggatgctgttattgagatgagtttaggggattgggaaggctgtaatcaagcagagatttatagtcctgaaactttgagtttgattgaaaggtgccaacctgatttcacagctccatctggagaatcactgaggcaagtagagtttcgaatggttcagtttctaaacgggacagtctcaggagttgcagagaagcttaggtcagattattcttccactacgaatcacaatgaaactcatgagcgtgatggtggtgtgtcacttgcttcgactaactgggacttactacacaagcatcgtcccagtcttacaaggaagaaatctggtaaaagcaggcttcaagtgatgactaatcacgaacctgacgatggaaactccccaagggaagaagttaatcataatcacactgacctaagtgattcgtcttccttaatctcgaattgtgtcggggttttcacgcattctttgcctataaagtgtcttttaaccggaatcctcggttgcagtccggtaatgactcataagatctgtgtagaagactcttcagtgactgtgttacaacattcatggagaaacgggtggcagatcaaacgaatgaatgatactgctcatcttagattgtttaaaaaagcactgttttgttccgtctctcgtcttctccacacggagagacacacagagagacaaaacctaacaacgctgttcaacagatatgtcgacaaaacagatgttttctcatggaactctgtcatcgccgacctcgctcgtagcggtgattctgctgaagctcttctcgctttttcctcaatgcggaagctttctctatacccaactcgctctagctttccttgcgccattaaagcatgttcgtctctttttgatatcttctccggcaaacagacccatcagcaagcttttgtcttcggttatcaatccgacatctttgtgtcttcggctttgatcgttatgtattcaacttgtgggaaactggaggatgcacggaaagtgttcgacgaaattcccaagagaaatattgtatcttggacttcgatgattcgagggtatgatcttaacggtaatgcccttgatgctgtttctcttttcaaggatctattggtcgatgaaaatgatgatgacgatgcaatgtttcttgattctatgggtttggtttcggtaatctctgcttgttctcgtgttcctgctaagggtttaacggaatctattcatagctttgtgattaagagaggttttgatagaggagtgagtgttggtaatactcttttggatgcttatgctaagggtggagaaggaggtgttgctgtggcgagaaaaatctttgatcagattgtggataaggatcgtgtttcgtataattcgattatgagtgtgtatgctcagagtgggatgtctaatgaggcttttgaggtttttcgtagacttgttaagaataaagttgtgacctttaacgccattacattgtctactgtgttgttggcggtctcgcattcaggtgctctgcgtattggaaagtgtatacatgatcaggtaataaggatgggtcttgaggatgatgtgatagtggggacgtcgataattgatatgtattgcaaatgcggaagagttgagacggcgagaaaagcatttgatcgaatgaaaaacaagaatgttaggtcgtggaccgccatgattgctggatatggaatgcacggccacgcggctaaagcgttagagttattccctgctatgatcgattcaggggttcgaccaaattacattacttttgtatcagtgttagctgcttgcagtcatgcgggtcttcatgtggaaggctggcgctggtttaacgcaatgaaggggagatttggtgtggaaccagggttagaacactacggttgtatggttgatcttctaggtagagctgggtttcttcagaaagcttatgatttgattcagagaatgaagatgaagccggactctatcatctggagctcacttcttgcagcttgtagaattcacaagaacgtggagctagctgagatatccgtggcgcgtttgtttgaattggactcttcgaattgcggttactacatgctgctttcgcatatctacgctgatgcgggtcgttggaaagatgttgagagggtgagaatgatcatgaagaatcgcggattggtgaaaccgccaggttttagtctactcgagttgaatggtgaggttcatgtgttcttgatcggagacgaagagcatcctcagcgtgagaagatttacgagtttttagcagaactgaacaggaagctgttagaggcaggttacgtatcgaacacgtcatctgtatgtcatgatgttgatgaggaagagaaagagatgacactgagagttcacagcgagaaactagcgattgcgtttgggatcatgaacacggttcctggctcgacggttaatgtggtcaagaatctgagagtttgcagcgattgtcacaatgtgatcaagttgatttcaaagattgttgatagagagtttgtggttagagatgcgaagaggtttcaccatttcaaagatggtggatgttcctgtggagattactggtga

SEQ ID NO: 97989 - protein, 1077 aa, Arabidopsis thaliana
  peptide (1)..(1077): Ceres Seq. ID no. 13579067
  misc_feature (134)..(315): Pfam Name: Phosphoglycerate mutase family Pfam Description: Phosphoglycerate mutase family
  misc_feature (25)..(422): Homolog of NCBI NO: 9279667 NR Description: gene_id:MDJ14.7~similar to unknown [Arabidopsis thaliana] >gi|26449922|dbj|BAC42082.1| unknown
  misc_feature (441)..(1077): Homolog of NCBI NO: 34394298 NR Description: putative pentatricopeptide (PPR)
  misc_feature (25)..(422): Homolog of NCBI NO: 18391446 NR Description: expressed protein [Arabidopsis thaliana] At1g12850/F13K23_8 [Arabidopsis thaliana]
  misc_feature (25)..(422): Homolog of NCBI NO: 21554168 NR Description: putative fructose-2,6-bisphosphatase [Arabidopsis
  misc_feature (25)..(410): Homolog of NCBI NO: 25518294 NR Description: hypothetical protein F13K23.10 [imported] - thaliana >gi|8698732|gb|AAF78490.1|AC012187_10 Contains weak to LIP1 gene product gi|7297743 from Drosophila melanogaster
  misc_feature (434)..(1077): Homolog of NCBI NO: 18418348 NR Description: pentatricopeptide (PPR) repeat-containing protein
  misc_feature (25)..(422): Homolog of NCBI NO: 17902578 NR Description: putative fructose-2,6-bisphosphatase [Silene
  misc_feature (384)..(1077): Homolog of NCBI NO: 11994419 NR Description: selenium-binding protein-like [Arabidopsis
  misc_feature (449)..(1077): Homolog of NCBI NO: 15234831 NR Description: pentatricopeptide (PPR) repeat-containing protein
  misc_feature (458)..(1077): Homolog of NCBI NO: 11281371 NR Description: hypothetical protein T8H10.30 - Arabidopsis >gi|6706414|emb|CAB66100.1| putative protein [Arabidopsis
GCDRNKKLFASSSSISRSTLFTKKMGSSQSTQMEDEEEEEEETDNEEEEEEDNGRSNTRQLDNLLVKKVLEQEPEMLPCHASASPLSPQLSSLGTPRLGPSIKVWDPYNVLSPPPQPPSIFSRIVSGDEDRAVTEVYLISHGESDLNLKPDLIGGRCHVAALTANGKRQARALAVFFKSQGVRFNSVYSSPLDRARSMAVSVCQEMSFPEEHVQSSDAVIEMSLGDWEGCNQAEIYSPETLSLIERCQPDFTAPSGESLRQVEFRMVQFLNGTVSGVAEKLRSDYSSTTNHNETHERDGGVSLASTNWDLLHKHRPSLTRKKSGKSRLQVMTNHEPDDGNSPREEVNHNHTDLSDSSSLISNCVGVFTHSLPIKCLLTGILGCSPVMTHKICVEDSSVTVLQHSWRNGWQIKRMNDTAHLRLFKKALFCSVSRLLHTERHTERQNLTTLFNRYVDKTDVFSWNSVIADLARSGDSAEALLAFSSMRKLSLYPTRSSFPCAIKACSSLFDIFSGKQTHQQAFVFGYQSDIFVSSALIVMYSTCGKLEDARKVFDEIPKRNIVSWTSMIRGYDLNGNALDAVSLFKDLLVDENDDDDAMFLDSMGLVSVISACSRVPAKGLTESIHSFVIKRGFDRGVSVGNTLLDAYAKGGEGGVAVARKIFDQIVDKDRVSYNSIMSVYAQSGMSNEAFEVFRRLVKNKVVTFNAITLSTVLLAVSHSGALRIGKCIHDQVIRMGLEDDVIVGTSIIDMYCKCGRVETARKAFDRMKNKNVRSWTAMIAGYGMHGHAAKALELFPAMIDSGVRPNYITFVSVLAACSHAGLHVEGWRWFNAMKGRFGVEPGLEHYGCMVDLLGRAGFLQKAYDLIQRMKMKPDSIIWSSLLAACRIHKNVELAEISVARLFELDSSNCGYYMLLSHIYADAGRWKDVERVRMIMKNRGLVKPPGFSLLELNGEVHVFLIGDEEHPQREKIYEFLAELNRKLLEAGYVSNTSSVCHDVDEEEKEMTLRVHSEKLAIAFGIMNTVPGSTVNVVKNLRVCSDCHNVIKLISKIVDREFVVRDAKRFHHFKDGGCSCGDYW

SEQ ID NO: 97990 - protein, 1053 aa, Arabidopsis thaliana
  peptide (1)..(1053): Ceres Seq. ID no. 13579068
  misc_feature (110)..(291): Pfam Name: Phosphoglycerate mutase family Pfam Description: Phosphoglycerate mutase family
  misc_feature (1)..(398): Homolog of NCBI NO: 9279667 NR Description: gene_id:MDJ14.7~similar to unknown [Arabidopsis thaliana] >gi|26449922|dbj|BAC42082.1| unknown
  misc_feature (417)..(1053): Homolog of NCBI NO: 34394298 NR Description: putative pentatricopeptide (PPR)
  misc_feature (1)..(398): Homolog of NCBI NO: 18391446 NR Description: expressed protein [Arabidopsis thaliana] At1g12850/F13K23_8 [Arabidopsis thaliana]
  misc_feature (1)..(398): Homolog of NCBI NO: 21554168 NR Description: putative fructose-2,6-bisphosphatase [Arabidopsis
  misc_feature (1)..(386): Homolog of NCBI NO: 25518294 NR Description: hypothetical protein F13K23.10 [imported] - thaliana >gi|8698732|gb|AAF78490.1|AC012187_10 Contains weak to LIP1 gene product gi|7297743 from Drosophila melanogaster
  misc_feature (410)..(1053): Homolog of NCBI NO: 18418348 NR Description: pentatricopeptide (PPR) repeat-containing protein
  misc_feature (1)..(398): Homolog of NCBI NO: 17902578 NR Description: putative fructose-2,6-bisphosphatase [Silene
  misc_feature (360)..(1053): Homolog of NCBI NO: 11994419 NR Description: selenium-binding protein-like [Arabidopsis
  misc_feature (425)..(1053): Homolog of NCBI NO: 15234831 NR Description: pentatricopeptide (PPR) repeat-containing protein
  misc_feature (434)..(1053): Homolog of NCBI NO: 11281371 NR Description: hypothetical protein T8H10.30 - Arabidopsis >gi|6706414|emb|CAB66100.1| putative protein [Arabidopsis
MGSSQSTQMEDEEEEEEETDNEEEEEEDNGRSNTRQLDNLLVKKVLEQEPEMLPCHASASPLSPQLSSLGTPRLGPSIKVWDPYNVLSPPPQPPSIFSRIVSGDEDRAVTEVYLISHGESDLNLKPDLIGGRCHVAALTANGKRQARALAVFFKSQGVRFNSVYSSPLDRARSMAVSVCQEMSFPEEHVQSSDAVIEMSLGDWEGCNQAEIYSPETLSLIERCQPDFTAPSGESLRQVEFRMVQFLNGTVSGVAEKLRSDYSSTTNHNETHERDGGVSLASTNWDLLHKHRPSLTRKKSGKSRLQVMTNHEPDDGNSPREEVNHNHTDLSDSSSLISNCVGVFTHSLPIKCLLTGILGCSPVMTHKICVEDSSVTVLQHSWRNGWQIKRMNDTAHLRLFKKALFCSVSRLLHTERHTERQNLTTLFNRYVDKTDVFSWNSVIADLARSGDSAEALLAFSSMRKLSLYPTRSSFPCAIKACSSLFDIFSGKQTHQQAFVFGYQSDIFVSSALIVMYSTCGKLEDARKVFDEIPKRNIVSWTSMIRGYDLNGNALDAVSLFKDLLVDENDDDDAMFLDSMGLVSVISACSRVPAKGLTESIHSFVIKRGFDRGVSVGNTLLDAYAKGGEGGVAVARKIFDQIVDKDRVSYNSIMSVYAQSGMSNEAFEVFRRLVKNKVVTFNAITLSTVLLAVSHSGALRIGKCIHDQVIRMGLEDDVIVGTSIIDMYCKCGRVETARKAFDRMKNKNVRSWTAMIAGYGMHGHAAKALELFPAMIDSGVRPNYITFVSVLAACSHAGLHVEGWRWFNAMKGRFGVEPGLEHYGCMVDLLGRAGFLQKAYDLIQRMKMKPDSIIWSSLLAACRIHKNVELAEISVARLFELDSSNCGYYMLLSHIYADAGRWKDVERVRMIMKNRGLVKPPGFSLLELNGEVHVFLIGDEEHPQREKIYEFLAELNRKLLEAGYVSNTSSVCHDVDEEEKEMTLRVHSEKLAIAFGIMNTVPGSTVNVVKNLRVCSDCHNVIKLISKIVDREFVVRDAKRFHHFKDGGCSCGDYW

SEQ ID NO: 97991 - protein, 1045 aa, Arabidopsis thaliana
  peptide (1)..(1045): Ceres Seq. ID no. 13579069
  misc_feature (102)..(283): Pfam Name: Phosphoglycerate mutase family Pfam Description: Phosphoglycerate mutase family
  misc_feature (1)..(390): Homolog of NCBI NO: 9279667 NR Description: gene_id:MDJ14.7~similar to unknown [Arabidopsis thaliana] >gi|26449922|dbj|BAC42082.1| unknown
  misc_feature (409)..(1045): Homolog of NCBI NO: 34394298 NR Description: putative pentatricopeptide (PPR)
  misc_feature (1)..(390): Homolog of NCBI NO: 18391446 NR Description: expressed protein [Arabidopsis thaliana] At1g12850/F13K23_8 [Arabidopsis thaliana]
  misc_feature (1)..(390): Homolog of NCBI NO: 21554168 NR Description: putative fructose-2,6-bisphosphatase [Arabidopsis
  misc_feature (1)..(378): Homolog of NCBI NO: 25518294 NR Description: hypothetical protein F13K23.10 [imported] - thaliana >gi|8698732|gb|AAF78490.1|AC012187_10 Contains weak to LIP1 gene product gi|7297743 from Drosophila melanogaster
  misc_feature (402)..(1045): Homolog of NCBI NO: 18418348 NR Description: pentatricopeptide (PPR) repeat-containing protein
  misc_feature (1)..(390): Homolog of NCBI NO: 17902578 NR Description: putative fructose-2,6-bisphosphatase [Silene
  misc_feature (352)..(1045): Homolog of NCBI NO: 11994419 NR Description: selenium-binding protein-like [Arabidopsis
  misc_feature (417)..(1045): Homolog of NCBI NO: 15234831 NR Description: pentatricopeptide (PPR) repeat-containing protein
  misc_feature (426)..(1045): Homolog of NCBI NO: 11281371 NR Description: hypothetical protein T8H10.30 - Arabidopsis >gi|6706414|emb|CAB66100.1| putative protein [Arabidopsis
MEDEEEEEEETDNEEEEEEDNGRSNTRQLDNLLVKKVLEQEPEMLPCHASASPLSPQLSSLGTPRLGPSIKVWDPYNVLSPPPQPPSIFSRIVSGDEDRAVTEVYLISHGESDLNLKPDLIGGRCHVAALTANGKRQARALAVFFKSQGVRFNSVYSSPLDRARSMAVSVCQEMSFPEEHVQSSDAVIEMSLGDWEGCNQAEIYSPETLSLIERCQPDFTAPSGESLRQVEFRMVQFLNGTVSGVAEKLRSDYSSTTNHNETHERDGGVSLASTNWDLLHKHRPSLTRKKSGKSRLQVMTNHEPDDGNSPREEVNHNHTDLSDSSSLISNCVGVFTHSLPIKCLLTGILGCSPVMTHKICVEDSSVTVLQHSWRNGWQIKRMNDTAHLRLFKKALFCSVSRLLHTERHTERQNLTTLFNRYVDKTDVFSWNSVIADLARSGDSAEALLAFSSMRKLSLYPTRSSFPCAIKACSSLFDIFSGKQTHQQAFVFGYQSDIFVSSALIVMYSTCGKLEDARKVFDEIPKRNIVSWTSMIRGYDLNGNALDAVSLFKDLLVDENDDDDAMFLDSMGLVSVISACSRVPAKGLTESIHSFVIKRGFDRGVSVGNTLLDAYAKGGEGGVAVARKIFDQIVDKDRVSYNSIMSVYAQSGMSNEAFEVFRRLVKNKVVTFNAITLSTVLLAVSHSGALRIGKCIHDQVIRMGLEDDVIVGTSIIDMYCKCGRVETARKAFDRMKNKNVRSWTAMIAGYGMHGHAAKALELFPAMIDSGVRPNYITFVSVLAACSHAGLHVEGWRWFNAMKGRFGVEPGLEHYGCMVDLLGRAGFLQKAYDLIQRMKMKPDSIIWSSLLAACRIHKNVELAEISVARLFELDSSNCGYYMLLSHIYADAGRWKDVERVRMIMKNRGLVKPPGFSLLELNGEVHVFLIGDEEHPQREKIYEFLAELNRKLLEAGYVSNTSSVCHDVDEEEKEMTLRVHSEKLAIAFGIMNTVPGSTVNVVKNLRVCSDCHNVIKLISKIVDREFVVRDAKRFHHFKDGGCSCGDYW

SEQ ID NO: 97992 - DNA, 1393 bp, Arabidopsis thaliana
  misc_feature (1)..(1393): Ceres Seq. ID no. 13579082
  misc_feature: MA Experiment ID: 20000214 Result: Down-regulated in Transcription
  misc_feature: MA Experiment 20000214 PARAMETER Experiment Name: At_4deg_Cold_P Parameter: Timepoint (hr) Value: 6
tttttggccatttcctatttctcccttcgtctccatcaagcaaccctctctctctctctctctctatcatcatcatcgcagaggagacgatcttacgcgacgaatccttgagagattgagagggacaagcgagttttgacccaaggattgttgacggtctatattgaacaagtaaacaaggatgcgtaagtggatctgttgtacatgtcaaatagaagactcaaatgaagagcaacaactgaaaagttcacagcagcaatctgatgcaaatcataagaattcaaaaccagcacctgttgcaaaacatgaggttaagaaggaagctcttcccatcgaggtccctcccttgtctttggatgaggtcaaggaaaagactgaaaattttggatccaaggcactgattggtgaagggtcttatgggagagtatattatgcgacactaaatgatggtgtggcggttgctctgaagaaacttgatgtcgcacctgaagctgaaacagataccgaattcttgagtcaggtttccatggtctctaggctgaagcatgaaaatctcattcaattgcttggtttttgtgttgatggaaacctccgcgtccttgcatatgagtttgcaacaatgggatcgttgcatgacatcttgcatggtaggaagggagttcaaggagcacaaccaggtccaacacttgactggataacgagggtgaagatagcggttgaggcagctaggggtttggaatacctccatgagaagtctcagcctcctgtaatccatagggacataagatctagcaatgtccttctttttgaagactacaaagcaaagattgctgatttcaatctctcgaatcaagcacctgataatgctgcccgtcttcactcaacaagagtcttggggacttttggttatcatgctccagaatatgcaatgactggacagttaactcagaagagtgatgtgtacagctttggtgttgtacttctagaacttcttacagggaggaaaccggtggatcataccatgcctagaggtcaacagagtcttgtaacctgggcgacaccaagactcagtgaagataaagtgaaacagtgcattgatccaaagctaaaagccgattaccctccaaaagcagttgctaagctagcagcggtggcagcattgtgtgtgcaatacgaagctgagtttagaccaaatatgagcatagttgtgaaggcgctacagcctctcctgaaacctccagcagcagctccagcaccagaatcttgaaacttttaaatcttttttttcgctgcaactatcagaaagaatctacatagtaccatttgccataaatgataatgaggttggttttgagagtgataactactattattaaaagatgatattatgttt

SEQ ID NO: 97993 - protein, 361 aa, Arabidopsis thaliana
  peptide (1)..(361): Ceres Seq. ID no. 13579083
  misc_feature (1)..(361): Homolog of NCBI NO: 15222170 NR Description: serine/threonine protein kinase, putative thaliana] >gi|23297211|gb|AAN12919.1| putative kinase interactor
  misc_feature (1)..(361): Homolog of NCBI NO: 13877995 NR Description: putative protein kinase interactor [Arabidopsis
  misc_feature (17)..(361): Homolog of NCBI NO: 25287624 NR Description: probable protein kinase [imported] - Arabidopsis >gi|7523708|gb|AAF63147.1|AC011001_17 Putative protein kinase
  misc_feature (1)..(359): Homolog of NCBI NO: 15224557 NR Description: serine/threonine protein kinase, putative
MRKWICCTCQIEDSNEEQQLKSSQQQSDANHKNSKPAPVAKHEVKKEALPIEVPPLSLDEVKEKTENFGSKALIGEGSYGRVYYATLNDGVAVALKKLDVAPEAETDTEFLSQVSMVSRLKHENLIQLLGFCVDGNLRVLAYEFATMGSLHDILHGRKGVQGAQPGPTLDWITRVKIAVEAARGLEYLHEKSQPPVIHRDIRSSNVLLFEDYKAKIADFNLSNQAPDNAARLHSTRVLGTFGYHAPEYAMTGQLTQKSDVYSFGVVLLELLTGRKPVDHTMPRGQQSLVTWATPRLSEDKVKQCIDPKLKADYPPKAVAKLAAVAALCVQYEAEFRPNMSIVVKALQPLLKPPAAAPAPES

SEQ ID NO: 97994 - protein, 246 aa, Arabidopsis thaliana
  peptide (1)..(246): Ceres Seq. ID no. 13579084
  misc_feature (1)..(246): Homolog of NCBI NO: 15222170 NR Description: serine/threonine protein kinase, putative thaliana] >gi|23297211|gb|AAN12919.1| putative kinase interactor
  misc_feature (1)..(246): Homolog of NCBI NO: 13877995 NR Description: putative protein kinase interactor [Arabidopsis
  misc_feature (1)..(246): Homolog of NCBI NO: 25287624 NR Description: probable protein kinase [imported] - Arabidopsis >gi|7523708|gb|AAF63147.1|AC011001_17 Putative protein kinase
  misc_feature (1)..(244): Homolog of NCBI NO: 15224557 NR Description: serine/threonine protein kinase, putative
MVSRLKHENLIQLLGFCVDGNLRVLAYEFATMGSLHDILHGRKGVQGAQPGPTLDWITRVKIAVEAARGLEYLHEKSQPPVIHRDIRSSNVLLFEDYKAKIADFNLSNQAPDNAARLHSTRVLGTFGYHAPEYAMTGQLTQKSDVYSFGVVLLELLTGRKPVDHTMPRGQQSLVTWATPRLSEDKVKQCIDPKLKADYPPKAVAKLAAVAALCVQYEAEFRPNMSIVVKALQPLLKPPAAAPAPES

SEQ ID NO: 97995 - protein, 215 aa, Arabidopsis thaliana
  peptide (1)..(215): Ceres Seq. ID no. 13579085
  misc_feature (1)..(215): Homolog of NCBI NO: 15222170 NR Description: serine/threonine protein kinase, putative thaliana] >gi|23297211|gb|AAN12919.1| putative kinase interactor
  misc_feature (1)..(215): Homolog of NCBI NO: 13877995 NR Description: putative protein kinase interactor [Arabidopsis
  misc_feature (1)..(215): Homolog of NCBI NO: 25287624 NR Description: probable protein kinase [imported] - Arabidopsis >gi|7523708|gb|AAF63147.1|AC011001_17 Putative protein kinase
  misc_feature (1)..(213): Homolog of NCBI NO: 15224557 NR Description: serine/threonine protein kinase, putative
MGSLHDILHGRKGVQGAQPGPTLDWITRVKIAVEAARGLEYLHEKSQPPVIHRDIRSSNVLLFEDYKAKIADFNLSNQAPDNAARLHSTRVLGTFGYHAPEYAMTGQLTQKSDVYSFGVVLLELLTGRKPVDHTMPRGQQSLVTWATPRLSEDKVKQCIDPKLKADYPPKAVAKLAAVAALCVQYEAEFRPNMSIVVKALQPLLKPPAAAPAPES

SEQ ID NO: 97996 - DNA, 2126 bp, Arabidopsis thaliana
  misc_feature (1)..(2126): Ceres Seq. ID no. 13579167
  misc_feature: MA Experiment ID: 20000173 Result: Down-regulated in Transcription
  misc_feature: MA Experiment 20000173 PARAMETER Experiment Name: At_42deg_Heat_P Parameter: Age (day) Value: 14
  misc_feature: MA Experiment 20000173 PARAMETER Experiment Name: At_42deg_Heat_P Parameter: Organism Value: A. thaliana
  misc_feature: MA Experiment 20000173 PARAMETER Experiment Name: At_42deg_Heat_P Parameter: Plant Line Value: WS
  misc_feature: MA Experiment 20000173 PARAMETER Experiment Name: At_42deg_Heat_P Parameter: Temperature (deg C) Value: 42 vs. 22
  misc_feature: MA Experiment 20000173 PARAMETER Experiment Name: At_42deg_Heat_P Parameter: Timepoint (hr) Value: 6
  misc_feature: MA Experiment 20000173 PARAMETER Experiment Name: At_42deg_Heat_P Parameter: Tissue Value: Aerial
  misc_feature: MA Experiment ID: 20000180 Result: Down-regulated in Transcription
  misc_feature: MA Experiment 20000180 PARAMETER Experiment Name: At_Germinating_Seeds_P Parameter: Age (hr) Value: 24 vs. 0
  misc_feature: MA Experiment 20000180 PARAMETER Experiment Name: At_Germinating_Seeds_P Parameter: Tissue Value: Germinating Seeds
  misc_feature: MA Experiment ID: 20000184 Result: Down-regulated in Transcription
  misc_feature: MA Experiment 20000184 PARAMETER Experiment Name: At_Shoots__P Parameter: Age (day) Value: 7
  misc_feature: MA Experiment 20000184 PARAMETER Experiment Name: At_Shoots__P Parameter: Tissue Value: Shoots vs. Whole Plant
aacatcttttaagcttctcccgcaaaattcagcaaagctttcggaggaatctcctaacagtcaccaccaccaccaccgtctaggncaaatctcgtcttcctcacgctctatttctccatagaanatttcctaactcctcctccgggttatcgattttttcaatttttctagggtttcgcgccgggatctaaaaaatcacaatcatgccggtgagtttgactccgaacgcaatcacggcgatacatgacggcgacgtgaatttgaagccgttgttacaggttttagaaatcaaaatgataggaagaagtcaagagagaagccaggagaggtatcgtttcctcatttcagatggtgtttctgctcaacatgctatggtcgcggttcagcttaatgatcgagtcaagtcaggacaatttgagaaaggatctatcgttcagctgattgattacatttgtagcgacgttaaaggccgcaagcttattgtggtgctgaacatggagacgatagtacaacagtctgaaaccattgggaaccctacaatatttggagaaacagatacagaagcccagaagacattttcaggtacgggcaatataccgcctccgaacagggttgtttttaatgaaccaatggttcagcattctgttaatagagcacctcccaggggtgtaaacattcaaaatcaagccaacaatactccaagcttcaggccatctgttcaaccttcatatcaaccgcctgcaagttacagaaatcatggacccatcatgaagaacgaggctccagctcgagtcatccctattgctgctctcaatccataccaaggtcgatgggctattaaggctagagtaactgcgaaaggagatatcagacgatataacaatgcaaaaggagatggaaaggttttctcgtttgatctgcttgactatgatggaggggagattcgggttacgtgctttaatgctcttgttgaccgtttctatgatgttactgaggttggtaaggtatatttgatttcaaagggaagtttgaagcctgcacagaaaaatttcaaccacttaaagaatgaatgggaaattttcttggagtcaacatcgactgtggagctttgccctgatgaagatggctccataccaaagcagcaattctccttccgcccaataagtgacattgagaacgctgagaacaataccatactcgatgtcattggtgtggtgacttctgtgaacccctcggtgccaatcttgagaaagaacgggatggaaacccataggaggatcctgaatctaaaggatgaatcaggaaaggctgtagaggtaacactttggggagaattctgtaaccgagatggtcggcaactggaagagatggttgattcagcttttcacccggttttagcaataaaagctggaaaagtaagcgacttcagtgggaaatcagtagggacaatatcttcaacacagctcttcataaatccagatttccctgaagctcataaactacggacctggttcgattacgggggaaaagacactgcttccttctccatctccagggacactatgcctggaggagtttccaggaacgagataaggaaaaatgtttctcagatcaaagaggaaggtcttggaagatcagataagcctgactggatcactgtgaaagcaaccatatcattcatcaaaacagatagcttctgttatacagcttgtcctttgatgatcggggataaacaatgcaacaagaaggttacacggtctggaacaaacaggtggctctgtgaccggtgcaaccaagagtctgatgaatgcgactatagataccttcttcaggtacagattcaagaccacactgggttgacttggataaccgcgtttcaagaaacaggagaagaaataatgggatgtccggctaagaagctttacgcaatgaaatacgaattggagaaggaggaagagttcgcagagattgttagagacagactgtttcatcagtacatgttgaagctgaagatcaaagaggaatcgtatggggatgaacaaagagtgaagatgactgttgtgaaggttgataaggtgaattatacatccgagagtaaatacatgcttgatttgctcgtaaggtaa

SEQ ID NO: 97997 - protein, 640 aa, Arabidopsis thaliana
  peptide (1)..(640): Ceres Seq. ID no. 13579168
  misc_feature (4)..(103): Pfam Name: Replication factor-A protein 1, N-terminal domain Pfam Description: Replication factor-A protein 1, N-terminal
  misc_feature (5)..(638): Homolog of NCBI NO: 13536993 NR Description: replication protein A 70kDa [Oryza sativa
  misc_feature (127)..(638): Homolog of NCBI NO: 15242405 NR Description: replication protein, putative [Arabidopsis
  misc_feature (1)..(123): Homolog of NCBI NO: 15242405 NR Description: replication protein, putative [Arabidopsis
  misc_feature (193)..(635): Homolog of NCBI NO: 7488291 NR Description: replication protein A1 homolog T18B16.100 -
  misc_feature (1)..(116): Homolog of NCBI NO: 7488291 NR Description: replication protein A1 homolog T18B16.100 -
  misc_feature (294)..(635): Homolog of NCBI NO: 18415246 NR Description: replication protein A, putative [Arabidopsis
  misc_feature (5)..(635): Homolog of NCBI NO: 18390321 NR Description: replication protein A1; replication protein A1 kDa); replication protein A [Mus musculus]
  misc_feature (13)..(441): Homolog of NCBI NO: 33086646 NR Description: Cb1-727 [Rattus norvegicus]
  misc_feature (436)..(635): Homolog of NCBI NO: 33086646 NR Description: Cb1-727 [Rattus norvegicus]
  misc_feature (184)..(635): Homolog of NCBI NO: 15241489 NR Description: replication protein, putative [Arabidopsis
MPVSLTPNAITAIHDGDVNLKPLLQVLEIKMIGRSQERSQERYRFLISDGVSAQHAMVAVQLNDRVKSGQFEKGSIVQLIDYICSDVKGRKLIVVLNMETIVQQSETIGNPTIFGETDTEAQKTFSGTGNIPPPNRVVFNEPMVQHSVNRAPPRGVNIQNQANNTPSFRPSVQPSYQPPASYRNHGPIMKNEAPARVIPIAALNPYQGRWAIKARVTAKGDIRRYNNAKGDGKVFSFDLLDYDGGEIRVTCFNALVDRFYDVTEVGKVYLISKGSLKPAQKNFNHLKNEWEIFLESTSTVELCPDEDGSIPKQQFSFRPISDIENAENNTILDVIGVVTSVNPSVPILRKNGMETHRRILNLKDESGKAVEVTLWGEFCNRDGRQLEEMVDSAFHPVLAIKAGKVSDFSGKSVGTISSTQLFINPDFPEAHKLRTWFDYGGKDTASFSISRDTMPGGVSRNEIRKNVSQIKEEGLGRSDKPDWITVKATISFIKTDSFCYTACPLMIGDKQCNKKVTRSGTNRWLCDRCNQESDECDYRYLLQVQIQDHTGLTWITAFQETGEEIMGCPAKKLYAMKYELEKEEEFAEIVRDRLFHQYMLKLKIKEESYGDEQRVKMTVVKVDKVNYTSESKYMLDLLVR

SEQ ID NO: 97998 - protein, 610 aa, Arabidopsis thaliana
  peptide (1)..(610): Ceres Seq. ID no. 13579169
  misc_feature (1)..(73): Pfam Name: Replication factor-A protein 1, N-terminal domain Pfam Description: Replication factor-A protein 1, N-terminal
  misc_feature (1)..(608): Homolog of NCBI NO: 13536993 NR Description: replication protein A 70kDa [Oryza sativa
  misc_feature (97)..(608): Homolog of NCBI NO: 15242405 NR Description: replication protein, putative [Arabidopsis
  misc_feature (1)..(93): Homolog of NCBI NO: 15242405 NR Description: replication protein, putative [Arabidopsis
  misc_feature (163)..(605): Homolog of NCBI NO: 7488291 NR Description: replication protein A1 homolog T18B16.100 -
  misc_feature (1)..(86): Homolog of NCBI NO: 7488291 NR Description: replication protein A1 homolog T18B16.100 -
  misc_feature (264)..(605): Homolog of NCBI NO: 18415246 NR Description: replication protein A, putative [Arabidopsis
  misc_feature (1)..(605): Homolog of NCBI NO: 18390321 NR Description: replication protein A1; replication protein A1 kDa); replication protein A [Mus musculus]
  misc_feature (1)..(411): Homolog of NCBI NO: 33086646 NR Description: Cb1-727 [Rattus norvegicus]
  misc_feature (406)..(605): Homolog of NCBI NO: 33086646 NR Description: Cb1-727 [Rattus norvegicus]
  misc_feature (154)..(605): Homolog of NCBI NO: 15241489 NR Description: replication protein, putative [Arabidopsis
MIGRSQERSQERYRFLISDGVSAQHAMVAVQLNDRVKSGQFEKGSIVQLIDYICSDVKGRKLIVVLNMETIVQQSETIGNPTIFGETDTEAQKTFSGTGNIPPPNRVVFNEPMVQHSVNRAPPRGVNIQNQANNTPSFRPSVQPSYQPPASYRNHGPIMKNEAPARVIPIAALNPYQGRWAIKARVTAKGDIRRYNNAKGDGKVFSFDLLDYDGGEIRVTCFNALVDRFYDVTEVGKVYLISKGSLKPAQKNFNHLKNEWEIFLESTSTVELCPDEDGSIPKQQFSFRPISDIENAENNTILDVIGVVTSVNPSVPILRKNGMETHRRILNLKDESGKAVEVTLWGEFCNRDGRQLEEMVDSAFHPVLAIKAGKVSDFSGKSVGTISSTQLFINPDFPEAHKLRTWFDYGGKDTASFSISRDTMPGGVSRNEIRKNVSQIKEEGLGRSDKPDWITVKATISFIKTDSFCYTACPLMIGDKQCNKKVTRSGTNRWLCDRCNQESDECDYRYLLQVQIQDHTGLTWITAFQETGEEIMGCPAKKLYAMKYELEKEEEFAEIVRDRLFHQYMLKLKIKEESYGDEQRVKMTVVKVDKVNYTSESKYMLDLLVR

SEQ ID NO: 97999 - protein, 584 aa, Arabidopsis thaliana
  peptide (1)..(584): Ceres Seq. ID no. 13579170
  misc_feature (154)..(244): Pfam Name: OB-fold nucleic acid binding domain Pfam Description: OB-fold nucleic acid binding domain
  misc_feature (1)..(582): Homolog of NCBI NO: 13536993 NR Description: replication protein A 70kDa [Oryza sativa
  misc_feature (71)..(582): Homolog of NCBI NO: 15242405 NR Description: replication protein, putative [Arabidopsis
  misc_feature (1)..(67): Homolog of NCBI NO: 15242405 NR Description: replication protein, putative [Arabidopsis
  misc_feature (137)..(579): Homolog of NCBI NO: 7488291 NR Description: replication protein A1 homolog T18B16.100 -
  misc_feature (1)..(60): Homolog of NCBI NO: 7488291 NR Description: replication protein A1 homolog T18B16.100 -
  misc_feature (238)..(579): Homolog of NCBI NO: 18415246 NR Description: replication protein A, putative [Arabidopsis
  misc_feature (1)..(579): Homolog of NCBI NO: 18390321 NR Description: replication protein A1; replication protein A1 kDa); replication protein A [Mus musculus]
  misc_feature (1)..(385): Homolog of NCBI NO: 33086646 NR Description: Cb1-727 [Rattus norvegicus]
  misc_feature (380)..(579): Homolog of NCBI NO: 33086646 NR Description: Cb1-727 [Rattus norvegicus]
  misc_feature (128)..(579): Homolog of NCBI NO: 15241489 NR Description: replication protein, putative [Arabidopsis
MVAVQLNDRVKSGQFEKGSIVQLIDYICSDVKGRKLIVVLNMETIVQQSETIGNPTIFGETDTEAQKTFSGTGNIPPPNRVVFNEPMVQHSVNRAPPRGVNIQNQANNTPSFRPSVQPSYQPPASYRNHGPIMKNEAPARVIPIAALNPYQGRWAIKARVTAKGDIRRYNNAKGDGKVFSFDLLDYDGGEIRVTCFNALVDRFYDVTEVGKVYLISKGSLKPAQKNFNHLKNEWEIFLESTSTVELCPDEDGSIPKQQFSFRPISDIENAENNTILDVIGVVTSVNPSVPILRKNGMETHRRILNLKDESGKAVEVTLWGEFCNRDGRQLEEMVDSAFHPVLAIKAGKVSDFSGKSVGTISSTQLFINPDFPEAHKLRTWFDYGGKDTASFSISRDTMPGGVSRNEIRKNVSQIKEEGLGRSDKPDWITVKATISFIKTDSFCYTACPLMIGDKQCNKKVTRSGTNRWLCDRCNQESDECDYRYLLQVQIQDHTGLTWITAFQETGEEIMGCPAKKLYAMKYELEKEEEFAEIVRDRLFHQYMLKLKIKEESYGDEQRVKMTVVKVDKVNYTSESKYMLDLLVR

SEQ ID NO: 98000 - DNA, 1490 bp, Arabidopsis thaliana
  misc_feature (1)..(1490): Ceres Seq. ID no. 13579183
  misc_feature: MA Experiment ID: 20000264 Result: Up-regulated in Transcription
  misc_feature: MA Experiment 20000264 PARAMETER Experiment Name: At_Open_Flower_P Parameter: Age (day) Value: 21
  misc_feature: MA Experiment 20000264 PARAMETER Experiment Name: At_Open_Flower_P Parameter: Plant Line Value: WS
  misc_feature: MA Experiment 20000264 PARAMETER Experiment Name: At_Open_Flower_P Parameter: Tissue Value: Open Flower vs. Whole Plant
  misc_feature: MA Experiment ID: 20000286 Result: Up-regulated in Transcription
  misc_feature: MA Experiment 20000286 PARAMETER Experiment Name: At_Open_Flower_P Parameter: Age (day) Value: 21
  misc_feature: MA Experiment 20000286 PARAMETER Experiment Name: At_Open_Flower_P Parameter: Plant Line Value: WS
  misc_feature: MA Experiment 20000286 PARAMETER Experiment Name: At_Open_Flower_P Parameter: Tissue Value: Half Open vs. Whole Plant
  misc_feature: MA Experiment ID: 20000794 Result: Up-regulated in Transcription
  misc_feature: MA Experiment 20000794 PARAMETER Experiment Name: At_Petals_P Parameter: Age (day) Value: 23-25 days
  misc_feature: MA Experiment 20000794 PARAMETER Experiment Name: At_Petals_P Parameter: Plant Line Value: WS
  misc_feature: MA Experiment 20000794 PARAMETER Experiment Name: At_Petals_P Parameter: Tissue Value: Petals vs. Whole plant
  misc_feature: MA Experiment ID: 20001905 Result: Up-regulated in Transcription
  misc_feature: MA Experiment 20001905 PARAMETER Experiment Name: At_Drought_Reproduction_P Parameter: Age (day) Value: 40
  misc_feature: MA Experiment 20001905 PARAMETER Experiment Name: At_Drought_Reproduction_P Parameter: Organism Value: A. thaliana
  misc_feature: MA Experiment 20001905 PARAMETER Experiment Name: At_Drought_Reproduction_P Parameter: Plant Line Value: WS
  misc_feature: MA Experiment 20001905 PARAMETER Experiment Name: At_Drought_Reproduction_P Parameter: Timepoint (day) Value: 10
  misc_feature: MA Experiment 20001905 PARAMETER Experiment Name: At_Drought_Reproduction_P Parameter: Tissue Value: Rosettes
  misc_feature: MA Experiment 20001905 PARAMETER Experiment Name: At_Drought_Reproduction_P Parameter: Treatment Value: Drought vs. No Drought
gcttttccattttcatcttcatgcattgctttccttcgtcgtccttggaggggacgacgacggatctgtctttctgtctactgaaaatccaaatttcatcctctccatttatttaactttttcagatttagttttgtcaagaaaacacaaaatgtcttttcttgcgccttgtcaaattttggagctgaatattatttcggcccaagaattggcgcccgtggcacggtgtatgaagacatatgcaatcgcttggattgatccagagcgtaaattgacgactcgggtcgacaatacgggcggaacaagccctacatggaacgacaagtttgtgtttcgtctagatgaggaagcactctacgatgccacatcaatagttgttatagagatctatgcattgcattggttcaaagacattcatgttggaacggtacaagccttaataagtgaccttgtaagcccttcttcggctatgagattcgttaccctagaggttcttcgtgcctcgggccgcccccacggcctcctaaacattgcggtggggcttatcgataactcaggccaaagcatgcctcttttgtttgaagaagatttgttgtttcacaagaaaaacatatcttcaaaacccgtagggcttcgacggtcaaaaagtgatacaagctcaatggtggattcaccaaggaaggtgacacaatcccgtgtgagttctactacaaactcaggatttgataaagatgagttttcttctgactctcaaatggttgtgtatgagccccaaagaaaaacgccgaatacaatgaggcaaacaaagcaacaactcgtgtatgggacaccgatgaggccaaggaaaacgacagcatatacccccaaaaggaacacaatcgaatatggaacaccaatgaggtcaagaccaatcgttattacagaatctgacttaggtccttcagcctcagtagttgctgcccaaatagcaaaagagaaagcacttacagggaaagatgcggagagtactgtgataagtgttggtgaacgaagtgtcgagggtcttcgttctaagttagaaagatggcaagccaatttaccagtggttttagacgtggggtcaagttatcaaccaagttctgactacaaaacaaactctaactttaaccctaaatcaagttacaagcctaacgaaatcgtcccaagaaatcctcaaatgattggagctcccatccaaaagccaagtgggaggaacaagaaaagtggagataacggattgttttcatgttttggtaacatttgtggcattgagtgttctattgtttgtggtggctctagtggacaaaaagcagccaagaagaagaagaaaaagaagtgataaataacaaacatgattccttcaattctaaatgattcatttctcattatgtttctatttttcaagcttgtcgattttgctactcaataatccaaatttatatagtaagacatggggaaaaggtacattaatt

SEQ ID NO: 98001 - protein, 451 aa, Arabidopsis thaliana
  peptide (1)..(451): Ceres Seq. ID no. 13579184
  misc_feature (60)..(144): Pfam Name: C2 domain Pfam Description: C2 domain
  misc_feature (51)..(451): Homolog of NCBI NO: 15225023 NR Description: C2 domain-containing protein [Arabidopsis
  misc_feature (250)..(447): Homolog of NCBI NO: 15225835 NR Description: C2 domain-containing protein [Arabidopsis
  misc_feature (51)..(196): Homolog of NCBI NO: 15225835 NR Description: C2 domain-containing protein [Arabidopsis
  misc_feature (252)..(450): Homolog of NCBI NO: 15219742 NR Description: C2 domain-containing protein [Arabidopsis
  misc_feature (51)..(192): Homolog of NCBI NO: 15219742 NR Description: C2 domain-containing protein [Arabidopsis
  misc_feature (58)..(192): Homolog of NCBI NO: 25372827 NR Description: hypothetical protein [imported] - Arabidopsis >gi|2494130|gb|AAB80639.1| Contains similarity to Glycine SRC2
  misc_feature (252)..(375): Homolog of NCBI NO: 25372827 NR Description: hypothetical protein [imported] - Arabidopsis >gi|2494130|gb|AAB80639.1| Contains similarity to Glycine SRC2
  misc_feature (57)..(238): Homolog of NCBI NO: 21618096 NR Description: unknown [Arabidopsis thaliana]
  misc_feature (405)..(449): Homolog of NCBI NO: 21618096 NR Description: unknown [Arabidopsis thaliana]
  misc_feature (57)..(238): Homolog of NCBI NO: 18396861 NR Description: C2 domain-containing protein [Arabidopsis >gi|6721150|gb|AAF26778.1|AC016829_2 hypothetical protein
LFHFHLHALLSFVVLGGDDDGSVFLSTENPNFILSIYLTFSDLVLSRKHKMSFLAPCQILELNIISAQELAPVARCMKTYAIAWIDPERKLTTRVDNTGGTSPTWNDKFVFRLDEEALYDATSIVVIEIYALHWFKDIHVGTVQALISDLVSPSSAMRFVTLEVLRASGRPHGLLNIAVGLIDNSGQSMPLLFEEDLLFHKKNISSKPVGLRRSKSDTSSMVDSPRKVTQSRVSSTTNSGFDKDEFSSDSQMVVYEPQRKTPNTMRQTKQQLVYGTPMRPRKTTAYTPKRNTIEYGTPMRSRPIVITESDLGPSASVVAAQIAKEKALTGKDAESTVISVGERSVEGLRSKLERWQANLPVVLDVGSSYQPSSDYKTNSNFNPKSSYKPNEIVPRNPQMIGAPIQKPSGRNKKSGDNGLFSCFGNICGIECSIVCGGSSGQKAAKKKKKKK

SEQ ID NO: 98002 - protein, 401 aa, Arabidopsis thaliana
  peptide (1)..(401): Ceres Seq. ID no. 13579185
  misc_feature (10)..(94): Pfam Name: C2 domain Pfam Description: C2 domain
  misc_feature (1)..(401): Homolog of NCBI NO: 15225023 NR Description: C2 domain-containing protein [Arabidopsis
  misc_feature (200)..(397): Homolog of NCBI NO: 15225835 NR Description: C2 domain-containing protein [Arabidopsis
  misc_feature (1)..(146): Homolog of NCBI NO: 15225835 NR Description: C2 domain-containing protein [Arabidopsis
  misc_feature (202)..(400): Homolog of NCBI NO: 15219742 NR Description: C2 domain-containing protein [Arabidopsis
  misc_feature (1)..(142): Homolog of NCBI NO: 15219742 NR Description: C2 domain-containing protein [Arabidopsis
  misc_feature (8)..(142): Homolog of NCBI NO: 25372827 NR Description: hypothetical protein [imported] - Arabidopsis >gi|2494130|gb|AAB80639.1| Contains similarity to Glycine SRC2
  misc_feature (202)..(325): Homolog of NCBI NO: 25372827 NR Description: hypothetical protein [imported] - Arabidopsis >gi|2494130|gb|AAB80639.1| Contains similarity to Glycine SRC2
  misc_feature (7)..(188): Homolog of NCBI NO: 21618096 NR Description: unknown [Arabidopsis thaliana]
  misc_feature (355)..(399): Homolog of NCBI NO: 21618096 NR Description: unknown [Arabidopsis thaliana]
  misc_feature (7)..(188): Homolog of NCBI NO: 18396861 NR Description: C2 domain-containing protein [Arabidopsis >gi|6721150|gb|AAF26778.1|AC016829_2 hypothetical protein
MSFLAPCQILELNIISAQELAPVARCMKTYAIAWIDPERKLTTRVDNTGGTSPTWNDKFVFRLDEEALYDATSIVVIEIYALHWFKDIHVGTVQALISDLVSPSSAMRFVTLEVLRASGRPHGLLNIAVGLIDNSGQSMPLLFEEDLLFHKKNISSKPVGLRRSKSDTSSMVDSPRKVTQSRVSSTTNSGFDKDEFSSDSQMVVYEPQRKTPNTMRQTKQQLVYGTPMRPRKTTAYTPKRNTIEYGTPMRSRPIVITESDLGPSASVVAAQIAKEKALTGKDAESTVISVGERSVEGLRSKLERWQANLPVVLDVGSSYQPSSDYKTNSNFNPKSSYKPNEIVPRNPQMIGAPIQKPSGRNKKSGDNGLFSCFGNICGIECSIVCGGSSGQKAAKKKKKKK

SEQ ID NO: 98003 - protein, 375 aa, Arabidopsis thaliana
  peptide (1)..(375): Ceres Seq. ID no. 13579186
  misc_feature (1)..(68): Pfam Name: C2 domain Pfam Description: C2 domain
  misc_feature (1)..(375): Homolog of NCBI NO: 15225023 NR Description: C2 domain-containing protein [Arabidopsis
  misc_feature (174)..(371): Homolog of NCBI NO: 15225835 NR Description: C2 domain-containing protein [Arabidopsis
  misc_feature (1)..(120): Homolog of NCBI NO: 15225835 NR Description: C2 domain-containing protein [Arabidopsis
  misc_feature (176)..(374): Homolog of NCBI NO: 15219742 NR Description: C2 domain-containing protein [Arabidopsis
  misc_feature (1)..(116): Homolog of NCBI NO: 15219742 NR Description: C2 domain-containing protein [Arabidopsis
  misc_feature (1)..(116): Homolog of NCBI NO: 25372827 NR Description: hypothetical protein [imported] - Arabidopsis >gi|2494130|gb|AAB80639.1| Contains similarity to Glycine SRC2
  misc_feature (176)..(299): Homolog of NCBI NO: 25372827 NR Description: hypothetical protein [imported] - Arabidopsis >gi|2494130|gb|AAB80639.1| Contains similarity to Glycine SRC2
  misc_feature (1)..(162): Homolog of NCBI NO: 21618096 NR Description: unknown [Arabidopsis thaliana]
  misc_feature (329)..(373): Homolog of NCBI NO: 21618096 NR Description: unknown [Arabidopsis thaliana]
  misc_feature (1)..(162): Homolog of NCBI NO: 18396861 NR Description: C2 domain-containing protein [Arabidopsis >gi|6721150|gb|AAF26778.1|AC016829_2 hypothetical protein
MKTYAIAWIDPERKLTTRVDNTGGTSPTWNDKFVFRLDEEALYDATSIVVIEIYALHWFKDIHVGTVQALISDLVSPSSAMRFVTLEVLRASGRPHGLLNIAVGLIDNSGQSMPLLFEEDLLFHKKNISSKPVGLRRSKSDTSSMVDSPRKVTQSRVSSTTNSGFDKDEFSSDSQMVVYEPQRKTPNTMRQTKQQLVYGTPMRPRKTTAYTPKRNTIEYGTPMRSRPIVITESDLGPSASVVAAQIAKEKALTGKDAESTVISVGERSVEGLRSKLERWQANLPVVLDVGSSYQPSSDYKTNSNFNPKSSYKPNEIVPRNPQMIGAPIQKPSGRNKKSGDNGLFSCFGNICGIECSIVCGGSSGQKAAKKKKKKK

SEQ ID NO: 98004 - DNA, 2394 bp, Arabidopsis thaliana
  misc_feature (1)..(2394): Ceres Seq. ID no. 13579221
  misc_feature: MA Experiment ID: 20000173 Result: Down-regulated in Transcription
  misc_feature: MA Experiment 20000173 PARAMETER Experiment Name: At_42deg_Heat_P Parameter: Age (day) Value: 14
  misc_feature: MA Experiment 20000173 PARAMETER Experiment Name: At_42deg_Heat_P Parameter: Organism Value: A. thaliana
  misc_feature: MA Experiment 20000173 PARAMETER Experiment Name: At_42deg_Heat_P Parameter: Plant Line Value: WS
  misc_feature: MA Experiment 20000173 PARAMETER Experiment Name: At_42deg_Heat_P Parameter: Temperature (deg C) Value: 42 vs. 22
  misc_feature: MA Experiment 20000173 PARAMETER Experiment Name: At_42deg_Heat_P Parameter: Timepoint (hr) Value: 6
  misc_feature: MA Experiment 20000173 PARAMETER Experiment Name: At_42deg_Heat_P Parameter: Tissue Value: Aerial
atttgtttatttcatcgtccaaatttttgacagtatttttttgtttgttagagaagggcgagagagagtgactttttttgtttgcctttgttaatggcttgtgtgtgagattcattgaattttttgaaaattctgacgaataaaaaccatatctaccaatcacaaaccctagatttttgttatcttcttcatccgaagattctctttgatctgtgtctccttccttctgattctcccatttcatttcattgattcttttgattcgattctattcgagctcaattttgtagatcagaacccagaatcgaatttgggataacttgaacaatatccttggtaacttgttgatctgaatttgagtgaagaagacatcgaattcaagtttggtgtgggagattttttttaatggagtgatgatgatttaaaggggaaggtaaagggaacgatgactggattgggtgttcgatccagtagctatggttccttggagaagacgggacttaacggcgtcgttttacctatccagatcactaccacgacgcgtaccaaaccatctaagatgcagaaagatagagaaggtattgtacattggatctgcaaattcgctggtcgtaagaaggttggcatgttgcttctcttcttaatctccgccgtcgtcttccttcgcgtcctttacgtcggaaaaggtgaagatagtcaggaaggtcaaggtcctccgagtcttcatttcaatggcagttcaggcgtaaattattcaaatatgttacaaacaaatgaagagctaaacatgaatattggaaatatatcgttcaaggcaaaagaagttattgtgttccctcctcctcctatacattttcttggttattcgcttcctcaaggtcatccttgtaacagtttcactttacctcccccaccagcagacaggaaaagaacaggaccacgcccatgcccggtatgttaccttccagtagaagaagcagttgccttgatgccaaatgccccatcattttcccctgttcttaagaacttaacgtatatatatgaagaaccgttaaacagagagacagagtttggagggtcagattttggtggttatcctactttgaaacataggaatgattcttttgacattaaagaaacaatgagtgtacattgtgggtttgtcaaaggacctcaacctggtcgaaatacaggatttgacattgatgaggcagatcttcttgaaatgaagcagtgtcgtgggatagttgttgcttcagcagtatttgatgcttttgatgatgtaaaagccccacaaaatatcagtaaatatgcggaggaaacagtttgcttctacatgtttgttgatgaagagactgaatcaattttgaagagagaacgaggccttgatggcaataagaaagtagggatatggagagttgttgttgttcataatctcccctattcagatggaaggcgcaatggaaaggtgcccaagcttcttgtccataggatgtttccaaatgctcgctattctttatggattgacggaaaactagaacttgtcgtcgatccatatcaaattcttgaaagattcttgtggaggaaaaatgctacttttgctatttctagacattacaaacgatttgatgtcttagtggaagccgaagcaaataaagctgctggtaaatatgataatgcttctatcgactttcaagtggatttttacaagaacgaagggttaaccccttattctgtcgcaaagctcccaatcacaagcgacgtacccgagggttgtgtcattttaagagagcatgttcccataagcaacctcttcacttgtctttggttcaacgaagttgaccgattcacttctagagatcaaatcagtttctcaacagtaagagataagatcgcagcaaaaacaaactggacagtaagcatgttccttgattgtgaaagacgcaattttgtagttcagagatatcaccgagcagaacaagaaagatttgcaaggcaacgacctccggtgcctaattttcctcctccaccaccttcgccgcctccaccagttttaatcagcagcgatttgcctagaaaaatgtcaagtggaagagcaacgccgcctagaagacgaggaagagacagacggtctggtcaaaggggtcacaggaaagctaacttgccagtaagattaccagattcagcttaagagttggcgtccgtcttcttcttcttcttcatggtcactctcatcaccaacatcacattccaattttaccacacagtatgtttattttttttgtttctctatttgattctaaggattcaaaatcaattttttaatgtatatatatacacgaacattttgtacttggataataaattatagtttcgaatttttgaagttcaaaa

SEQ ID NO: 98005 - protein, 581 aa, Arabidopsis thaliana
  peptide (1)..(581): Ceres Seq. ID no. 13579222
  misc_feature (194)..(508): Pfam Name: Protein of unknown function (DUF616) Pfam Description: Protein of unknown function (DUF616)
  misc_feature (41)..(572): Homolog of NCBI NO: 30695403 NR Description: expressed protein [Arabidopsis thaliana]
  misc_feature (72)..(345): Homolog of NCBI NO: 34905662 NR Description: P0475H04.14 [Oryza sativa (japonica
  misc_feature (324)..(569): Homolog of NCBI NO: 34905662 NR Description: P0475H04.14 [Oryza sativa (japonica
  misc_feature (126)..(572): Homolog of NCBI NO: 25405617 NR Description: hypothetical protein F8L10.10 [imported] - thaliana >gi|9454542|gb|AAF87865.1|AC022520_9 Unknown protein
  misc_feature (194)..(514): Homolog of NCBI NO: 25403429 NR Description: protein F12K21.12 [imported] - Arabidopsis >gi|8778248|gb|AAF79257.1|AC023279_6 F12K21.12 [Arabidopsis
  misc_feature (194)..(514): Homolog of NCBI NO: 15233955 NR Description: expressed protein [Arabidopsis thaliana]
  misc_feature (149)..(511): Homolog of NCBI NO: 15227062 NR Description: hypothetical protein [Arabidopsis thaliana]
  misc_feature (165)..(498): Homolog of NCBI NO: 18420250 NR Description: expressed protein [Arabidopsis thaliana] AT4g38500/F20M13_60 [Arabidopsis thaliana]
  misc_feature (167)..(498): Homolog of NCBI NO: 7452444 NR Description: hypothetical protein F20M13.60 - Arabidopsis >gi|4467137|emb|CAB37506.1| putative protein [Arabidopsis >gi|7270833|emb|CAB80514.1| putative protein [Arabidopsis
  misc_feature (194)..(483): Homolog of NCBI NO: 15218687 NR Description: hypothetical protein [Arabidopsis thaliana]
MTGLGVRSSSYGSLEKTGLNGVVLPIQITTTTRTKPSKMQKDREGIVHWICKFAGRKKVGMLLLFLISAVVFLRVLYVGKGEDSQEGQGPPSLHFNGSSGVNYSNMLQTNEELNMNIGNISFKAKEVIVFPPPPIHFLGYSLPQGHPCNSFTLPPPPADRKRTGPRPCPVCYLPVEEAVALMPNAPSFSPVLKNLTYIYEEPLNRETEFGGSDFGGYPTLKHRNDSFDIKETMSVHCGFVKGPQPGRNTGFDIDEADLLEMKQCRGIVVASAVFDAFDDVKAPQNISKYAEETVCFYMFVDEETESILKRERGLDGNKKVGIWRVVVVHNLPYSDGRRNGKVPKLLVHRMFPNARYSLWIDGKLELVVDPYQILERFLWRKNATFAISRHYKRFDVLVEAEANKAAGKYDNASIDFQVDFYKNEGLTPYSVAKLPITSDVPEGCVILREHVPISNLFTCLWFNEVDRFTSRDQISFSTVRDKIAAKTNWTVSMFLDCERRNFVVQRYHRAEQERFARQRPPVPNFPPPPPSPPPPVLISSDLPRKMSSGRATPPRRRGRDRRSGQRGHRKANLPVRLPDSA

SEQ ID NO: 98006 - protein, 543 aa, Arabidopsis thaliana
  peptide (1)..(543): Ceres Seq. ID no. 13579223
  misc_feature (156)..(470): Pfam Name: Protein of unknown function (DUF616) Pfam Description: Protein of unknown function (DUF616)
  misc_feature (3)..(534): Homolog of NCBI NO: 30695403 NR Description: expressed protein [Arabidopsis thaliana]
  misc_feature (34)..(307): Homolog of NCBI NO: 34905662 NR Description: P0475H04.14 [Oryza sativa (japonica
  misc_feature (286)..(531): Homolog of NCBI NO: 34905662 NR Description: P0475H04.14 [Oryza sativa (japonica
  misc_feature (88)..(534): Homolog of NCBI NO: 25405617 NR Description: hypothetical protein F8L10.10 [imported] - thaliana >gi|9454542|gb|AAF87865.1|AC022520_9 Unknown protein
  misc_feature (156)..(476): Homolog of NCBI NO: 25403429 NR Description: protein F12K21.12 [imported] - Arabidopsis >gi|8778248|gb|AAF79257.1|AC023279_6 F12K21.12 [Arabidopsis
  misc_feature (156)..(476): Homolog of NCBI NO: 15233955 NR Description: expressed protein [Arabidopsis thaliana]
  misc_feature (111)..(473): Homolog of NCBI NO: 15227062 NR Description: hypothetical protein [Arabidopsis thaliana]
  misc_feature (127)..(460): Homolog of NCBI NO: 18420250 NR Description: expressed protein [Arabidopsis thaliana] AT4g38500/F20M13_60 [Arabidopsis thaliana]
  misc_feature (129)..(460): Homolog of NCBI NO: 7452444 NR Description: hypothetical protein F20M13.60 - Arabidopsis >gi|4467137|emb|CAB37506.1| putative protein [Arabidopsis >gi|7270833|emb|CAB80514.1| putative protein [Arabidopsis
  misc_feature (156)..(445): Homolog of NCBI NO: 15218687 NR Description: hypothetical protein [Arabidopsis thaliana]
MQKDREGIVHWICKFAGRKKVGMLLLFLISAVVFLRVLYVGKGEDSQEGQGPPSLHFNGSSGVNYSNMLQTNEELNMNIGNISFKAKEVIVFPPPPIHFLGYSLPQGHPCNSFTLPPPPADRKRTGPRPCPVCYLPVEEAVALMPNAPSFSPVLKNLTYIYEEPLNRETEFGGSDFGGYPTLKHRNDSFDIKETMSVHCGFVKGPQPGRNTGFDIDEADLLEMKQCRGIVVASAVFDAFDDVKAPQNISKYAEETVCFYMFVDEETESILKRERGLDGNKKVGIWRVVVVHNLPYSDGRRNGKVPKLLVHRMFPNARYSLWIDGKLELVVDPYQILERFLWRKNATFAISRHYKRFDVLVEAEANKAAGKYDNASIDFQVDFYKNEGLTPYSVAKLPITSDVPEGCVILREHVPISNLFTCLWFNEVDRFTSRDQISFSTVRDKIAAKTNWTVSMFLDCERRNFVVQRYHRAEQERFARQRPPVPNFPPPPPSPPPPVLISSDLPRKMSSGRATPPRRRGRDRRSGQRGHRKANLPVRLPDSA

SEQ ID NO: 98007 - protein, 521 aa, Arabidopsis thaliana
  peptide (1)..(521): Ceres Seq. ID no. 13579224
  misc_feature (134)..(448): Pfam Name: Protein of unknown function (DUF616) Pfam Description: Protein of unknown function (DUF616)
  misc_feature (1)..(512): Homolog of NCBI NO: 30695403 NR Description: expressed protein [Arabidopsis thaliana]
  misc_feature (12)..(285): Homolog of NCBI NO: 34905662 NR Description: P0475H04.14 [Oryza sativa (japonica
  misc_feature (264)..(509): Homolog of NCBI NO: 34905662 NR Description: P0475H04.14 [Oryza sativa (japonica
  misc_feature (66)..(512): Homolog of NCBI NO: 25405617 NR Description: hypothetical protein F8L10.10 [imported] - thaliana >gi|9454542|gb|AAF87865.1|AC022520_9 Unknown protein
  misc_feature (134)..(454): Homolog of NCBI NO: 25403429 NR Description: protein F12K21.12 [imported] - Arabidopsis >gi|8778248|gb|AAF79257.1|AC023279_6 F12K21.12 [Arabidopsis
  misc_feature (134)..(454): Homolog of NCBI NO: 15233955 NR Description: expressed protein [Arabidopsis thaliana]
  misc_feature (89)..(451): Homolog of NCBI NO: 15227062 NR Description: hypothetical protein [Arabidopsis thaliana]
  misc_feature (105)..(438): Homolog of NCBI NO: 18420250 NR Description: expressed protein [Arabidopsis thaliana] AT4g38500/F20M13_60 [Arabidopsis thaliana]
  misc_feature (107)..(438): Homolog of NCBI NO: 7452444 NR Description: hypothetical protein F20M13.60 - Arabidopsis >gi|4467137|emb|CAB37506.1| putative protein [Arabidopsis >gi|7270833|emb|CAB80514.1| putative protein [Arabidopsis
  misc_feature (134)..(423): Homolog of NCBI NO: 15218687 NR Description: hypothetical protein [Arabidopsis thaliana]
MLLLFLISAVVFLRVLYVGKGEDSQEGQGPPSLHFNGSSGVNYSNMLQTNEELNMNIGNISFKAKEVIVFPPPPIHFLGYSLPQGHPCNSFTLPPPPADRKRTGPRPCPVCYLPVEEAVALMPNAPSFSPVLKNLTYIYEEPLNRETEFGGSDFGGYPTLKHRNDSFDIKETMSVHCGFVKGPQPGRNTGFDIDEADLLEMKQCRGIVVASAVFDAFDDVKAPQNISKYAEETVCFYMFVDEETESILKRERGLDGNKKVGIWRVVVVHNLPYSDGRRNGKVPKLLVHRMFPNARYSLWIDGKLELVVDPYQILERFLWRKNATFAISRHYKRFDVLVEAEANKAAGKYDNASIDFQVDFYKNEGLTPYSVAKLPITSDVPEGCVILREHVPISNLFTCLWFNEVDRFTSRDQISFSTVRDKIAAKTNWTVSMFLDCERRNFVVQRYHRAEQERFARQRPPVPNFPPPPPSPPPPVLISSDLPRKMSSGRATPPRRRGRDRRSGQRGHRKANLPVRLPDSA

SEQ ID NO: 98008 - DNA, 2509 bp, Arabidopsis thaliana
  misc_feature (1)..(2509): Ceres Seq. ID no. 13579233
  misc_feature: MA Experiment ID: 20000185 Result: Up-regulated in Transcription
  misc_feature: MA Experiment 20000185 PARAMETER Experiment Name: At_Roots__P Parameter: Age (day) Value: 7 vs. 21
  misc_feature: MA Experiment 20000185 PARAMETER Experiment Name: At_Roots__P Parameter: Organism Value: A. thaliana
  misc_feature: MA Experiment 20000185 PARAMETER Experiment Name: At_Roots__P Parameter: Tissue Value: Roots vs. Whole Plant
  misc_feature: MA Experiment ID: 20000234 Result: Up-regulated in Transcription
  misc_feature: MA Experiment 20000234 PARAMETER Experiment Name: At_Siliques_P Parameter: Age (day) Value: 21
  misc_feature: MA Experiment 20000234 PARAMETER Experiment Name: At_Siliques_P Parameter: Organism Value: A. thaliana
  misc_feature: MA Experiment 20000234 PARAMETER Experiment Name: At_Siliques_P Parameter: Plant Line Value: WS
  misc_feature: MA Experiment 20000234 PARAMETER Experiment Name: At_Siliques_P Parameter: Tissue Value: Less Than 5mm Siliques vs. Whole Plant
  misc_feature: MA Experiment ID: 20000235 Result: Up-regulated in Transcription
  misc_feature: MA Experiment 20000235 PARAMETER Experiment Name: At_Siliques_P Parameter: Age (day) Value: 21
  misc_feature: MA Experiment 20000235 PARAMETER Experiment Name: At_Siliques_P Parameter: Organism Value: A. thaliana
  misc_feature: MA Experiment 20000235 PARAMETER Experiment Name: At_Siliques_P Parameter: Plant Line Value: WS
  misc_feature: MA Experiment 20000235 PARAMETER Experiment Name: At_Siliques_P Parameter: Tissue Value: 5-10mm Siliques vs. Whole Plant
  misc_feature: MA Experiment ID: 20000264 Result: Up-regulated in Transcription
  misc_feature: MA Experiment 20000264 PARAMETER Experiment Name: At_Open_Flower_P Parameter: Age (day) Value: 21
  misc_feature: MA Experiment 20000264 PARAMETER Experiment Name: At_Open_Flower_P Parameter: Plant Line Value: WS
  misc_feature: MA Experiment 20000264 PARAMETER Experiment Name: At_Open_Flower_P Parameter: Tissue Value: Open Flower vs. Whole Plant
  misc_feature: MA Experiment ID: 20000265 Result: Up-regulated in Transcription
  misc_feature: MA Experiment 20000265 PARAMETER Experiment Name: At_Open_Flower_P Parameter: Age (day) Value: 21
  misc_feature: MA Experiment 20000265 PARAMETER Experiment Name: At_Open_Flower_P Parameter: Plant Line Value: WS
  misc_feature: MA Experiment 20000265 PARAMETER Experiment Name: At_Open_Flower_P Parameter: Tissue Value: Closed Flower vs. Whole Plant
  misc_feature: MA Experiment ID: 20000286 Result: Up-regulated in Transcription
  misc_feature: MA Experiment 20000286 PARAMETER Experiment Name: At_Open_Flower_P Parameter: Age (day) Value: 21
  misc_feature: MA Experiment 20000286 PARAMETER Experiment Name: At_Open_Flower_P Parameter: Plant Line Value: WS
  misc_feature: MA Experiment 20000286 PARAMETER Experiment Name: At_Open_Flower_P Parameter: Tissue Value: Half Open vs. Whole Plant
  misc_feature: MA Experiment ID: 20000439 Result: Up-regulated in Transcription
  misc_feature: MA Experiment 20000439 PARAMETER Experiment Name: At_Roots__P Parameter: Age (day) Value: 14 vs. 21
  misc_feature: MA Experiment 20000439 PARAMETER Experiment Name: At_Roots__P Parameter: Organism Value: A. thaliana
  misc_feature: MA Experiment 20000439 PARAMETER Experiment Name: At_Roots__P Parameter: Tissue Value: Roots vs. Whole Plant
gaacgtgattcgcccttttctctttgcccaagagctatacgacaatacctccaccacaccccacacacacacacgagagacagagagagagagagaggaaatttgctactgagagatacattcagtgagtgtgtgtctgtcaccgtggaggagaaacggaaggaggatagatgaaaccgaccggagaaggaggaggggaagtcgccggagcggtggcggaaggttcggcgttgttaattgtaggagtaaagccagatgaatggagtagagaggttcttacatggtctttggtgaatgtagcgcgtcctggagatcgaatcgttgctcttcatgttctcgattattctctagagggctcaacgtcgcttatttcgttggttaggaattttgatactatgcttggtgtttatgaaagcttctgcaacttaaaacaggtagatttgaagttgaaggttttcagagggaagtcagctaggaaagttcttgtacaagaagttaaatcgtgtggagctacaagtttaatcgttggttcctctaggaaacatcacactatccgttcttcagcttctttagccaagtattgtgccaggaatcttgccaaggatgtctctgtttttgctgttaaaagtggcaagattatgttccgcagagtacctaataccaatggtgcagatggtccacagatgaatattccctctttagtttgtggatcaccagatattgctattgaagcggcaaagattggaaacagttttagccctgctagaacgagctcacgctggacaagaactagtcgtagttcgtcattgcagtctcctgacagcttaggtgtagacaatttgttggctttagtgccagtacaaacaaatgagactgattctggttcccttgagtcaggaccaggttggcattttcttcgcgggctttacggtaataatcgaaaaagctggaccaaagtttctgctaagaaggctgtacttcagtgggtttcgaggctgcgaggtcggcattcagaaactgtaatctatctggataggaaacggagtgactctggttgtgatgaagattgctcttctagtattgatggtgaagatgtttctatatcacggtttggttctgagcttatgcagtcacctctttctcctttcattggatcaaacaacattccagaagagctggaaggtctacatgaaaagtactcttccacatgtagattattcacatacgaggaagtcttgtcaattacctcaaactttgcatctgagaacttggttggagaaggtggtaatagttatgtttatagaggagatctaccagatggcagggaattagctgtcaaaatattgaaaccttgtctggatgtgttgaaggaatttatactggaaattgaagtcattaccagtgtacatcacaaaaatatagtatctctctttggtttctgtttcgagaataataatttgatgctggtatacgattatctaccacgaggaagccttgaagagaaccttcatggcaatagaaaggatgcaaagaaatttggctggatggagagatataaggtggcagtgggtgttgccgaggcgttagactatctgcataatactcatgatccagaagtaattcaccgggatgtcaaatcttctaatgttcttttggcagatgattttgagccacagctctcagatttcggattcgccagcttggcttcaagtacctcacagcatgtagcgggtggggatattgccgggacatttggttacctagcaccagagtacttcatgcacggtaaagtaaccgacaagattgatgtctatgcttttggtgttgtattgctcgagctcatatcgggtagaaaaccaatctgcgtcgaccagtctaaaggccaggagagccttgtcttgtgggcaaacccaattctagatagtggaaagtttgctcagttactggatcccagtctagaaaatgataacagtaacgatctaatcgagaaactattgttagctgccacgctatgcatcaaacgcacacctcatgaccgtccgcaaattggccttgtcctaaagatattacaaggggaagaagaagcaacagagtggggaaagcaacaagtgagagcctcagaagacgtgagcgcatatttgacaaatatagaatcacacataaacctcgcattgcttgatttggaagatgatgcagcttctgatagcagccctgaagctagtagtatctctgttgaggaatacttgaaagggcgatggagccgcactgctagcttcaacttcaactaataatttttactagtttaaccccgaaaatcccaaaatttgacgatattgtaagttgtgtaaattgtaatcgattttctgagattctcaagctttaagttgtgtcaatttaggaagagtgaatagctcttgtagagaggacttaagttggaatttgtcttctttgttttgtcagagcagaaaatgtttcaagtgttccactttcatatcggttttaaaagttt

SEQ ID NO: 98009 - protein, 705 aa, Arabidopsis thaliana
  peptide (1)..(705): Ceres Seq. ID no. 13579234
  misc_feature (18)..(150): Pfam Name: Universal stress protein family Pfam Description: Universal stress protein family
  misc_feature (327)..(592): Homolog of NCBI NO: 15223890 NR Description: hypothetical protein [Arabidopsis thaliana]
  misc_feature (6)..(160): Homolog of NCBI NO: 15223890 NR Description: hypothetical protein [Arabidopsis thaliana]
  misc_feature (579)..(703): Homolog of NCBI NO: 15223890 NR Description: hypothetical protein [Arabidopsis thaliana]
  misc_feature (208)..(703): Homolog of NCBI NO: 22329713 NR Description: expressed protein [Arabidopsis thaliana] At1g21590/F24J8_9 [Arabidopsis thaliana]
  misc_feature (13)..(160): Homolog of NCBI NO: 22329713 NR Description: expressed protein [Arabidopsis thaliana] At1g21590/F24J8_9 [Arabidopsis thaliana]
  misc_feature (404)..(703): Homolog of NCBI NO: 25518708 NR Description: hypothetical protein F24J8.18 - Arabidopsis >gi|9454581|gb|AAF87904.1|AC015447_14 Similar to protein kinases
  misc_feature (208)..(383): Homolog of NCBI NO: 25518708 NR Description: hypothetical protein F24J8.18 - Arabidopsis >gi|9454581|gb|AAF87904.1|AC015447_14 Similar to protein kinases
  misc_feature (13)..(160): Homolog of NCBI NO: 25518708 NR Description: hypothetical protein F24J8.18 - Arabidopsis >gi|9454581|gb|AAF87904.1|AC015447_14 Similar to protein kinases
  misc_feature (123)..(703): Homolog of NCBI NO: 28376688 NR Description: putative serine/threonine kinase [Oryza sativa
  misc_feature (1)..(187): Homolog of NCBI NO: 28376688 NR Description: putative serine/threonine kinase [Oryza sativa
MKPTGEGGGEVAGAVAEGSALLIVGVKPDEWSREVLTWSLVNVARPGDRIVALHVLDYSLEGSTSLISLVRNFDTMLGVYESFCNLKQVDLKLKVFRGKSARKVLVQEVKSCGATSLIVGSSRKHHTIRSSASLAKYCARNLAKDVSVFAVKSGKIMFRRVPNTNGADGPQMNIPSLVCGSPDIAIEAAKIGNSFSPARTSSRWTRTSRSSSLQSPDSLGVDNLLALVPVQTNETDSGSLESGPGWHFLRGLYGNNRKSWTKVSAKKAVLQWVSRLRGRHSETVIYLDRKRSDSGCDEDCSSSIDGEDVSISRFGSELMQSPLSPFIGSNNIPEELEGLHEKYSSTCRLFTYEEVLSITSNFASENLVGEGGNSYVYRGDLPDGRELAVKILKPCLDVLKEFILEIEVITSVHHKNIVSLFGFCFENNNLMLVYDYLPRGSLEENLHGNRKDAKKFGWMERYKVAVGVAEALDYLHNTHDPEVIHRDVKSSNVLLADDFEPQLSDFGFASLASSTSQHVAGGDIAGTFGYLAPEYFMHGKVTDKIDVYAFGVVLLELISGRKPICVDQSKGQESLVLWANPILDSGKFAQLLDPSLENDNSNDLIEKLLLAATLCIKRTPHDRPQIGLVLKILQGEEEATEWGKQQVRASEDVSAYLTNIESHINLALLDLEDDAASDSSPEASSISVEEYLKGRWSRTASFNFN

SEQ ID NO: 98010 - protein, 630 aa, Arabidopsis thaliana
  peptide (1)..(630): Ceres Seq. ID no. 13579235
  misc_feature (1)..(75): Pfam Name: Universal stress protein family Pfam Description: Universal stress protein family
  misc_feature (252)..(517): Homolog of NCBI NO: 15223890 NR Description: hypothetical protein [Arabidopsis thaliana]
  misc_feature (1)..(85): Homolog of NCBI NO: 15223890 NR Description: hypothetical protein [Arabidopsis thaliana]
  misc_feature (504)..(628): Homolog of NCBI NO: 15223890 NR Description: hypothetical protein [Arabidopsis thaliana]
  misc_feature (133)..(628): Homolog of NCBI NO: 22329713 NR Description: expressed protein [Arabidopsis thaliana] At1g21590/F24J8_9 [Arabidopsis thaliana]
  misc_feature (1)..(85): Homolog of NCBI NO: 22329713 NR Description: expressed protein [Arabidopsis thaliana] At1g21590/F24J8_9 [Arabidopsis thaliana]
  misc_feature (329)..(628): Homolog of NCBI NO: 25518708 NR Description: hypothetical protein F24J8.18 - Arabidopsis >gi|9454581|gb|AAF87904.1|AC015447_14 Similar to protein kinases
  misc_feature (133)..(308): Homolog of NCBI NO: 25518708 NR Description: hypothetical protein F24J8.18 - Arabidopsis >gi|9454581|gb|AAF87904.1|AC015447_14 Similar to protein kinases
  misc_feature (1)..(85): Homolog of NCBI NO: 25518708 NR Description: hypothetical protein F24J8.18 - Arabidopsis >gi|9454581|gb|AAF87904.1|AC015447_14 Similar to protein kinases
  misc_feature (48)..(628): Homolog of NCBI NO: 28376688 NR Description: putative serine/threonine kinase [Oryza sativa
  misc_feature (1)..(112): Homolog of NCBI NO: 28376688 NR Description: putative serine/threonine kinase [Oryza sativa
MLGVYESFCNLKQVDLKLKVFRGKSARKVLVQEVKSCGATSLIVGSSRKHHTIRSSASLAKYCARNLAKDVSVFAVKSGKIMFRRVPNTNGADGPQMNIPSLVCGSPDIAIEAAKIGNSFSPARTSSRWTRTSRSSSLQSPDSLGVDNLLALVPVQTNETDSGSLESGPGWHFLRGLYGNNRKSWTKVSAKKAVLQWVSRLRGRHSETVIYLDRKRSDSGCDEDCSSSIDGEDVSISRFGSELMQSPLSPFIGSNNIPEELEGLHEKYSSTCRLFTYEEVLSITSNFASENLVGEGGNSYVYRGDLPDGRELAVKILKPCLDVLKEFILEIEVITSVHHKNIVSLFGFCFENNNLMLVYDYLPRGSLEENLHGNRKDAKKFGWMERYKVAVGVAEALDYLHNTHDPEVIHRDVKSSNVLLADDFEPQLSDFGFASLASSTSQHVAGGDIAGTFGYLAPEYFMHGKVTDKIDVYAFGVVLLELISGRKPICVDQSKGQESLVLWANPILDSGKFAQLLDPSLENDNSNDLIEKLLLAATLCIKRTPHDRPQIGLVLKILQGEEEATEWGKQQVRASEDVSAYLTNIESHINLALLDLEDDAASDSSPEASSISVEEYLKGRWSRTASFNFN

SEQ ID NO: 98011 - protein, 549 aa, Arabidopsis thaliana
  peptide (1)..(549): Ceres Seq. ID no. 13579236
  misc_feature (171)..(436): Homolog of NCBI NO: 15223890 NR Description: hypothetical protein [Arabidopsis thaliana]
  misc_feature (423)..(547): Homolog of NCBI NO: 15223890 NR Description: hypothetical protein [Arabidopsis thaliana]
  misc_feature (52)..(547): Homolog of NCBI NO: 22329713 NR Description: expressed protein [Arabidopsis thaliana] At1g21590/F24J8_9 [Arabidopsis thaliana]
  misc_feature (248)..(547): Homolog of NCBI NO: 25518708 NR Description: hypothetical protein F24J8.18 - Arabidopsis >gi|9454581|gb|AAF87904.1|AC015447_14 Similar to protein kinases
  misc_feature (52)..(227): Homolog of NCBI NO: 25518708 NR Description: hypothetical protein F24J8.18 - Arabidopsis >gi|9454581|gb|AAF87904.1|AC015447_14 Similar to protein kinases
  misc_feature (1)..(547): Homolog of NCBI NO: 28376688 NR Description: putative serine/threonine kinase [Oryza sativa
  misc_feature (1)..(31): Homolog of NCBI NO: 28376688 NR Description: putative serine/threonine kinase [Oryza sativa
  misc_feature (192)..(532): Homolog of NCBI NO: 15227291 NR Description: protein kinase -related [Arabidopsis thaliana]
  misc_feature (142)..(500): Homolog of NCBI NO: 40253745 NR Description: SERK1 protein-like [Oryza sativa (japonica
  misc_feature (194)..(545): Homolog of NCBI NO: 15236248 NR Description: protein kinase - like [Arabidopsis thaliana]
MFRRVPNTNGADGPQMNIPSLVCGSPDIAIEAAKIGNSFSPARTSSRWTRTSRSSSLQSPDSLGVDNLLALVPVQTNETDSGSLESGPGWHFLRGLYGNNRKSWTKVSAKKAVLQWVSRLRGRHSETVIYLDRKRSDSGCDEDCSSSIDGEDVSISRFGSELMQSPLSPFIGSNNIPEELEGLHEKYSSTCRLFTYEEVLSITSNFASENLVGEGGNSYVYRGDLPDGRELAVKILKPCLDVLKEFILEIEVITSVHHKNIVSLFGFCFENNNLMLVYDYLPRGSLEENLHGNRKDAKKFGWMERYKVAVGVAEALDYLHNTHDPEVIHRDVKSSNVLLADDFEPQLSDFGFASLASSTSQHVAGGDIAGTFGYLAPEYFMHGKVTDKIDVYAFGVVLLELISGRKPICVDQSKGQESLVLWANPILDSGKFAQLLDPSLENDNSNDLIEKLLLAATLCIKRTPHDRPQIGLVLKILQGEEEATEWGKQQVRASEDVSAYLTNIESHINLALLDLEDDAASDSSPEASSISVEEYLKGRWSRTASFNFN

SEQ ID NO: 98012 - DNA, 1443 bp, Arabidopsis thaliana
  misc_feature (1)..(1443): Ceres Seq. ID no. 13579245
  misc_feature: MA Experiment ID: 20000185 Result: Up-regulated in Transcription
  misc_feature: MA Experiment 20000185 PARAMETER Experiment Name: At_Roots__P Parameter: Age (day) Value: 7 vs. 21
  misc_feature: MA Experiment 20000185 PARAMETER Experiment Name: At_Roots__P Parameter: Organism Value: A. thaliana
  misc_feature: MA Experiment 20000185 PARAMETER Experiment Name: At_Roots__P Parameter: Tissue Value: Roots vs. Whole Plant
  misc_feature: MA Experiment ID: 20000439 Result: Up-regulated in Transcription
  misc_feature: MA Experiment 20000439 PARAMETER Experiment Name: At_Roots__P Parameter: Age (day) Value: 14 vs. 21
  misc_feature: MA Experiment 20000439 PARAMETER Experiment Name: At_Roots__P Parameter: Organism Value: A. thaliana
  misc_feature: MA Experiment 20000439 PARAMETER Experiment Name: At_Roots__P Parameter: Tissue Value: Roots vs. Whole Plant
  misc_feature: MA Experiment ID: 20000451 Result: Up-regulated in Transcription
  misc_feature: MA Experiment 20000451 PARAMETER Experiment Name: At_CS6879_Shoots-Roots_P Parameter: Age (day) Value: 14
  misc_feature: MA Experiment 20000451 PARAMETER Experiment Name: At_CS6879_Shoots-Roots_P Parameter: Organism Value: A. thaliana
  misc_feature: MA Experiment 20000451 PARAMETER Experiment Name: At_CS6879_Shoots-Roots_P Parameter: Plant Line Value: CS6879 vs. WS
  misc_feature: MA Experiment 20000451 PARAMETER Experiment Name: At_CS6879_Shoots-Roots_P Parameter: Tissue Value: Roots
  misc_feature: MA Experiment ID: 20000573 Result: Down-regulated in Transcription
  misc_feature: MA Experiment 20000573 PARAMETER Experiment Name: At_100uM_ABA_Mutants__P Parameter: Organism Value: A. thaliana
  misc_feature: MA Experiment 20000573 PARAMETER Experiment Name: At_100uM_ABA_Mutants__P Parameter: Plant Line Value: CS22 vs. Ler wt
  misc_feature: MA Experiment 20000573 PARAMETER Experiment Name: At_100uM_ABA_Mutants__P Parameter: Timepoint (hr) Value: N/A
  misc_feature: MA Experiment 20000573 PARAMETER Experiment Name: At_100uM_ABA_Mutants__P Parameter: Tissue Value: Whole Plant
  misc_feature: MA Experiment 20000573 PARAMETER Experiment Name: At_100uM_ABA_Mutants__P Parameter: Treatment Value: None
  misc_feature: MA Experiment ID: 20000794 Result: Up-regulated in Transcription
  misc_feature: MA Experiment 20000794 PARAMETER Experiment Name: At_Petals_P Parameter: Age (day) Value: 23-25 days
  misc_feature: MA Experiment 20000794 PARAMETER Experiment Name: At_Petals_P Parameter: Plant Line Value: WS
  misc_feature: MA Experiment 20000794 PARAMETER Experiment Name: At_Petals_P Parameter: Tissue Value: Petals vs. Whole plant
  misc_feature: MA Experiment ID: 20001248 Result: Down-regulated in Transcription
  misc_feature: MA Experiment 20001248 PARAMETER Experiment Name: At_Far-red-induction_P Parameter: Age (day) Value: 7
  misc_feature: MA Experiment 20001248 PARAMETER Experiment Name: At_Far-red-induction_P Parameter: Light Value: Far-red vs. White
  misc_feature: MA Experiment 20001248 PARAMETER Experiment Name: At_Far-red-induction_P Parameter: Organism Value: A. thaliana
  misc_feature: MA Experiment 20001248 PARAMETER Experiment Name: At_Far-red-induction_P Parameter: Plant Line Value: Columbia
  misc_feature: MA Experiment 20001248 PARAMETER Experiment Name: At_Far-red-induction_P Parameter: Timepoint (hr) Value: 4
  misc_feature: MA Experiment 20001248 PARAMETER Experiment Name: At_Far-red-induction_P Parameter: Tissue Value: Whole Plant
  misc_feature: MA Experiment ID: 20001450 Result: Down-regulated in Transcription
  misc_feature: MA Experiment 20001450 PARAMETER Experiment Name: At_Far-red-induction_P Parameter: Age (day) Value: 7
  misc_feature: MA Experiment 20001450 PARAMETER Experiment Name: At_Far-red-induction_P Parameter: Light Value: Far-red vs. White
  misc_feature: MA Experiment 20001450 PARAMETER Experiment Name: At_Far-red-induction_P Parameter: Organism Value: A. thaliana
  misc_feature: MA Experiment 20001450 PARAMETER Experiment Name: At_Far-red-induction_P Parameter: Plant Line Value: Columbia
  misc_feature: MA Experiment 20001450 PARAMETER Experiment Name: At_Far-red-induction_P Parameter: Timepoint (hr) Value: 8
  misc_feature: MA Experiment 20001450 PARAMETER Experiment Name: At_Far-red-induction_P Parameter: Tissue Value: Whole Plant
aatgaattttggggtcaaattcatttcaactgattcaatcaattctcatgaattccatcttgtcaagcgtccttcctgctcccgaagatcctgttctcagtgtaatttttgcttgtagagatgatcctagtccggttaagttgaatttgagcgcaggtacctatcgaactgaggaaggaaagcctcttgttcttgatgttgtgagaagagcagagcaacagttagccaacgacctggacaaggaatatcttcccctcaatggacttcctgaatttaataaattaagtaccaagctcatcttaggtgatgatagtcctgcattgaaagagaatagagttgttacaacccaatgtttgtctggtactggttctttgagagttggagctgagtttctagcaacacacaacaaagaaagtgtcattttcgttccaaacccaacgtgggggaaccatccccgtatttttactttggcgggtttgtctgtccagtatttccgttattatgatccgaagagccgaggactcgacttcaaaggcatgctcgaggatcttggcgctgcacctcctggagctatagtggtacttcaagcttgtgcgcataaccccacaggagttgacccaacattcgaacaatgggaaaagattcgacgactagtgagatcgaaaagcttattacctttctttgatagtgcatatcagggttttgctagtggtagccttgacgcagatgcacaagcggttcgtatgtttgtagccgatggaggtgaatgtttgatagctcaaagttatgccaaaaatatgggcctttatggggagcgtattggctctcttacgatcgtatgcacatcagaagatgtcgctaagaaagttgagaaccaagtgctacttgttgtgaggcctatgtatcttacaccacctattcatggtgcatctattgttgccacaattctaaaaaacagtgatatgtacaatgactggaccattgagctgaaaggaatggctgaccgcataattagcatgcgtcaacagttatatgcagctctagaagctagaggaacacctggtgattggagtcacattattaaacatattgggatgtttacttttaccggattgagtgaggagcaagttcgcttgatggccaaagaatatcacatttacatgacttatgatgggaggataagcatggcaagtctaagttcgaagacagtgcctcaactcgctgatgctatacatgctgttgttactcgcatcgcctaattaaatttgcgattctgttcttttgttgtttaatttatgaacacaattagagaataaaactgcgttcttggtttacatttaataagatagcacaaagaagcaatattatggatgatattgtttctagttggtagtcaaacctaccaaaatgaggattgggacctttaaaccaacacagtttttt

SEQ ID NO: 98013 - protein, 403 aa, Arabidopsis thaliana
  peptide (1)..(403): Ceres Seq. ID no. 13579246
  misc_feature (82)..(399): Pfam Name: Aminotransferase class I and II Pfam Description: Aminotransferase class I and II
  misc_feature (1)..(403): Homolog of NCBI NO: 18407664 NR Description: aspartate aminotransferase, cytoplasmic isozyme 2 A/Asp4) [Arabidopsis thaliana] >gi|21542387|sp|P46646|AAT4_ARATH
  misc_feature (1)..(403): Homolog of NCBI NO: 693694 NR Description: aspartate aminotransferase
  misc_feature (1)..(403): Homolog of NCBI NO: 30696761 NR Description: aspartate aminotransferase, cytoplasmic isozyme 2
  misc_feature (1)..(376): Homolog of NCBI NO: 25287199 NR Description: protein F23N19.17 [imported] - Arabidopsis >gi|6630455|gb|AAF19543.1|AC007190_11 F23N19.17 [Arabidopsis
  misc_feature (1)..(402): Homolog of NCBI NO: 15239772 NR Description: aspartate aminotransferase, cytoplasmic isozyme 1 A/Asp2) [Arabidopsis thaliana] >gi|21542386|sp|P46645|AAT2_ARATH
  misc_feature (1)..(402): Homolog of NCBI NO: 693690 NR Description: aspartate aminotransferase
  misc_feature (1)..(400): Homolog of NCBI NO: 112972 NR Description: ASPARTATE AMINOTRANSFERASE, CYTOPLASMIC A) >gi|7434096|pir||T14311 aspartate transaminase (EC 2.6.1.1),
  misc_feature (2)..(402): Homolog of NCBI NO: 388896 NR Description: aspartate aminotransferase P1
  misc_feature (2)..(402): Homolog of NCBI NO: 168324 NR Description: aspartate aminotransferase P1
  misc_feature (3)..(401): Homolog of NCBI NO: 15239078 NR Description: aspartate aminotransferase, chloroplast A/Asp3) [Arabidopsis thaliana] >gi|1168258|sp|P46644|AAT3_ARATH aminotransferase, chloroplast precursor (Transaminase A)
MNSILSSVLPAPEDPVLSVIFACRDDPSPVKLNLSAGTYRTEEGKPLVLDVVRRAEQQLANDLDKEYLPLNGLPEFNKLSTKLILGDDSPALKENRVVTTQCLSGTGSLRVGAEFLATHNKESVIFVPNPTWGNHPRIFTLAGLSVQYFRYYDPKSRGLDFKGMLEDLGAAPPGAIVVLQACAHNPTGVDPTFEQWEKIRRLVRSKSLLPFFDSAYQGFASGSLDADAQAVRMFVADGGECLIAQSYAKNMGLYGERIGSLTIVCTSEDVAKKVENQVLLVVRPMYLTPPIHGASIVATILKNSDMYNDWTIELKGMADRIISMRQQLYAALEARGTPGDWSHIIKHIGMFTFTGLSEEQVRLMAKEYHIYMTYDGRISMASLSSKTVPQLADAIHAVVTRIA

SEQ ID NO: 98014 - protein, 240 aa, Arabidopsis thaliana
  peptide (1)..(240): Ceres Seq. ID no. 13579247
  misc_feature (1)..(236): Pfam Name: Aminotransferase class I and II Pfam Description: Aminotransferase class I and II
  misc_feature (1)..(240): Homolog of NCBI NO: 18407664 NR Description: aspartate aminotransferase, cytoplasmic isozyme 2 A/Asp4) [Arabidopsis thaliana] >gi|21542387|sp|P46646|AAT4_ARATH
  misc_feature (1)..(240): Homolog of NCBI NO: 693694 NR Description: aspartate aminotransferase
  misc_feature (1)..(240): Homolog of NCBI NO: 30696761 NR Description: aspartate aminotransferase, cytoplasmic isozyme 2
  misc_feature (1)..(213): Homolog of NCBI NO: 25287199 NR Description: protein F23N19.17 [imported] - Arabidopsis >gi|6630455|gb|AAF19543.1|AC007190_11 F23N19.17 [Arabidopsis
  misc_feature (1)..(239): Homolog of NCBI NO: 15239772 NR Description: aspartate aminotransferase, cytoplasmic isozyme 1 A/Asp2) [Arabidopsis thaliana] >gi|21542386|sp|P46645|AAT2_ARATH
  misc_feature (1)..(239): Homolog of NCBI NO: 693690 NR Description: aspartate aminotransferase
  misc_feature (1)..(237): Homolog of NCBI NO: 112972 NR Description: ASPARTATE AMINOTRANSFERASE, CYTOPLASMIC A) >gi|7434096|pir||T14311 aspartate transaminase (EC 2.6.1.1),
  misc_feature (1)..(239): Homolog of NCBI NO: 388896 NR Description: aspartate aminotransferase P1
  misc_feature (1)..(239): Homolog of NCBI NO: 168324 NR Description: aspartate aminotransferase P1
  misc_feature (1)..(238): Homolog of NCBI NO: 15239078 NR Description: aspartate aminotransferase, chloroplast A/Asp3) [Arabidopsis thaliana] >gi|1168258|sp|P46644|AAT3_ARATH aminotransferase, chloroplast precursor (Transaminase A)
MLEDLGAAPPGAIVVLQACAHNPTGVDPTFEQWEKIRRLVRSKSLLPFFDSAYQGFASGSLDADAQAVRMFVADGGECLIAQSYAKNMGLYGERIGSLTIVCTSEDVAKKVENQVLLVVRPMYLTPPIHGASIVATILKNSDMYNDWTIELKGMADRIISMRQQLYAALEARGTPGDWSHIIKHIGMFTFTGLSEEQVRLMAKEYHIYMTYDGRISMASLSSKTVPQLADAIHAVVTRIA

SEQ ID NO: 98015 - DNA, 1546 bp, Arabidopsis thaliana
  misc_feature (1)..(1546): Ceres Seq. ID no. 13579300
  misc_feature: MA Experiment ID: 20000452 Result: Down-regulated in Transcription
  misc_feature: MA Experiment 20000452 PARAMETER Experiment Name: At_CS6879_Shoots-Roots_P Parameter: Age (day) Value: 14
  misc_feature: MA Experiment 20000452 PARAMETER Experiment Name: At_CS6879_Shoots-Roots_P Parameter: Organism Value: A. thaliana
  misc_feature: MA Experiment 20000452 PARAMETER Experiment Name: At_CS6879_Shoots-Roots_P Parameter: Plant Line Value: CS6879 vs. WS
  misc_feature: MA Experiment 20000452 PARAMETER Experiment Name: At_CS6879_Shoots-Roots_P Parameter: Tissue Value: Shoots
  misc_feature: MA Experiment ID: 20000794 Result: Down-regulated in Transcription
  misc_feature: MA Experiment 20000794 PARAMETER Experiment Name: At_Petals_P Parameter: Age (day) Value: 23-25 days
  misc_feature: MA Experiment 20000794 PARAMETER Experiment Name: At_Petals_P Parameter: Plant Line Value: WS
  misc_feature: MA Experiment 20000794 PARAMETER Experiment Name: At_Petals_P Parameter: Tissue Value: Petals vs. Whole plant
  misc_feature: MA Experiment ID: 20001558 Result: Up-regulated in Transcription
  misc_feature: MA Experiment 20001558 PARAMETER Experiment Name: At_Drought_Soil_Dry_P Parameter: Age (day) Value: 27
  misc_feature: MA Experiment 20001558 PARAMETER Experiment Name: At_Drought_Soil_Dry_P Parameter: Organism Value: A. thaliana
  misc_feature: MA Experiment 20001558 PARAMETER Experiment Name: At_Drought_Soil_Dry_P Parameter: Plant Line Value: WS
  misc_feature: MA Experiment 20001558 PARAMETER Experiment Name: At_Drought_Soil_Dry_P Parameter: Post Timepoint (hr) Value: 6
  misc_feature: MA Experiment 20001558 PARAMETER Experiment Name: At_Drought_Soil_Dry_P Parameter: Post-Treatment Value: Re-Water vs. No Drought
  misc_feature: MA Experiment 20001558 PARAMETER Experiment Name: At_Drought_Soil_Dry_P Parameter: Timepoint (day) Value: 13
  misc_feature: MA Experiment 20001558 PARAMETER Experiment Name: At_Drought_Soil_Dry_P Parameter: Treatment Value: Drought vs. No Drought
ttgaactcaagtagccaaaatccaaaatctccgccatggctgagagcttctgagagagacacagccatggctacaacttcacacaacaaaccctcactcttccctctactctcccttctctgtttcatctccattttcctcctcctctctctatccaaacgcgcttccctctcctctcccaaaactcaccgctccgccaccgtcttccctccaaaacccgacggttccctctcacctctctccgccacttgcgacttctccgaaggctcctggatctacgaccccaaccccagatccaccaggtacaccagtagttgtaaagaaatcttcaaaggatggaattgtattcgtaacaacaaaaccaatggtttcgagatatctaattggcgatggaaacctaaacactgtgatcttccttcgtttgatccactcaaatttcttcagtctcatcgcaataccaacatcggatttgtgggtgattcattgaataggaacatgtttgtatctttattctgtatgttaaagagtgtgacgggtgaattgaagaagtggcgacctgccggtgcagatcgcggattcacgttttcgcagtataatttgactatcgcgtatcatcgaacaaatctattggctcgttatggtagatggtcagccaatgctaagggtggtgagttagaatctcttggatttaaagagggctatagagttgatgttgatattccagacagctcgtgggcgaaggcttcgagtttccatgacattctcattttgaacactgggcattggtggtgggcgccatcaaaatttgaccctgtaaaatctcctatgcttttctttgaaggcggtcggccaatacttccacctatacctcctgctactggcctagaccgggttctaaacaatatggtaaattttgtggagaaaacaaagcgacctggagggatcatattcttccggacacaatcacctaggcactttgaaggaggtgactgggaccaaggtggtacttgtcaacgactgcaacctttgttacctggaaaagttgaggaatttttctcagtggggaacaacggaacaaatgtagaggttcgtctcgtgaatcaacacctctataactccctcaagagtagaagcgccttccacgttttggacataactcgaatgagcgagtacagagccgacgctcatccggcagcagctggtggaaagaatcacgatgactgcatgcattggtgcctcccgggccttaccgacacttggaatgatttattcgttgcaactcttcatacgatcaaagctttgtaacctgaagaatcacacccgtctttagaatggttactcttgggtctagcgtcatagtcattttatttctttttgtactcttgtaaattttgatgttatcttctgcgatttttttttgtttagttattttttggcctacagtattcaaaagtgtttttaatattacatgcacttttcattttattttttttggtcaaacacttttcgtatctgtttgatatttcttctaaaaaattgaatcatc

SEQ ID NO: 98016 - protein, 434 aa, Arabidopsis thaliana
  peptide (1)..(434): Ceres Seq. ID no. 13579301
  misc_feature (263)..(428): Pfam Name: Arabidopsis proteins of unknown function Pfam Description: Arabidopsis proteins of unknown function
  misc_feature (23)..(434): Homolog of NCBI NO: 15225951 NR Description: expressed protein [Arabidopsis thaliana]
  misc_feature (32)..(428): Homolog of NCBI NO: 29027820 NR Description: OSJNBb0055I24.1 [Oryza sativa (japonica
  misc_feature (25)..(430): Homolog of NCBI NO: 15237710 NR Description: expressed protein [Arabidopsis thaliana] gb|AAD15463.1~gene_id:T12B11.6~similar to unknown protein thaliana] >gi|13430634|gb|AAK25939.1|AF360229_1 unknown protein
  misc_feature (25)..(343): Homolog of NCBI NO: 30698028 NR Description: expressed protein [Arabidopsis thaliana]
  misc_feature (25)..(343): Homolog of NCBI NO: 16226907 NR Description: AT5g64470/T12B11_6 [Arabidopsis thaliana]
  misc_feature (84)..(428): Homolog of NCBI NO: 21592371 NR Description: unknown [Arabidopsis thaliana]
  misc_feature (46)..(426): Homolog of NCBI NO: 6862912 NR Description: unknown protein [Arabidopsis thaliana]
  misc_feature (1)..(429): Homolog of NCBI NO: 15228743 NR Description: expressed protein [Arabidopsis thaliana]
  misc_feature (84)..(428): Homolog of NCBI NO: 15242021 NR Description: expressed protein [Arabidopsis thaliana]
  misc_feature (84)..(428): Homolog of NCBI NO: 15229797 NR Description: expressed protein [Arabidopsis thaliana]
LNSSSQNPKSPPWLRASERDTAMATTSHNKPSLFPLLSLLCFISIFLLLSLSKRASLSSPKTHRSATVFPPKPDGSLSPLSATCDFSEGSWIYDPNPRSTRYTSSCKEIFKGWNCIRNNKTNGFEISNWRWKPKHCDLPSFDPLKFLQSHRNTNIGFVGDSLNRNMFVSLFCMLKSVTGELKKWRPAGADRGFTFSQYNLTIAYHRTNLLARYGRWSANAKGGELESLGFKEGYRVDVDIPDSSWAKASSFHDILILNTGHWWWAPSKFDPVKSPMLFFEGGRPILPPIPPATGLDRVLNNMVNFVEKTKRPGGIIFFRTQSPRHFEGGDWDQGGTCQRLQPLLPGKVEEFFSVGNNGTNVEVRLVNQHLYNSLKSRSAFHVLDITRMSEYRADAHPAAAGGKNHDDCMHWCLPGLTDTWNDLFVATLHTIKAL

SEQ ID NO: 98017 - protein, 412 aa, Arabidopsis thaliana; identical to SEQ ID NO: 45103
  peptide (1)..(412): Ceres Seq. ID no. 13579302
  misc_feature (241)..(406): Pfam Name: Arabidopsis proteins of unknown function Pfam Description: Arabidopsis proteins of unknown function
  misc_feature (1)..(412): Homolog of NCBI NO: 15225951 NR Description: expressed protein [Arabidopsis thaliana]
  misc_feature (10)..(406): Homolog of NCBI NO: 29027820 NR Description: OSJNBb0055I24.1 [Oryza sativa (japonica
  misc_feature (3)..(408): Homolog of NCBI NO: 15237710 NR Description: expressed protein [Arabidopsis thaliana] gb|AAD15463.1~gene_id:T12B11.6~similar to unknown protein thaliana] >gi|13430634|gb|AAK25939.1|AF360229_1 unknown protein
  misc_feature (3)..(321): Homolog of NCBI NO: 30698028 NR Description: expressed protein [Arabidopsis thaliana]
  misc_feature (3)..(321): Homolog of NCBI NO: 16226907 NR Description: AT5g64470/T12B11_6 [Arabidopsis thaliana]
  misc_feature (62)..(406): Homolog of NCBI NO: 21592371 NR Description: unknown [Arabidopsis thaliana]
  misc_feature (24)..(404): Homolog of NCBI NO: 6862912 NR Description: unknown protein [Arabidopsis thaliana]
  misc_feature (1)..(407): Homolog of NCBI NO: 15228743 NR Description: expressed protein [Arabidopsis thaliana]
  misc_feature (62)..(406): Homolog of NCBI NO: 15242021 NR Description: expressed protein [Arabidopsis thaliana]
  misc_feature (62)..(406): Homolog of NCBI NO: 15229797 NR Description: expressed protein [Arabidopsis thaliana]

SEQ ID NO: 98018 - protein, 269 aa, Arabidopsis thaliana; identical to SEQ ID NO: 45104
  peptide (1)..(269): Ceres Seq. ID no. 13579303
  misc_feature (98)..(263): Pfam Name: Arabidopsis proteins of unknown function Pfam Description: Arabidopsis proteins of unknown function
  misc_feature (1)..(269): Homolog of NCBI NO: 15225951 NR Description: expressed protein [Arabidopsis thaliana]
  misc_feature (1)..(263): Homolog of NCBI NO: 29027820 NR Description: OSJNBb0055I24.1 [Oryza sativa (japonica
  misc_feature (1)..(265): Homolog of NCBI NO: 15237710 NR Description: expressed protein [Arabidopsis thaliana] gb|AAD15463.1~gene_id:T12B11.6~similar to unknown protein thaliana] >gi|13430634|gb|AAK25939.1|AF360229_1 unknown protein
  misc_feature (1)..(178): Homolog of NCBI NO: 30698028 NR Description: expressed protein [Arabidopsis thaliana]
  misc_feature (1)..(178): Homolog of NCBI NO: 16226907 NR Description: AT5g64470/T12B11_6 [Arabidopsis thaliana]
  misc_feature (1)..(263): Homolog of NCBI NO: 21592371 NR Description: unknown [Arabidopsis thaliana]
  misc_feature (1)..(261): Homolog of NCBI NO: 6862912 NR Description: unknown protein [Arabidopsis thaliana]
  misc_feature (1)..(264): Homolog of NCBI NO: 15228743 NR Description: expressed protein [Arabidopsis thaliana]
  misc_feature (1)..(263): Homolog of NCBI NO: 15242021 NR Description: expressed protein [Arabidopsis thaliana]
  misc_feature (1)..(263): Homolog of NCBI NO: 15229797 NR Description: expressed protein [Arabidopsis thaliana]

SEQ ID NO: 98019 - DNA, 2290 bp, Arabidopsis thaliana
  misc_feature (1)..(2290): Ceres Seq. ID no. 13579309
  misc_feature: MA Experiment ID: 20000180 Result: Down-regulated in Transcription
  misc_feature: MA Experiment 20000180 PARAMETER Experiment Name: At_Germinating_Seeds_P Parameter: Age (hr) Value: 24 vs. 0
  misc_feature: MA Experiment 20000180 PARAMETER Experiment Name: At_Germinating_Seeds_P Parameter: Tissue Value: Germinating Seeds
  misc_feature: MA Experiment ID: 20000182 Result: Up-regulated in Transcription
  misc_feature: MA Experiment 20000182 PARAMETER Experiment Name: At_2mM_SA_P Parameter: Age (day) Value: 14
  misc_feature: MA Experiment 20000182 PARAMETER Experiment Name: At_2mM_SA_P Parameter: Organism Value: A. thaliana
  misc_feature: MA Experiment 20000182 PARAMETER Experiment Name: At_2mM_SA_P Parameter: Plant Line Value: WS
  misc_feature: MA Experiment 20000182 PARAMETER Experiment Name: At_2mM_SA_P Parameter: Timepoint (hr) Value: 6
  misc_feature: MA Experiment 20000182 PARAMETER Experiment Name: At_2mM_SA_P Parameter: Tissue Value: Aerial
  misc_feature: MA Experiment 20000182 PARAMETER Experiment Name: At_2mM_SA_P Parameter: Treatment Value: 2mM SA vs. No Treatment
  misc_feature: MA Experiment ID: 20000184 Result: Down-regulated in Transcription
  misc_feature: MA Experiment 20000184 PARAMETER Experiment Name: At_Shoots__P Parameter: Age (day) Value: 7
  misc_feature: MA Experiment 20000184 PARAMETER Experiment Name: At_Shoots__P Parameter: Tissue Value: Shoots vs. Whole Plant
  misc_feature: MA Experiment ID: 20000185 Result: Down-regulated in Transcription
  misc_feature: MA Experiment 20000185 PARAMETER Experiment Name: At_Roots__P Parameter: Age (day) Value: 7 vs. 21
  misc_feature: MA Experiment 20000185 PARAMETER Experiment Name: At_Roots__P Parameter: Organism Value: A. thaliana
  misc_feature: MA Experiment 20000185 PARAMETER Experiment Name: At_Roots__P Parameter: Tissue Value: Roots vs. Whole Plant
  misc_feature: MA Experiment ID: 20000234 Result: Down-regulated in Transcription
  misc_feature: MA Experiment 20000234 PARAMETER Experiment Name: At_Siliques_P Parameter: Age (day) Value: 21
  misc_feature: MA Experiment 20000234 PARAMETER Experiment Name: At_Siliques_P Parameter: Organism Value: A. thaliana
  misc_feature: MA Experiment 20000234 PARAMETER Experiment Name: At_Siliques_P Parameter: Plant Line Value: WS
  misc_feature: MA Experiment 20000234 PARAMETER Experiment Name: At_Siliques_P Parameter: Tissue Value: Less Than 5mm Siliques vs. Whole Plant
  misc_feature: MA Experiment ID: 20000235 Result: Down-regulated in Transcription
  misc_feature: MA Experiment 20000235 PARAMETER Experiment Name: At_Siliques_P Parameter: Age (day) Value: 21
  misc_feature: MA Experiment 20000235 PARAMETER Experiment Name: At_Siliques_P Parameter: Organism Value: A. thaliana
  misc_feature: MA Experiment 20000235 PARAMETER Experiment Name: At_Siliques_P Parameter: Plant Line Value: WS
  misc_feature: MA Experiment 20000235 PARAMETER Experiment Name: At_Siliques_P Parameter: Tissue Value: 5-10mm Siliques vs. Whole Plant
  misc_feature: MA Experiment ID: 20000264 Result: Down-regulated in Transcription
  misc_feature: MA Experiment 20000264 PARAMETER Experiment Name: At_Open_Flower_P Parameter: Age (day) Value: 21
  misc_feature: MA Experiment 20000264 PARAMETER Experiment Name: At_Open_Flower_P Parameter: Plant Line Value: WS
  misc_feature: MA Experiment 20000264 PARAMETER Experiment Name: At_Open_Flower_P Parameter: Tissue Value: Open Flower vs. Whole Plant
  misc_feature: MA Experiment ID: 20000265 Result: Down-regulated in Transcription
  misc_feature: MA Experiment 20000265 PARAMETER Experiment Name: At_Open_Flower_P Parameter: Age (day) Value: 21
  misc_feature: MA Experiment 20000265 PARAMETER Experiment Name: At_Open_Flower_P Parameter: Plant Line Value: WS
  misc_feature: MA Experiment 20000265 PARAMETER Experiment Name: At_Open_Flower_P Parameter: Tissue Value: Closed Flower vs. Whole Plant
  misc_feature: MA Experiment ID: 20000286 Result: Down-regulated in Transcription
  misc_feature: MA Experiment 20000286 PARAMETER Experiment Name: At_Open_Flower_P Parameter: Age (day) Value: 21
  misc_feature: MA Experiment 20000286 PARAMETER Experiment Name: At_Open_Flower_P Parameter: Plant Line Value: WS
  misc_feature: MA Experiment 20000286 PARAMETER Experiment Name: At_Open_Flower_P Parameter: Tissue Value: Half Open vs. Whole Plant
  misc_feature: MA Experiment ID: 20000436 Result: Up-regulated in Transcription
  misc_feature: MA Experiment 20000436 PARAMETER Experiment Name: At_Drought_P Parameter: Age (day) Value: 7
  misc_feature: MA Experiment 20000436 PARAMETER Experiment Name: At_Drought_P Parameter: Organism Value: A. thaliana
  misc_feature: MA Experiment 20000436 PARAMETER Experiment Name: At_Drought_P Parameter: Plant Line Value: WS
  misc_feature: MA Experiment 20000436 PARAMETER Experiment Name: At_Drought_P Parameter: Timepoint (hr) Value: 12
  misc_feature: MA Experiment 20000436 PARAMETER Experiment Name: At_Drought_P Parameter: Tissue Value: Whole Plant
  misc_feature: MA Experiment 20000436 PARAMETER Experiment Name: At_Drought_P Parameter: Treatment Value: Drought vs. No Drought
  misc_feature: MA Experiment ID: 20000437 Result: Up-regulated in Transcription
  misc_feature: MA Experiment 20000437 PARAMETER Experiment Name: At_Drought_P Parameter: Age (day) Value: 8
  misc_feature: MA Experiment 20000437 PARAMETER Experiment Name: At_Drought_P Parameter: Organism Value: A. thaliana
  misc_feature: MA Experiment 20000437 PARAMETER Experiment Name: At_Drought_P Parameter: Plant Line Value: WS
  misc_feature: MA Experiment 20000437 PARAMETER Experiment Name: At_Drought_P Parameter: Timepoint (hr) Value: 24
  misc_feature: MA Experiment 20000437 PARAMETER Experiment Name: At_Drought_P Parameter: Tissue Value: Whole Plant
  misc_feature: MA Experiment 20000437 PARAMETER Experiment Name: At_Drought_P Parameter: Treatment Value: Drought vs. No Drought
  misc_feature: MA Experiment ID: 20000438 Result: Down-regulated in Transcription
  misc_feature: MA Experiment 20000438 PARAMETER Experiment Name: At_Shoots__P Parameter: Age (day) Value: 14
  misc_feature: MA Experiment 20000438 PARAMETER Experiment Name: At_Shoots__P Parameter: Tissue Value: Shoots vs. Whole Plant
  misc_feature: MA Experiment ID: 20000439 Result: Down-regulated in Transcription
  misc_feature: MA Experiment 20000439 PARAMETER Experiment Name: At_Roots__P Parameter: Age (day) Value: 14 vs. 21
  misc_feature: MA Experiment 20000439 PARAMETER Experiment Name: At_Roots__P Parameter: Organism Value: A. thaliana
  misc_feature: MA Experiment 20000439 PARAMETER Experiment Name: At_Roots__P Parameter: Tissue Value: Roots vs. Whole Plant
  misc_feature: MA Experiment ID: 20000453 Result: Up-regulated in Transcription
  misc_feature: MA Experiment 20000453 PARAMETER Experiment Name: At_100uM_ABA_P Parameter: Age (day) Value: 15
  misc_feature: MA Experiment 20000453 PARAMETER Experiment Name: At_100uM_ABA_P Parameter: Organism Value: A. thaliana
  misc_feature: MA Experiment 20000453 PARAMETER Experiment Name: At_100uM_ABA_P Parameter: Plant Line Value: WS
  misc_feature: MA Experiment 20000453 PARAMETER Experiment Name: At_100uM_ABA_P Parameter: Timepoint (hr) Value: 24
  misc_feature: MA Experiment 20000453 PARAMETER Experiment Name: At_100uM_ABA_P Parameter: Tissue Value: Aerial
  misc_feature: MA Experiment 20000453 PARAMETER Experiment Name: At_100uM_ABA_P Parameter: Treatment Value: 100uM ABA vs. No Treatment
  misc_feature: MA Experiment ID: 20000455 Result: Up-regulated in Transcription
  misc_feature: MA Experiment 20000455 PARAMETER Experiment Name: At_100uM_ABA_P Parameter: Age (day) Value: 16
  misc_feature: MA Experiment 20000455 PARAMETER Experiment Name: At_100uM_ABA_P Parameter: Organism Value: A. thaliana
  misc_feature: MA Experiment 20000455 PARAMETER Experiment Name: At_100uM_ABA_P Parameter: Plant Line Value: WS
  misc_feature: MA Experiment 20000455 PARAMETER Experiment Name: At_100uM_ABA_P Parameter: Timepoint (hr) Value: 48
  misc_feature: MA Experiment 20000455 PARAMETER Experiment Name: At_100uM_ABA_P Parameter: Tissue Value: Aerial
  misc_feature: MA Experiment 20000455 PARAMETER Experiment Name: At_100uM_ABA_P Parameter: Treatment Value: 100uM ABA vs. No Treatment
  misc_feature: MA Experiment ID: 20000527 Result: Down-regulated in Transcription
  misc_feature: MA Experiment 20000527 PARAMETER Experiment Name: At_10percent_PEG_P Parameter: Age (day) Value: 20
  misc_feature: MA Experiment 20000527 PARAMETER Experiment Name: At_10percent_PEG_P Parameter: Organism Value: A. thaliana
  misc_feature: MA Experiment 20000527 PARAMETER Experiment Name: At_10percent_PEG_P Parameter: Plant Line Value: WS
  misc_feature: MA Experiment 20000527 PARAMETER Experiment Name: At_10percent_PEG_P Parameter: Timepoint (day) Value: 20
  misc_feature: MA Experiment 20000527 PARAMETER Experiment Name: At_10percent_PEG_P Parameter: Tissue Value: Whole Plant
  misc_feature: MA Experiment 20000527 PARAMETER Experiment Name: At_10percent_PEG_P Parameter: Treatment Value: 10percent PEG vs. No Treatment
  misc_feature: MA Experiment ID: 20000794 Result: Down-regulated in Transcription
  misc_feature: MA Experiment 20000794 PARAMETER Experiment Name: At_Petals_P Parameter: Age (day) Value: 23-25 days
  misc_feature: MA Experiment 20000794 PARAMETER Experiment Name: At_Petals_P Parameter: Plant Line Value: WS
  misc_feature: MA Experiment 20000794 PARAMETER Experiment Name: At_Petals_P Parameter: Tissue Value: Petals vs. Whole plant
  misc_feature: MA Experiment ID: 20001248 Result: Up-regulated in Transcription
  misc_feature: MA Experiment 20001248 PARAMETER Experiment Name: At_Far-red-induction_P Parameter: Age (day) Value: 7
  misc_feature: MA Experiment 20001248 PARAMETER Experiment Name: At_Far-red-induction_P Parameter: Light Value: Far-red vs. White
  misc_feature: MA Experiment 20001248 PARAMETER Experiment Name: At_Far-red-induction_P Parameter: Organism Value: A. thaliana
  misc_feature: MA Experiment 20001248 PARAMETER Experiment Name: At_Far-red-induction_P Parameter: Plant Line Value: Columbia
  misc_feature: MA Experiment 20001248 PARAMETER Experiment Name: At_Far-red-induction_P Parameter: Timepoint (hr) Value: 4
  misc_feature: MA Experiment 20001248 PARAMETER Experiment Name: At_Far-red-induction_P Parameter: Tissue Value: Whole Plant
  misc_feature: MA Experiment ID: 20001450 Result: Up-regulated in Transcription
  misc_feature: MA Experiment 20001450 PARAMETER Experiment Name: At_Far-red-induction_P Parameter: Age (day) Value: 7
  misc_feature: MA Experiment 20001450 PARAMETER Experiment Name: At_Far-red-induction_P Parameter: Light Value: Far-red vs. White
  misc_feature: MA Experiment 20001450 PARAMETER Experiment Name: At_Far-red-induction_P Parameter: Organism Value: A. thaliana
  misc_feature: MA Experiment 20001450 PARAMETER Experiment Name: At_Far-red-induction_P Parameter: Plant Line Value: Columbia
  misc_feature: MA Experiment 20001450 PARAMETER Experiment Name: At_Far-red-induction_P Parameter: Timepoint (hr) Value: 8
  misc_feature: MA Experiment 20001450 PARAMETER Experiment Name: At_Far-red-induction_P Parameter: Tissue Value: Whole Plant
  misc_feature: MA Experiment ID: 20001451 Result: Up-regulated in Transcription
  misc_feature: MA Experiment 20001451 PARAMETER Experiment Name: At_Far-red-induction_P Parameter: Age (day) Value: 7
  misc_feature: MA Experiment 20001451 PARAMETER Experiment Name: At_Far-red-induction_P Parameter: Light Value: Far-red vs. White
  misc_feature: MA Experiment 20001451 PARAMETER Experiment Name: At_Far-red-induction_P Parameter: Organism Value: A. thaliana
  misc_feature: MA Experiment 20001451 PARAMETER Experiment Name: At_Far-red-induction_P Parameter: Plant Line Value: Columbia
  misc_feature: MA Experiment 20001451 PARAMETER Experiment Name: At_Far-red-induction_P Parameter: Timepoint (hr) Value: 24
  misc_feature: MA Experiment 20001451 PARAMETER Experiment Name: At_Far-red-induction_P Parameter: Tissue Value: Whole Plant
  misc_feature: MA Experiment ID: 20001556 Result: Up-regulated in Transcription
  misc_feature: MA Experiment 20001556 PARAMETER Experiment Name: At_Drought_Soil_Dry_P Parameter: Age (day) Value: 26
  misc_feature: MA Experiment 20001556 PARAMETER Experiment Name: At_Drought_Soil_Dry_P Parameter: Organism Value: A. thaliana
  misc_feature: MA Experiment 20001556 PARAMETER Experiment Name: At_Drought_Soil_Dry_P Parameter: Plant Line Value: WS
  misc_feature: MA Experiment 20001556 PARAMETER Experiment Name: At_Drought_Soil_Dry_P Parameter: Post Timepoint (hr) Value: None
  misc_feature: MA Experiment 20001556 PARAMETER Experiment Name: At_Drought_Soil_Dry_P Parameter: Post-Treatment Value: None
  misc_feature: MA Experiment 20001556 PARAMETER Experiment Name: At_Drought_Soil_Dry_P Parameter: Timepoint (day) Value: 12
  misc_feature: MA Experiment 20001556 PARAMETER Experiment Name: At_Drought_Soil_Dry_P Parameter: Treatment Value: Drought vs. No Drought
  misc_feature: MA Experiment ID: 20001557 Result: Up-regulated in Transcription
  misc_feature: MA Experiment 20001557 PARAMETER Experiment Name: At_Drought_Soil_Dry_P Parameter: Age (day) Value: 27
  misc_feature: MA Experiment 20001557 PARAMETER Experiment Name: At_Drought_Soil_Dry_P Parameter: Organism Value: A. thaliana
  misc_feature: MA Experiment 20001557 PARAMETER Experiment Name: At_Drought_Soil_Dry_P Parameter: Plant Line Value: WS
  misc_feature: MA Experiment 20001557 PARAMETER Experiment Name: At_Drought_Soil_Dry_P Parameter: Post Timepoint (hr) Value: 3
  misc_feature: MA Experiment 20001557 PARAMETER Experiment Name: At_Drought_Soil_Dry_P Parameter: Post-Treatment Value: Re-Water vs. No Drought
  misc_feature: MA Experiment 20001557 PARAMETER Experiment Name: At_Drought_Soil_Dry_P Parameter: Timepoint (day) Value: 13
  misc_feature: MA Experiment 20001557 PARAMETER Experiment Name: At_Drought_Soil_Dry_P Parameter: Treatment Value: Drought vs. No Drought
  misc_feature: MA Experiment ID: 20001558 Result: Up-regulated in Transcription
  misc_feature: MA Experiment 20001558 PARAMETER Experiment Name: At_Drought_Soil_Dry_P Parameter: Age (day) Value: 27
  misc_feature: MA Experiment 20001558 PARAMETER Experiment Name: At_Drought_Soil_Dry_P Parameter: Organism Value: A. thaliana
  misc_feature: MA Experiment 20001558 PARAMETER Experiment Name: At_Drought_Soil_Dry_P Parameter: Plant Line Value: WS
  misc_feature: MA Experiment 20001558 PARAMETER Experiment Name: At_Drought_Soil_Dry_P Parameter: Post Timepoint (hr) Value: 6
  misc_feature: MA Experiment 20001558 PARAMETER Experiment Name: At_Drought_Soil_Dry_P Parameter: Post-Treatment Value: Re-Water vs. No Drought
  misc_feature: MA Experiment 20001558 PARAMETER Experiment Name: At_Drought_Soil_Dry_P Parameter: Timepoint (day) Value: 13
  misc_feature: MA Experiment 20001558 PARAMETER Experiment Name: At_Drought_Soil_Dry_P Parameter: Treatment Value: Drought vs. No Drought
  misc_feature: MA Experiment ID: 20001559 Result: Up-regulated in Transcription
  misc_feature: MA Experiment 20001559 PARAMETER Experiment Name: At_Drought_Soil_Dry_P Parameter: Age (day) Value: 28
  misc_feature: MA Experiment 20001559 PARAMETER Experiment Name: At_Drought_Soil_Dry_P Parameter: Organism Value: A. thaliana
  misc_feature: MA Experiment 20001559 PARAMETER Experiment Name: At_Drought_Soil_Dry_P Parameter: Plant Line Value: WS
  misc_feature: MA Experiment 20001559 PARAMETER Experiment Name: At_Drought_Soil_Dry_P Parameter: Post Timepoint (hr) Value: 29
  misc_feature: MA Experiment 20001559 PARAMETER Experiment Name: At_Drought_Soil_Dry_P Parameter: Post-Treatment Value: Re-Water vs. No Drought
  misc_feature: MA Experiment 20001559 PARAMETER Experiment Name: At_Drought_Soil_Dry_P Parameter: Timepoint (day) Value: 14
  misc_feature: MA Experiment 20001559 PARAMETER Experiment Name: At_Drought_Soil_Dry_P Parameter: Treatment Value: Drought vs. No Drought
  misc_feature: MA Experiment ID: 20001560 Result: Up-regulated in Transcription
  misc_feature: MA Experiment 20001560 PARAMETER Experiment Name: At_Drought_Soil_Dry_P Parameter: Age (day) Value: 28
  misc_feature: MA Experiment 20001560 PARAMETER Experiment Name: At_Drought_Soil_Dry_P Parameter: Organism Value: A. thaliana
  misc_feature: MA Experiment 20001560 PARAMETER Experiment Name: At_Drought_Soil_Dry_P Parameter: Plant Line Value: WS
  misc_feature: MA Experiment 20001560 PARAMETER Experiment Name: At_Drought_Soil_Dry_P Parameter: Post Timepoint (hr) Value: None
  misc_feature: MA Experiment 20001560 PARAMETER Experiment Name: At_Drought_Soil_Dry_P Parameter: Post-Treatment Value: None
  misc_feature: MA Experiment 20001560 PARAMETER Experiment Name: At_Drought_Soil_Dry_P Parameter: Timepoint (day) Value: 14
  misc_feature: MA Experiment 20001560 PARAMETER Experiment Name: At_Drought_Soil_Dry_P Parameter: Treatment Value: Drought vs. No Drought
  misc_feature: MA Experiment ID: 20001773 Result: Down-regulated in Transcription
  misc_feature: MA Experiment 20001773 PARAMETER Experiment Name: At_Far-red-enriched-adult_P Parameter: Age (day) Value: 30
  misc_feature: MA Experiment 20001773 PARAMETER Experiment Name: At_Far-red-enriched-adult_P Parameter: Light Value: Far-red enriched vs. White
  misc_feature: MA Experiment 20001773 PARAMETER Experiment Name: At_Far-red-enriched-adult_P Parameter: Organism Value: A. thaliana
  misc_feature: MA Experiment 20001773 PARAMETER Experiment Name: At_Far-red-enriched-adult_P Parameter: Plant Line Value: Columbia
  misc_feature: MA Experiment 20001773 PARAMETER Experiment Name: At_Far-red-enriched-adult_P Parameter: Timepoint (hr) Value: 48
  misc_feature: MA Experiment 20001773 PARAMETER Experiment Name: At_Far-red-enriched-adult_P Parameter: Tissue Value: Aerial
  misc_feature: MA Experiment ID: 20001904 Result: Up-regulated in Transcription
  misc_feature: MA Experiment 20001904 PARAMETER Experiment Name: At_Drought_Reproduction_P Parameter: Age (day) Value: 37
  misc_feature: MA Experiment 20001904 PARAMETER Experiment Name: At_Drought_Reproduction_P Parameter: Organism Value: A. thaliana
  misc_feature: MA Experiment 20001904 PARAMETER Experiment Name: At_Drought_Reproduction_P Parameter: Plant Line Value: WS
  misc_feature: MA Experiment 20001904 PARAMETER Experiment Name: At_Drought_Reproduction_P Parameter: Timepoint (day) Value: 7
  misc_feature: MA Experiment 20001904 PARAMETER Experiment Name: At_Drought_Reproduction_P Parameter: Tissue Value: Rosettes
  misc_feature: MA Experiment 20001904 PARAMETER Experiment Name: At_Drought_Reproduction_P Parameter: Treatment Value: Drought vs. No Drought
  misc_feature: MA Experiment ID: 20001906 Result: Up-regulated in Transcription
  misc_feature: MA Experiment 20001906 PARAMETER Experiment Name: At_Drought_Reproduction_P Parameter: Age (day) Value: 35
  misc_feature: MA Experiment 20001906 PARAMETER Experiment Name: At_Drought_Reproduction_P Parameter: Organism Value: A. thaliana
  misc_feature: MA Experiment 20001906 PARAMETER Experiment Name: At_Drought_Reproduction_P Parameter: Plant Line Value: WS
  misc_feature: MA Experiment 20001906 PARAMETER Experiment Name: At_Drought_Reproduction_P Parameter: Timepoint (day) Value: 5
  misc_feature: MA Experiment 20001906 PARAMETER Experiment Name: At_Drought_Reproduction_P Parameter: Tissue Value: Siliques
  misc_feature: MA Experiment 20001906 PARAMETER Experiment Name: At_Drought_Reproduction_P Parameter: Treatment Value: Drought vs. No Drought
  misc_feature: Pfam Name: Glyco_hydro_1 Pfam Description: Glycosyl hydrolase family 1
atcactttgaaatctcaaaagacaccaagcaaaaaaacaaagacagacaaaaaaaaaagagacagaaagaaaaagaaaaaaagtaaattgtccgaactaccttcttatcctttttatcatctcaatgttagaaaatatgatcaattctctagaattagatcggcatagttttcctgatgatttcatctttgggacagctgcctcggcgtttcagtacgaaggtgcaacaagtgaaggtggcaagtctccaactatatgggatcacttcaccctctcgtatccagaaaggaccaaaatgcataatgcagatgtagcaattgatttttatcatcgttacaaggatggcataaaattgatgaaggagctaaacatggacgctttccgattttcaatctcgtgggcaagattaatacccagtggaaagctaaaggatggagtaaacaaagaaggtgtacaattctacaaggatctcatagacgaacttcttgctaatgacatacaaccttcgatgacgctctatcattgggaccacccacaatctttggaggacgaatatggtggctttctaagccctaaaatcgtagaagattttcgagattttgccagaatttgttttgaagagtttggagataaagttaagatgtggacaacaatcaacgaaccttatataatgactgttgcgggttatgatcaaggtaacaaggcggctggacgatgctcaaaatgggtaaacgaaaagtgtcaggctggagattcgagaaccgagccttacattgtttcacatcacactcttcttgcccatgccgctgcagtggaagaaattcgaaaatgtgaaaaaacttcgcatgatggccaaattgggatagtactatcaccaagatggttcgagccttatcattccgattcaactgacgataaagaagcagctgaacgagctcttgcctttgaaattggatggcatcttgatccagtcattcacggagattatccagagattgtaaaaaagtacgcgggaaataaattaccttcatttactgttgaacaatcaaagatgttacaaaattcatcagatttcgttagaattaattactacacggctcgcttcgctgctcatcttcctcacatagaccctgaaaaacctcgtttcaaaactgaccaccatgtggaatggaaactgactaatcacagtggtcacatcatcggacctggggtacgtatttacgtctttttttcataactatcaatttcaaaagctacatgtaatcattctaagatattttaaattttgtattatatatcctcaggaagaaaggggcttcttattttcacacccggaaggcttacgaaaagttcttaactatattaaagagagatacaataacatgccagtctacatcaaagaaaatggtcaaaaactctttccttttcttttttttgctaaagcagaaagtttttttttgttaactagaaattcagaaaactttttagtacgtagttatttaactaaagatttttttatttttttattttttaactctaccacacattaataatatcctagcagtgaattgaaactgaagtttgatttaaatatatttccctaaccagttcaacaaactgatttaaaaaaaaaaaaaaatggtgtgactattaataatttacgttgattactgaattacaggaattaatgacaacgacgacggtacaaaaccaagagaagaaattgtgaaggacacatttaggattgaataccataagacacatttcgaagaacttcacaaagctatagtggaagatgggtgtgacgtaagaggatattacgcatggtcattgatggacaattttgaatgggagcatggatacactgcaagatttggtctatactatgttgattttgtcaatggtctcaaacgttatccaaaagattcggtcaaatggtttaagcggttccttaagaaatcggtcgtcggagagagtaacaaagaggaggtagaggagatgtcacgcgcggaagggaataagacttttaagggtttcgaagaatcggcgggtttctttgcatctttcatggcaatgaaccaatcgaggagagatgaggagaataatcgttgctcctttgattttcctcatactcattttggtgttttgcaaggcatagagaacccatcttcattttattgatttcaaatcccttatgtttttaaattccttatggttggacatgtagttaattagaatttagctcatgttaatatatgaacattttcatggtaatatttttcttcttggg

SEQ ID NO: 98020 - protein, 370 aa, Arabidopsis thaliana
  peptide (1)..(370): Ceres Seq. ID no. 13579310
  misc_feature: Pfam Name: Glyco_hydro_1 Pfam Description: Glycosyl hydrolase family 1
  misc_feature (1)..(370): Homolog of NCBI NO: 15232262 NR Description: glycosyl hydrolase family 1, beta-glucosidase
  misc_feature (1)..(370): Homolog of NCBI NO: 10834548 NR Description: beta-glucosidase [Arabidopsis thaliana]
  misc_feature (1)..(362): Homolog of NCBI NO: 30689721 NR Description: glycosyl hydrolase family 1 [Arabidopsis thaliana]
  misc_feature (1)..(357): Homolog of NCBI NO: 7435453 NR Description: probable beta-glucosidase At2g44460 [imported] -
  misc_feature (1)..(350): Homolog of NCBI NO: 7435454 NR Description: beta-glucosidase homolog At2g44470 [imported] -
  misc_feature (1)..(370): Homolog of NCBI NO: 13605843 NR Description: AT3g60140/T2O9_120 [Arabidopsis thaliana]
  misc_feature (1)..(370): Homolog of NCBI NO: 22137182 NR Description: AT3g60140/T2O9_120 [Arabidopsis thaliana]
  misc_feature (11)..(359): Homolog of NCBI NO: 15238569 NR Description: glycosyl hydrolase family 1 [Arabidopsis thaliana]
  misc_feature (11)..(358): Homolog of NCBI NO: 22327030 NR Description: glycosyl hydrolase family 1 [Arabidopsis thaliana]
  misc_feature (11)..(358): Homolog of NCBI NO: 10177855 NR Description: beta-glucosidase [Arabidopsis thaliana]
MLENMINSLELDRHSFPDDFIFGTAASAFQYEGATSEGGKSPTIWDHFTLSYPERTKMHNADVAIDFYHRYKDGIKLMKELNMDAFRFSISWARLIPSGKLKDGVNKEGVQFYKDLIDELLANDIQPSMTLYHWDHPQSLEDEYGGFLSPKIVEDFRDFARICFEEFGDKVKMWTTINEPYIMTVAGYDQGNKAAGRCSKWVNEKCQAGDSRTEPYIVSHHTLLAHAAAVEEIRKCEKTSHDGQIGIVLSPRWFEPYHSDSTDDKEAAERALAFEIGWHLDPVIHGDYPEIVKKYAGNKLPSFTVEQSKMLQNSSDFVRINYYTARFAAHLPHIDPEKPRFKTDHHVEWKLTNHSGHIIGPGVRIYVFFS

SEQ ID NO: 98021 - protein, 366 aa, Arabidopsis thaliana
  peptide (1)..(366): Ceres Seq. ID no. 13579311
  misc_feature: Pfam Name: Glyco_hydro_1 Pfam Description: Glycosyl hydrolase family 1
  misc_feature (1)..(366): Homolog of NCBI NO: 15232262 NR Description: glycosyl hydrolase family 1, beta-glucosidase
  misc_feature (1)..(366): Homolog of NCBI NO: 10834548 NR Description: beta-glucosidase [Arabidopsis thaliana]
  misc_feature (1)..(358): Homolog of NCBI NO: 30689721 NR Description: glycosyl hydrolase family 1 [Arabidopsis thaliana]
  misc_feature (1)..(353): Homolog of NCBI NO: 7435453 NR Description: probable beta-glucosidase At2g44460 [imported] -
  misc_feature (1)..(346): Homolog of NCBI NO: 7435454 NR Description: beta-glucosidase homolog At2g44470 [imported] -
  misc_feature (1)..(366): Homolog of NCBI NO: 13605843 NR Description: AT3g60140/T2O9_120 [Arabidopsis thaliana]
  misc_feature (1)..(366): Homolog of NCBI NO: 22137182 NR Description: AT3g60140/T2O9_120 [Arabidopsis thaliana]
  misc_feature (7)..(355): Homolog of NCBI NO: 15238569 NR Description: glycosyl hydrolase family 1 [Arabidopsis thaliana]
  misc_feature (7)..(354): Homolog of NCBI NO: 22327030 NR Description: glycosyl hydrolase family 1 [Arabidopsis thaliana]
  misc_feature (7)..(354): Homolog of NCBI NO: 10177855 NR Description: beta-glucosidase [Arabidopsis thaliana]
MINSLELDRHSFPDDFIFGTAASAFQYEGATSEGGKSPTIWDHFTLSYPERTKMHNADVAIDFYHRYKDGIKLMKELNMDAFRFSISWARLIPSGKLKDGVNKEGVQFYKDLIDELLANDIQPSMTLYHWDHPQSLEDEYGGFLSPKIVEDFRDFARICFEEFGDKVKMWTTINEPYIMTVAGYDQGNKAAGRCSKWVNEKCQAGDSRTEPYIVSHHTLLAHAAAVEEIRKCEKTSHDGQIGIVLSPRWFEPYHSDSTDDKEAAERALAFEIGWHLDPVIHGDYPEIVKKYAGNKLPSFTVEQSKMLQNSSDFVRINYYTARFAAHLPHIDPEKPRFKTDHHVEWKLTNHSGHIIGPGVRIYVFFS

SEQ ID NO: 98022 - protein, 313 aa, Arabidopsis thaliana
  peptide (1)..(313): Ceres Seq. ID no. 13579312
  misc_feature: Pfam Name: Glyco_hydro_1 Pfam Description: Glycosyl hydrolase family 1
  misc_feature (1)..(313): Homolog of NCBI NO: 15232262 NR Description: glycosyl hydrolase family 1, beta-glucosidase
  misc_feature (1)..(313): Homolog of NCBI NO: 10834548 NR Description: beta-glucosidase [Arabidopsis thaliana]
  misc_feature (1)..(305): Homolog of NCBI NO: 30689721 NR Description: glycosyl hydrolase family 1 [Arabidopsis thaliana]
  misc_feature (1)..(300): Homolog of NCBI NO: 7435453 NR Description: probable beta-glucosidase At2g44460 [imported] -
  misc_feature (1)..(293): Homolog of NCBI NO: 7435454 NR Description: beta-glucosidase homolog At2g44470 [imported] -
  misc_feature (1)..(313): Homolog of NCBI NO: 13605843 NR Description: AT3g60140/T2O9_120 [Arabidopsis thaliana]
  misc_feature (1)..(313): Homolog of NCBI NO: 22137182 NR Description: AT3g60140/T2O9_120 [Arabidopsis thaliana]
  misc_feature (1)..(302): Homolog of NCBI NO: 15238569 NR Description: glycosyl hydrolase family 1 [Arabidopsis thaliana]
  misc_feature (1)..(301): Homolog of NCBI NO: 22327030 NR Description: glycosyl hydrolase family 1 [Arabidopsis thaliana]
  misc_feature (1)..(301): Homolog of NCBI NO: 10177855 NR Description: beta-glucosidase [Arabidopsis thaliana]
MHNADVAIDFYHRYKDGIKLMKELNMDAFRFSISWARLIPSGKLKDGVNKEGVQFYKDLIDELLANDIQPSMTLYHWDHPQSLEDEYGGFLSPKIVEDFRDFARICFEEFGDKVKMWTTINEPYIMTVAGYDQGNKAAGRCSKWVNEKCQAGDSRTEPYIVSHHTLLAHAAAVEEIRKCEKTSHDGQIGIVLSPRWFEPYHSDSTDDKEAAERALAFEIGWHLDPVIHGDYPEIVKKYAGNKLPSFTVEQSKMLQNSSDFVRINYYTARFAAHLPHIDPEKPRFKTDHHVEWKLTNHSGHIIGPGVRIYVFFS

SEQ ID NO: 98023 - DNA, 1105 bp, Arabidopsis thaliana
  misc_feature (1)..(1105): Ceres Seq. ID no. 13579321
  misc_feature: MA Experiment ID: 108434 Result: Up-regulated in Transcription
  misc_feature: MA Experiment 108434 PARAMETER Experiment Name: At_Root_Tips_cDNA_P Parameter: Tissue Value: Root Tips
  misc_feature: MA Experiment ID: 108573 Result: Up-regulated in Transcription
  misc_feature: MA Experiment 108573 PARAMETER Experiment Name: At_Drought_cDNA_P Parameter: Timepoint (hr) Value: 6
  misc_feature: MA Experiment 108573 PARAMETER Experiment Name: At_Drought_cDNA_P Parameter: Tissue Value: Aerial
  misc_feature: MA Experiment 108573 PARAMETER Experiment Name: At_Drought_cDNA_P Parameter: Treatment Value: Drought vs. No Drought
aaaacttgtcgatgtatattaattaggaagcttgcagaaccacaaaaaaagactcttttttgtcaattgattcgattcaagagttctttcaacgtttggagtagagagagtttgacctatttgaaagtctctgagaccggtgtggcatgacggtcgcggcgggtatcggctacgcgctggtggctttaggaccgtctctttcacttttcgtctccgtcatctccagaaagccctttctcatcctcactgttctctccagtacgttgctgtggcttgtgagtctgatcatcttgtcgggattatggagaccatttcttcctctcaaagccaatgtgtggtggccttatgctttacttgttatcacctctgtttgtttccaggaaggccttcgctttctcttctggaaggtttacaagaggcttgaggatgtcttggattcctttgcggatcgtatctcaaggccccgcctgtttctcactgataagctgcagattgctctagctggtggtttaggtcatggtgtggcgcatgctgtattcttttgtttgagcctcttaactccagcgtttggtccagccacattctatgtcgaaagatgttcgaaggtgccattttttctcatctctgcaatcattgctcttgcatttgttacgatccacacattctcgatggtcattgctttcgaagggtatgcaaaagggaacaaagtagatcaaataatagttccagtcatacaccttactgctggaatgttgacattggtgaattttgcatcggaaggttgtgtgatcggggttcctcttctttaccttgtggcatctttgactcttgtgcattgtggaaaaatggtttggcaaaggttgttggaaagccggaaccaaagcagcgcctcacggtaatctggcctcggtctcagaacaacaatagaacagtcgttaatatcattttatctcatgtcttggtttcttgcttgcaaatctcgttcgtctttatctcctaattgcctcgaaacttaaacccttgtgttttaaaacgcacttatgatcctaaattatcaaaaaaaaactgaggaaattttatatcactgaaccaagaaatatttcag

SEQ ID NO: 98024 - protein, 250 aa, Arabidopsis thaliana
  peptide (1)..(250): Ceres Seq. ID no. 13579322
  misc_feature (1)..(250): Homolog of NCBI NO: 18402667 NR Description: expressed protein [Arabidopsis thaliana] At2g31440/T28P16.7 [Arabidopsis thaliana] unknown protein [Arabidopsis thaliana]
  misc_feature (1)..(250): Homolog of NCBI NO: 21594204 NR Description: unknown [Arabidopsis thaliana]
  misc_feature (1)..(227): Homolog of NCBI NO: 20129183 NR Description: presenilin stabilization factor CG2855-PA
  misc_feature (1)..(207): Homolog of NCBI NO: 18088649 NR Description: hypothetical protein DKFZp564D0372 [Homo sapiens]
  misc_feature (1)..(207): Homolog of NCBI NO: 29243936 NR Description: hypothetical protein 4632417K02 [Mus musculus]
  misc_feature (1)..(207): Homolog of NCBI NO: 13775224 NR Description: presenilin stabilization factor-like [Homo
  misc_feature (1)..(248): Homolog of NCBI NO: 34858248 NR Description: similar to Aph1a-pending protein [Rattus
  misc_feature (1)..(110): Homolog of NCBI NO: 34864287 NR Description: similar to RIKEN cDNA 0610008A10 [Rattus
MTVAAGIGYALVALGPSLSLFVSVISRKPFLILTVLSSTLLWLVSLIILSGLWRPFLPLKANVWWPYALLVITSVCFQEGLRFLFWKVYKRLEDVLDSFADRISRPRLFLTDKLQIALAGGLGHGVAHAVFFCLSLLTPAFGPATFYVERCSKVPFFLISAIIALAFVTIHTFSMVIAFEGYAKGNKVDQIIVPVIHLTAGMLTLVNFASEGCVIGVPLLYLVASLTLVHCGKMVWQRLLESRNQSSASR

SEQ ID NO: 98025 - protein, 134 aa, Arabidopsis thaliana
  peptide (1)..(134): Ceres Seq. ID no. 13579323
  misc_feature (12)..(134): Homolog of NCBI NO: 25370758 NR Description: hypothetical protein At2g31440 [imported] -
MFEGAIFSHLCNHCSCICYDPHILDGHCFRRVCKREQSRSNNSSSHTPYCWNVDIGEFCIGRLCDRGSSSLPCGIFDSCALWKNGLAKVVGKPEPKQRLTVIWPRSQNNNRTVVNIILSHVLVSCLQISFVFIS

SEQ ID NO: 98026 - DNA, 1443 bp, Arabidopsis thaliana
  misc_feature (1)..(1443): Ceres Seq. ID no. 13579328
  misc_feature: MA Experiment ID: 108434 Result: Up-regulated in Transcription
  misc_feature: MA Experiment 108434 PARAMETER Experiment Name: At_Root_Tips_cDNA_P Parameter: Tissue Value: Root Tips
  misc_feature: MA Experiment ID: 108435 Result: Down-regulated in Transcription
  misc_feature: MA Experiment 108435 PARAMETER Experiment Name: At_stm_Mutants_cDNA_P Parameter: Plant Line Value: wt Landsburg vs stm
  misc_feature: MA Experiment 108435 PARAMETER Experiment Name: At_stm_Mutants_cDNA_P Parameter: Tissue Value: Shoot Apical Meristem Region
  misc_feature: MA Experiment ID: 108462 Result: Down-regulated in Transcription
  misc_feature: MA Experiment 108462 PARAMETER Experiment Name: At_Germinating_Seeds_cDNA_P Parameter: Age (day) Value: 2 vs. 0
  misc_feature: MA Experiment 108462 PARAMETER Experiment Name: At_Germinating_Seeds_cDNA_P Parameter: Tissue Value: Germinating Seeds
  misc_feature: MA Experiment ID: 108464 Result: Down-regulated in Transcription
  misc_feature: MA Experiment 108464 PARAMETER Experiment Name: At_Germinating_Seeds_cDNA_P Parameter: Age (day) Value: 4 vs. 0
  misc_feature: MA Experiment 108464 PARAMETER Experiment Name: At_Germinating_Seeds_cDNA_P Parameter: Tissue Value: Germinating Seeds
  misc_feature: MA Experiment ID: 108574 Result: Down-regulated in Transcription
  misc_feature: MA Experiment 108574 PARAMETER Experiment Name: At_Wounding__cDNA_P Parameter: Timepoint (hr) Value: 1
  misc_feature: MA Experiment 108574 PARAMETER Experiment Name: At_Wounding__cDNA_P Parameter: Tissue Value: Aerial
  misc_feature: MA Experiment 108574 PARAMETER Experiment Name: At_Wounding__cDNA_P Parameter: Treatment Value: Wounding vs. No Wounding
  misc_feature: MA Experiment ID: 108577 Result: Down-regulated in Transcription
  misc_feature: MA Experiment 108577 PARAMETER Experiment Name: At_42deg_Heat_cDNA_P Parameter: Temperature (deg C) Value: 42 vs. 22
  misc_feature: MA Experiment 108577 PARAMETER Experiment Name: At_42deg_Heat_cDNA_P Parameter: Timepoint (hr) Value: 6
  misc_feature: MA Experiment 108577 PARAMETER Experiment Name: At_42deg_Heat_cDNA_P Parameter: Tissue Value: Aerial
  misc_feature: MA Experiment ID: 108585 Result: Up-regulated in Transcription
  misc_feature: MA Experiment 108585 PARAMETER Experiment Name: At_5mM_NaNP_cDNA_P Parameter: Timepoint (hr) Value: 6
  misc_feature: MA Experiment 108585 PARAMETER Experiment Name: At_5mM_NaNP_cDNA_P Parameter: Tissue Value: Aerial
  misc_feature: MA Experiment 108585 PARAMETER Experiment Name: At_5mM_NaNP_cDNA_P Parameter: Treatment Value: null
  misc_feature: MA Experiment ID: 108607 Result: Down-regulated in Transcription
  misc_feature: MA Experiment 108607 PARAMETER Experiment Name: At_100uM_ABA_cDNA_P Parameter: Timepoint (hr) Value: 4
  misc_feature: MA Experiment 108607 PARAMETER Experiment Name: At_100uM_ABA_cDNA_P Parameter: Tissue Value: Aerial
  misc_feature: MA Experiment 108607 PARAMETER Experiment Name: At_100uM_ABA_cDNA_P Parameter: Treatment Value: 100uM ABA vs. No Treatment
  misc_feature: MA Experiment ID: 20000069 Result: Up-regulated in Transcription
  misc_feature: MA Experiment 20000069 PARAMETER Experiment Name: At_100uM_ABA_Mutants_cDNA_P Parameter: Plant Line Value: CS23
  misc_feature: MA Experiment 20000069 PARAMETER Experiment Name: At_100uM_ABA_Mutants_cDNA_P Parameter: Timepoint (hr) Value: 6
  misc_feature: MA Experiment 20000069 PARAMETER Experiment Name: At_100uM_ABA_Mutants_cDNA_P Parameter: Tissue Value: Aerial
  misc_feature: MA Experiment 20000069 PARAMETER Experiment Name: At_100uM_ABA_Mutants_cDNA_P Parameter: Treatment Value: 100uM ABA vs. No Treatment
  misc_feature: MA Experiment ID: 20000070 Result: Up-regulated in Transcription
  misc_feature: MA Experiment 20000070 PARAMETER Experiment Name: At_100uM_ABA_Mutants_cDNA_P Parameter: Plant Line Value: CS24
  misc_feature: MA Experiment 20000070 PARAMETER Experiment Name: At_100uM_ABA_Mutants_cDNA_P Parameter: Timepoint (hr) Value: 6
  misc_feature: MA Experiment 20000070 PARAMETER Experiment Name: At_100uM_ABA_Mutants_cDNA_P Parameter: Tissue Value: Aerial
  misc_feature: MA Experiment 20000070 PARAMETER Experiment Name: At_100uM_ABA_Mutants_cDNA_P Parameter: Treatment Value: 100uM ABA vs. No Treatment
  misc_feature: MA Experiment ID: 20000071 Result: Up-regulated in Transcription
  misc_feature: MA Experiment 20000071 PARAMETER Experiment Name: At_100uM_ABA_Mutants_cDNA_P Parameter: Plant Line Value: CS8104
  misc_feature: MA Experiment 20000071 PARAMETER Experiment Name: At_100uM_ABA_Mutants_cDNA_P Parameter: Timepoint (hr) Value: 6
  misc_feature: MA Experiment 20000071 PARAMETER Experiment Name: At_100uM_ABA_Mutants_cDNA_P Parameter: Tissue Value: Aerial
  misc_feature: MA Experiment 20000071 PARAMETER Experiment Name: At_100uM_ABA_Mutants_cDNA_P Parameter: Treatment Value: 100uM ABA vs. No Treatment
  misc_feature: MA Experiment ID: 20000072 Result: Up-regulated in Transcription
  misc_feature: MA Experiment 20000072 PARAMETER Experiment Name: At_100uM_ABA_Mutants_cDNA_P Parameter: Plant Line Value: CS8105
  misc_feature: MA Experiment 20000072 PARAMETER Experiment Name: At_100uM_ABA_Mutants_cDNA_P Parameter: Timepoint (hr) Value: 6
  misc_feature: MA Experiment 20000072 PARAMETER Experiment Name: At_100uM_ABA_Mutants_cDNA_P Parameter: Tissue Value: Aerial
  misc_feature: MA Experiment 20000072 PARAMETER Experiment Name: At_100uM_ABA_Mutants_cDNA_P Parameter: Treatment Value: 100uM ABA vs. No Treatment
  misc_feature: MA Experiment ID: 20000087 Result: Up-regulated in Transcription
  misc_feature: MA Experiment 20000087 PARAMETER Experiment Name: At_100uM_ABA_Mutants_cDNA_P Parameter: Plant Line Value: WS
  misc_feature: MA Experiment 20000087 PARAMETER Experiment Name: At_100uM_ABA_Mutants_cDNA_P Parameter: Timepoint (hr) Value: 6
  misc_feature: MA Experiment 20000087 PARAMETER Experiment Name: At_100uM_ABA_Mutants_cDNA_P Parameter: Tissue Value: Aerial
  misc_feature: MA Experiment 20000087 PARAMETER Experiment Name: At_100uM_ABA_Mutants_cDNA_P Parameter: Treatment Value: 100uM ABA vs. No Treatment
  misc_feature: MA Experiment ID: 20000088 Result: Up-regulated in Transcription
  misc_feature: MA Experiment 20000088 PARAMETER Experiment Name: At_100uM_ABA_Mutants_cDNA_P Parameter: Plant Line Value: Landsberg
  misc_feature: MA Experiment 20000088 PARAMETER Experiment Name: At_100uM_ABA_Mutants_cDNA_P Parameter: Timepoint (hr) Value: 6
  misc_feature: MA Experiment 20000088 PARAMETER Experiment Name: At_100uM_ABA_Mutants_cDNA_P Parameter: Tissue Value: Aerial
  misc_feature: MA Experiment 20000088 PARAMETER Experiment Name: At_100uM_ABA_Mutants_cDNA_P Parameter: Treatment Value: 100uM ABA vs. No Treatment
  misc_feature: MA Experiment ID: 20000089 Result: Up-regulated in Transcription
  misc_feature: MA Experiment ID: 20000090 Result: Up-regulated in Transcription
  misc_feature: MA Experiment ID: 20000111 Result: Down-regulated in Transcription
  misc_feature: MA Experiment 20000111 PARAMETER Experiment Name: At_42deg_Heat_cDNA_P Parameter: Temperature (deg C) Value: 42 vs. 22
  misc_feature: MA Experiment 20000111 PARAMETER Experiment Name: At_42deg_Heat_cDNA_P Parameter: Timepoint (hr) Value: 6
  misc_feature: MA Experiment 20000111 PARAMETER Experiment Name: At_42deg_Heat_cDNA_P Parameter: Tissue Value: Aerial
  misc_feature: MA Experiment ID: 20000113 Result: Down-regulated in Transcription
  misc_feature: MA Experiment 20000113 PARAMETER Experiment Name: At_42deg_Heat_cDNA_P Parameter: Temperature (deg C) Value: 42 vs. 22
  misc_feature: MA Experiment 20000113 PARAMETER Experiment Name: At_42deg_Heat_cDNA_P Parameter: Timepoint (hr) Value: 8
  misc_feature: MA Experiment 20000113 PARAMETER Experiment Name: At_42deg_Heat_cDNA_P Parameter: Tissue Value: Aerial
  misc_feature: MA Experiment ID: 20000117 Result: Up-regulated in Transcription
  misc_feature: MA Experiment 20000117 PARAMETER Experiment Name: At_100uM_ABA_Mutants_cDNA_P Parameter: Plant Line Value: Columbia
  misc_feature: MA Experiment 20000117 PARAMETER Experiment Name: At_100uM_ABA_Mutants_cDNA_P Parameter: Timepoint (hr) Value: 6
  misc_feature: MA Experiment 20000117 PARAMETER Experiment Name: At_100uM_ABA_Mutants_cDNA_P Parameter: Tissue Value: Aerial
  misc_feature: MA Experiment 20000117 PARAMETER Experiment Name: At_100uM_ABA_Mutants_cDNA_P Parameter: Treatment Value: 100uM ABA vs. No Treatment
  misc_feature: MA Experiment ID: 20000173 Result: Down-regulated in Transcription
  misc_feature: MA Experiment 20000173 PARAMETER Experiment Name: At_42deg_Heat_P Parameter: Age (day) Value: 14
  misc_feature: MA Experiment 20000173 PARAMETER Experiment Name: At_42deg_Heat_P Parameter: Organism Value: A. thaliana
  misc_feature: MA Experiment 20000173 PARAMETER Experiment Name: At_42deg_Heat_P Parameter: Plant Line Value: WS
  misc_feature: MA Experiment 20000173 PARAMETER Experiment Name: At_42deg_Heat_P Parameter: Temperature (deg C) Value: 42 vs. 22
  misc_feature: MA Experiment 20000173 PARAMETER Experiment Name: At_42deg_Heat_P Parameter: Timepoint (hr) Value: 6
  misc_feature: MA Experiment 20000173 PARAMETER Experiment Name: At_42deg_Heat_P Parameter: Tissue Value: Aerial
  misc_feature: MA Experiment ID: 20000184 Result: Down-regulated in Transcription
  misc_feature: MA Experiment 20000184 PARAMETER Experiment Name: At_Shoots__P Parameter: Age (day) Value: 7
  misc_feature: MA Experiment 20000184 PARAMETER Experiment Name: At_Shoots__P Parameter: Tissue Value: Shoots vs. Whole Plant
  misc_feature: MA Experiment ID: 20000185 Result: Down-regulated in Transcription
  misc_feature: MA Experiment 20000185 PARAMETER Experiment Name: At_Roots__P Parameter: Age (day) Value: 7 vs. 21
  misc_feature: MA Experiment 20000185 PARAMETER Experiment Name: At_Roots__P Parameter: Organism Value: A. thaliana
  misc_feature: MA Experiment 20000185 PARAMETER Experiment Name: At_Roots__P Parameter: Tissue Value: Roots vs. Whole Plant
  misc_feature: MA Experiment ID: 20000234 Result: Down-regulated in Transcription
  misc_feature: MA Experiment 20000234 PARAMETER Experiment Name: At_Siliques_P Parameter: Age (day) Value: 21
  misc_feature: MA Experiment 20000234 PARAMETER Experiment Name: At_Siliques_P Parameter: Organism Value: A. thaliana
  misc_feature: MA Experiment 20000234 PARAMETER Experiment Name: At_Siliques_P Parameter: Plant Line Value: WS
  misc_feature: MA Experiment 20000234 PARAMETER Experiment Name: At_Siliques_P Parameter: Tissue Value: Less Than 5mm Siliques vs. Whole Plant
  misc_feature: MA Experiment ID: 20000235 Result: Down-regulated in Transcription
  misc_feature: MA Experiment 20000235 PARAMETER Experiment Name: At_Siliques_P Parameter: Age (day) Value: 21
  misc_feature: MA Experiment 20000235 PARAMETER Experiment Name: At_Siliques_P Parameter: Organism Value: A. thaliana
  misc_feature: MA Experiment 20000235 PARAMETER Experiment Name: At_Siliques_P Parameter: Plant Line Value: WS
  misc_feature: MA Experiment 20000235 PARAMETER Experiment Name: At_Siliques_P Parameter: Tissue Value: 5-10mm Siliques vs. Whole Plant
  misc_feature: MA Experiment ID: 20000264 Result: Down-regulated in Transcription
  misc_feature: MA Experiment 20000264 PARAMETER Experiment Name: At_Open_Flower_P Parameter: Age (day) Value: 21
  misc_feature: MA Experiment 20000264 PARAMETER Experiment Name: At_Open_Flower_P Parameter: Plant Line Value: WS
  misc_feature: MA Experiment 20000264 PARAMETER Experiment Name: At_Open_Flower_P Parameter: Tissue Value: Open Flower vs. Whole Plant
  misc_feature: MA Experiment ID: 20000265 Result: Down-regulated in Transcription
  misc_feature: MA Experiment 20000265 PARAMETER Experiment Name: At_Open_Flower_P Parameter: Age (day) Value: 21
  misc_feature: MA Experiment 20000265 PARAMETER Experiment Name: At_Open_Flower_P Parameter: Plant Line Value: WS
  misc_feature: MA Experiment 20000265 PARAMETER Experiment Name: At_Open_Flower_P Parameter: Tissue Value: Closed Flower vs. Whole Plant
  misc_feature: MA Experiment ID: 20000286 Result: Down-regulated in Transcription
  misc_feature: MA Experiment 20000286 PARAMETER Experiment Name: At_Open_Flower_P Parameter: Age (day) Value: 21
  misc_feature: MA Experiment 20000286 PARAMETER Experiment Name: At_Open_Flower_P Parameter: Plant Line Value: WS
  misc_feature: MA Experiment 20000286 PARAMETER Experiment Name: At_Open_Flower_P Parameter: Tissue Value: Half Open vs. Whole Plant
  misc_feature: MA Experiment ID: 20000438 Result: Down-regulated in Transcription
  misc_feature: MA Experiment 20000438 PARAMETER Experiment Name: At_Shoots__P Parameter: Age (day) Value: 14
  misc_feature: MA Experiment 20000438 PARAMETER Experiment Name: At_Shoots__P Parameter: Tissue Value: Shoots vs. Whole Plant
  misc_feature: MA Experiment ID: 20000439 Result: Down-regulated in Transcription
  misc_feature: MA Experiment 20000439 PARAMETER Experiment Name: At_Roots__P Parameter: Age (day) Value: 14 vs. 21
  misc_feature: MA Experiment 20000439 PARAMETER Experiment Name: At_Roots__P Parameter: Organism Value: A. thaliana
  misc_feature: MA Experiment 20000439 PARAMETER Experiment Name: At_Roots__P Parameter: Tissue Value: Roots vs. Whole Plant
  misc_feature: MA Experiment ID: 20000573 Result: Up-regulated in Transcription
  misc_feature: MA Experiment 20000573 PARAMETER Experiment Name: At_100uM_ABA_Mutants__P Parameter: Organism Value: A. thaliana
  misc_feature: MA Experiment 20000573 PARAMETER Experiment Name: At_100uM_ABA_Mutants__P Parameter: Plant Line Value: CS22 vs. Ler wt
  misc_feature: MA Experiment 20000573 PARAMETER Experiment Name: At_100uM_ABA_Mutants__P Parameter: Timepoint (hr) Value: N/A
  misc_feature: MA Experiment 20000573 PARAMETER Experiment Name: At_100uM_ABA_Mutants__P Parameter: Tissue Value: Whole Plant
  misc_feature: MA Experiment 20000573 PARAMETER Experiment Name: At_100uM_ABA_Mutants__P Parameter: Treatment Value: None
  misc_feature: MA Experiment ID: 20000794 Result: Down-regulated in Transcription
  misc_feature: MA Experiment 20000794 PARAMETER Experiment Name: At_Petals_P Parameter: Age (day) Value: 23-25 days
  misc_feature: MA Experiment 20000794 PARAMETER Experiment Name: At_Petals_P Parameter: Plant Line Value: WS
  misc_feature: MA Experiment 20000794 PARAMETER Experiment Name: At_Petals_P Parameter: Tissue Value: Petals vs. Whole plant
  misc_feature: MA Experiment ID: 20001248 Result: Up-regulated in Transcription
  misc_feature: MA Experiment 20001248 PARAMETER Experiment Name: At_Far-red-induction_P Parameter: Age (day) Value: 7
  misc_feature: MA Experiment 20001248 PARAMETER Experiment Name: At_Far-red-induction_P Parameter: Light Value: Far-red vs. White
  misc_feature: MA Experiment 20001248 PARAMETER Experiment Name: At_Far-red-induction_P Parameter: Organism Value: A. thaliana
  misc_feature: MA Experiment 20001248 PARAMETER Experiment Name: At_Far-red-induction_P Parameter: Plant Line Value: Columbia
  misc_feature: MA Experiment 20001248 PARAMETER Experiment Name: At_Far-red-induction_P Parameter: Timepoint (hr) Value: 4
  misc_feature: MA Experiment 20001248 PARAMETER Experiment Name: At_Far-red-induction_P Parameter: Tissue Value: Whole Plant
  misc_feature: MA Experiment ID: 20001757 Result: Up-regulated in Transcription
  misc_feature: MA Experiment 20001757 PARAMETER Experiment Name: At_50mM_NH4NO3_L-to-H_P Parameter: Timepoint (hr) Value: 6
  misc_feature: MA Experiment 20001757 PARAMETER Experiment Name: At_50mM_NH4NO3_L-to-H_P Parameter: Tissue Value: Leaf
  misc_feature: MA Experiment 20001757 PARAMETER Experiment Name: At_50mM_NH4NO3_L-to-H_P Parameter: Treatment Value: 50mM NH4NO3 vs 100mM Mannitol
  misc_feature: MA Experiment ID: 20001905 Result: Down-regulated in Transcription
  misc_feature: MA Experiment 20001905 PARAMETER Experiment Name: At_Drought_Reproduction_P Parameter: Age (day) Value: 40
  misc_feature: MA Experiment 20001905 PARAMETER Experiment Name: At_Drought_Reproduction_P Parameter: Organism Value: A. thaliana
  misc_feature: MA Experiment 20001905 PARAMETER Experiment Name: At_Drought_Reproduction_P Parameter: Plant Line Value: WS
  misc_feature: MA Experiment 20001905 PARAMETER Experiment Name: At_Drought_Reproduction_P Parameter: Timepoint (day) Value: 10
  misc_feature: MA Experiment 20001905 PARAMETER Experiment Name: At_Drought_Reproduction_P Parameter: Tissue Value: Rosettes
  misc_feature: MA Experiment 20001905 PARAMETER Experiment Name: At_Drought_Reproduction_P Parameter: Treatment Value: Drought vs. No Drought
atcaaagtttgggataatagtcttatctctttcatccacactaatataaataggatacatacacaacacattacaagaagataaatccaaacttttctttctctctctttcgtttcccattttttctcttattactcatagatcctgattgatctgaaaaaatggtgaagaagcaatcgccattacacgttgtcggtgtgtctgttttgatggtgttgttatgcagtgttaattacagtctctgtgaaaagatcaaaacgtataagctcacaagaggaagcttaagtgttactttcactaactatggtgctgtcatgacctctcttctcctccctgacagacatggaaaacaagacgatgttgttcttggatttgatactgttgatggttacaagaatgatacaacatattttggagcaattgtgggaagagtggctaatagaataggaggtgctaaattcaagttaaatggtcatctctacaaaaccgatcccaacgaaggccgtaacactctccatggtggttcaaagggatttagtgatgtgatttggtcagtccaaaagtatgttcccactagtcacattactttcacatacgatagcttcgacggtgaagaaggttttccgggcaatgtgacggtgaaagtgacgtacatgttgatcggagaaaacaaactcggtgtaaaaatggaagcaaagccactcaacaaacctacaccaatcaacttagctctccacacttactggaacctccacagccacaactccgggaacatcctctcccacaaaattcaactcctcgccggaaaaatcactcccgtcgacgacaaactcattcccaccggagaaatcacctccattaccggaactccttacgatttcctcgagccacgtgagatcggtagccggatccacgaattacccggcggttacgacatcaattacgtgatcgacggaccgatcgggaaacatctgaggaaaactgcggttgtgacggagcaagtcaccgggaggaagatggagctgtggacgaatcagcctggtgttcagttttacacgagtaatatgatgaaacgtgtcgtcggtaaaggtaaagccgtttatgagaaatacggtggcttgtgtttggagactcaaggcttcccagattccgtcaatcacaagaactttccgtcgcagattgttaatcccggcgagagttatttgcatgttatgctcttcagattcactgctcactaatcgggtcgggtcgggtcgggtggggtcgggttattagggcttaatatttccgaataaactcgccaacatcgttgtaatgcaaaattgcaaatgccaataaaaatattcgacttttgcaggaagttgttaaaagttgtttattctcaatggttcgttttgcaaattgttaaaaatattatttttcacaagaaagttctaaatgttt

SEQ ID NO: 98027 - protein, 358 aa, Arabidopsis thaliana; identical to SEQ ID NO: 86160
  peptide (1)..(358): Ceres Seq. ID no. 13579329
  misc_feature (32)..(354): Pfam Name: Aldose 1-epimerase Pfam Description: Aldose 1-epimerase
  misc_feature (1)..(358): Homolog of NCBI NO: 15228261 NR Description: aldose 1-epimerase family [Arabidopsis thaliana]
  misc_feature (1)..(358): Homolog of NCBI NO: 21537069 NR Description: aldose 1-epimerase-like protein [Arabidopsis
  misc_feature (29)..(356): Homolog of NCBI NO: 15242223 NR Description: aldose 1-epimerase family [Arabidopsis thaliana]
  misc_feature (6)..(356): Homolog of NCBI NO: 15824567 NR Description: non-cell-autonomous protein pathway2;
  misc_feature (16)..(356): Homolog of NCBI NO: 15824565 NR Description: non-cell-autonomous protein pathway1;
  misc_feature (30)..(356): Homolog of NCBI NO: 7430313 NR Description: probable aldose 1-epimerase (EC 5.1.3.3) - common
  misc_feature (29)..(356): Homolog of NCBI NO: 40882679 NR Description: putative aldose 1-epimerase [Oryza sativa
  misc_feature (65)..(356): Homolog of NCBI NO: 26452398 NR Description: putative aldose 1-epimerase [Arabidopsis thaliana]
  misc_feature (34)..(357): Homolog of NCBI NO: 30684727 NR Description: aldose 1-epimerase family [Arabidopsis thaliana]
  misc_feature (35)..(357): Homolog of NCBI NO: 37531218 NR Description: putative aldose 1-epimerase - like protein [Oryza

SEQ ID NO: 98028 - protein, 342 aa, Arabidopsis thaliana; identical to SEQ ID NO: 86161
  peptide (1)..(342): Ceres Seq. ID no. 13579330
  misc_feature (16)..(338): Pfam Name: Aldose 1-epimerase Pfam Description: Aldose 1-epimerase
  misc_feature (1)..(342): Homolog of NCBI NO: 15228261 NR Description: aldose 1-epimerase family [Arabidopsis thaliana]
  misc_feature (1)..(342): Homolog of NCBI NO: 21537069 NR Description: aldose 1-epimerase-like protein [Arabidopsis
  misc_feature (13)..(340): Homolog of NCBI NO: 15242223 NR Description: aldose 1-epimerase family [Arabidopsis thaliana]
  misc_feature (1)..(340): Homolog of NCBI NO: 15824567 NR Description: non-cell-autonomous protein pathway2;
  misc_feature (1)..(340): Homolog of NCBI NO: 15824565 NR Description: non-cell-autonomous protein pathway1;
  misc_feature (14)..(340): Homolog of NCBI NO: 7430313 NR Description: probable aldose 1-epimerase (EC 5.1.3.3) - common
  misc_feature (13)..(340): Homolog of NCBI NO: 40882679 NR Description: putative aldose 1-epimerase [Oryza sativa
  misc_feature (49)..(340): Homolog of NCBI NO: 26452398 NR Description: putative aldose 1-epimerase [Arabidopsis thaliana]
  misc_feature (18)..(341): Homolog of NCBI NO: 30684727 NR Description: aldose 1-epimerase family [Arabidopsis thaliana]
  misc_feature (19)..(341): Homolog of NCBI NO: 37531218 NR Description: putative aldose 1-epimerase - like protein [Oryza

SEQ ID NO: 98029 - protein, 307 aa, Arabidopsis thaliana; identical to SEQ ID NO: 86162
  peptide (1)..(307): Ceres Seq. ID no. 13579331
  misc_feature (1)..(303): Pfam Name: Aldose 1-epimerase Pfam Description: Aldose 1-epimerase
  misc_feature (1)..(307): Homolog of NCBI NO: 15228261 NR Description: aldose 1-epimerase family [Arabidopsis thaliana]
  misc_feature (1)..(307): Homolog of NCBI NO: 21537069 NR Description: aldose 1-epimerase-like protein [Arabidopsis
  misc_feature (1)..(305): Homolog of NCBI NO: 15242223 NR Description: aldose 1-epimerase family [Arabidopsis thaliana]
  misc_feature (1)..(305): Homolog of NCBI NO: 15824567 NR Description: non-cell-autonomous protein pathway2;
  misc_feature (1)..(305): Homolog of NCBI NO: 15824565 NR Description: non-cell-autonomous protein pathway1;
  misc_feature (1)..(305): Homolog of NCBI NO: 7430313 NR Description: probable aldose 1-epimerase (EC 5.1.3.3) - common
  misc_feature (1)..(305): Homolog of NCBI NO: 40882679 NR Description: putative aldose 1-epimerase [Oryza sativa
  misc_feature (14)..(305): Homolog of NCBI NO: 26452398 NR Description: putative aldose 1-epimerase [Arabidopsis thaliana]
  misc_feature (1)..(306): Homolog of NCBI NO: 30684727 NR Description: aldose 1-epimerase family [Arabidopsis thaliana]
  misc_feature (1)..(306): Homolog of NCBI NO: 37531218 NR Description: putative aldose 1-epimerase - like protein [Oryza

SEQ ID NO: 98030 - DNA, 797 bp, Arabidopsis thaliana
  misc_feature (1)..(797): Ceres Seq. ID no. 13579340
  misc_feature: MA Experiment ID: 108488 Result: Down-regulated in Transcription
  misc_feature: MA Experiment ID: 108561 Result: Down-regulated in Transcription
  misc_feature: MA Experiment 108561 PARAMETER Experiment Name: At_100uM_ABA_cDNA_P Parameter: Timepoint (hr) Value: 6
  misc_feature: MA Experiment 108561 PARAMETER Experiment Name: At_100uM_ABA_cDNA_P Parameter: Tissue Value: Aerial
  misc_feature: MA Experiment 108561 PARAMETER Experiment Name: At_100uM_ABA_cDNA_P Parameter: Treatment Value: 100uM ABA vs. No Treatment
  misc_feature: MA Experiment ID: 20000089 Result: Down-regulated in Transcription
  misc_feature: MA Experiment ID: 20000112 Result: Up-regulated in Transcription
  misc_feature: MA Experiment 20000112 PARAMETER Experiment Name: At_42deg_Heat_cDNA_P Parameter: Temperature (deg C) Value: 42 vs. 22
  misc_feature: MA Experiment 20000112 PARAMETER Experiment Name: At_42deg_Heat_cDNA_P Parameter: Timepoint (hr) Value: 2
  misc_feature: MA Experiment 20000112 PARAMETER Experiment Name: At_42deg_Heat_cDNA_P Parameter: Tissue Value: Aerial
  misc_feature: MA Experiment ID: 20001905 Result: Up-regulated in Transcription
  misc_feature: MA Experiment 20001905 PARAMETER Experiment Name: At_Drought_Reproduction_P Parameter: Age (day) Value: 40
  misc_feature: MA Experiment 20001905 PARAMETER Experiment Name: At_Drought_Reproduction_P Parameter: Organism Value: A. thaliana
  misc_feature: MA Experiment 20001905 PARAMETER Experiment Name: At_Drought_Reproduction_P Parameter: Plant Line Value: WS
  misc_feature: MA Experiment 20001905 PARAMETER Experiment Name: At_Drought_Reproduction_P Parameter: Timepoint (day) Value: 10
  misc_feature: MA Experiment 20001905 PARAMETER Experiment Name: At_Drought_Reproduction_P Parameter: Tissue Value: Rosettes
  misc_feature: MA Experiment 20001905 PARAMETER Experiment Name: At_Drought_Reproduction_P Parameter: Treatment Value: Drought vs. No Drought
aatttctcctatttccaaaatcttctatttctctctaaaaaaatgtcgaagaacgtttcgagaaactgcttaggatcaatggaagacatcaagaaagtattccaacgattcgacaaaaacaacgatgggaaaatctctatcgatgagcttaaagacgtgataggagctctctctccaaacgcttcacaagaagaaaccaaagcaatgatgaaagagtttgatcttgacggtaatggtttcattgatttggatgagtttgttgctttgtttcaaatcagtgatcaaagtagcaacaatagtgcgattagagatttgaaagaagcttttgatttgtatgatttggatcgtaatggaaggatctcggctaatgagttacactcggttatgaagaatcttggtgagaagtgttcgattcaagattgtcaaaggatgattaataaagttgattctgatggtgatggttgtgttgattttgaagagtttaagaagatgatgatgattaatggtagtgcttgatagaatcgatttagaatttggaaaagtgatatccattttttgtttgtaaatattgtgttttatgatttcgttaatctaatcttttttaggatttaggttaattaggagtttttaattttttaggttttatcgattaatctagaagaatctctatgttgcttctttaatggctctctgacctaatgttagggaatattgttgatgaccttaaataatcgattaacaatacaaaaaaaaaccttttttaaagacatttattaataaggttggtttggtttggt

SEQ ID NO: 98031 - protein, 171 aa, Arabidopsis thaliana; identical to SEQ ID NO: 38308
  peptide (1)..(171): Ceres Seq. ID no. 13579341
  misc_feature (140)..(168): Pfam Name: EF hand Pfam Description: EF hand
  misc_feature (15)..(171): Homolog of NCBI NO: 18408502 NR Description: calmodulin-related protein, putative [Arabidopsis
  misc_feature (15)..(171): Homolog of NCBI NO: 21618074 NR Description: calmodulin-related protein [Arabidopsis thaliana]
  misc_feature (16)..(171): Homolog of NCBI NO: 15240340 NR Description: calmodulin-related protein 2, touch-induced (TCH2)
  misc_feature (27)..(170): Homolog of NCBI NO: 14589311 NR Description: calcium binding protein [Sesbania rostrata]
  misc_feature (24)..(165): Homolog of NCBI NO: 15221030 NR Description: calcium-binding protein, putative [Arabidopsis
  misc_feature (32)..(165): Homolog of NCBI NO: 13397927 NR Description: putative calmodulin-related protein [Medicago
  misc_feature (15)..(165): Homolog of NCBI NO: 14423648 NR Description: Calcium-binding allergen Ole e 8 (PCA18/PCA23)
  misc_feature (15)..(165): Homolog of NCBI NO: 6901654 NR Description: calcium-binding protein [Olea europaea]
  misc_feature (16)..(165): Homolog of NCBI NO: 15219514 NR Description: calcium-binding protein, putative [Arabidopsis
  misc_feature (29)..(165): Homolog of NCBI NO: 21618025 NR Description: putative calmodulin [Arabidopsis thaliana]

SEQ ID NO: 98032 - protein, 157 aa, Arabidopsis thaliana; identical to SEQ ID NO: 38309
  peptide (1)..(157): Ceres Seq. ID no. 13579342
  misc_feature (126)..(154): Pfam Name: EF hand Pfam Description: EF hand
  misc_feature (1)..(157): Homolog of NCBI NO: 18408502 NR Description: calmodulin-related protein, putative [Arabidopsis
  misc_feature (1)..(157): Homolog of NCBI NO: 21618074 NR Description: calmodulin-related protein [Arabidopsis thaliana]
  misc_feature (2)..(157): Homolog of NCBI NO: 15240340 NR Description: calmodulin-related protein 2, touch-induced (TCH2)
  misc_feature (13)..(156): Homolog of NCBI NO: 14589311 NR Description: calcium binding protein [Sesbania rostrata]
  misc_feature (10)..(151): Homolog of NCBI NO: 15221030 NR Description: calcium-binding protein, putative [Arabidopsis
  misc_feature (18)..(151): Homolog of NCBI NO: 13397927 NR Description: putative calmodulin-related protein [Medicago
  misc_feature (1)..(151): Homolog of NCBI NO: 14423648 NR Description: Calcium-binding allergen Ole e 8 (PCA18/PCA23)
  misc_feature (1)..(151): Homolog of NCBI NO: 6901654 NR Description: calcium-binding protein [Olea europaea]
  misc_feature (2)..(151): Homolog of NCBI NO: 15219514 NR Description: calcium-binding protein, putative [Arabidopsis
  misc_feature (15)..(151): Homolog of NCBI NO: 21618025 NR Description: putative calmodulin [Arabidopsis thaliana]

SEQ ID NO: 98033 - protein, 145 aa, Arabidopsis thaliana; identical to SEQ ID NO: 38310
  peptide (1)..(145): Ceres Seq. ID no. 13579343
  misc_feature (114)..(142): Pfam Name: EF hand Pfam Description: EF hand
  misc_feature (1)..(145): Homolog of NCBI NO: 18408502 NR Description: calmodulin-related protein, putative [Arabidopsis
  misc_feature (1)..(145): Homolog of NCBI NO: 21618074 NR Description: calmodulin-related protein [Arabidopsis thaliana]
  misc_feature (1)..(145): Homolog of NCBI NO: 15240340 NR Description: calmodulin-related protein 2, touch-induced (TCH2)
  misc_feature (1)..(144): Homolog of NCBI NO: 14589311 NR Description: calcium binding protein [Sesbania rostrata]
  misc_feature (1)..(139): Homolog of NCBI NO: 15221030 NR Description: calcium-binding protein, putative [Arabidopsis
  misc_feature (6)..(139): Homolog of NCBI NO: 13397927 NR Description: putative calmodulin-related protein [Medicago
  misc_feature (1)..(139): Homolog of NCBI NO: 14423648 NR Description: Calcium-binding allergen Ole e 8 (PCA18/PCA23)
  misc_feature (1)..(139): Homolog of NCBI NO: 6901654 NR Description: calcium-binding protein [Olea europaea]
  misc_feature (1)..(139): Homolog of NCBI NO: 15219514 NR Description: calcium-binding protein, putative [Arabidopsis
  misc_feature (3)..(139): Homolog of NCBI NO: 21618025 NR Description: putative calmodulin [Arabidopsis thaliana]

SEQ ID NO: 98034 - DNA, 1287 bp, Arabidopsis thaliana
  misc_feature (1)..(1287): Ceres Seq. ID no. 13579352
  misc_feature: MA Experiment ID: 20000180 Result: Down-regulated in Transcription
  misc_feature: MA Experiment 20000180 PARAMETER Experiment Name: At_Germinating_Seeds_P Parameter: Age (hr) Value: 24 vs. 0
  misc_feature: MA Experiment 20000180 PARAMETER Experiment Name: At_Germinating_Seeds_P Parameter: Tissue Value: Germinating Seeds
  misc_feature: MA Experiment ID: 20000184 Result: Down-regulated in Transcription
  misc_feature: MA Experiment 20000184 PARAMETER Experiment Name: At_Shoots__P Parameter: Age (day) Value: 7
  misc_feature: MA Experiment 20000184 PARAMETER Experiment Name: At_Shoots__P Parameter: Tissue Value: Shoots vs. Whole Plant
atgtctttctttttttttttttttttttggcctaactctggctttgagagagacagagaggtagagagagtaacgatggctgctgtagaagaagtagacgatgttggaagaacaatagaggaagagactgtgtgtgaaaaaagagaaagaggagaggaagctgaaacattgactccatgggagcaacactccagcatcataagcatccctcgattcgactacaaagctccctcttctctgcttcatcattctcattccggattcctcgtcacctgcaacatcaaaagggagaaaagtgctactaaagaggtcatgtccatccttggaaagtatattgggtccatgcatgaggagaaacctgaagttctaaactctactgcatccaaaaaacaaaaagtttgtgcacaagagacagaggaaggcggagagaagactgtacctcttgagaatgatgccttgcaggaaacaggtgaaaatccaaatgttgaggatcttaaattagcaaatgaagaacacaattctctcatgtcattggttaagctaacaaagagtggcttgcttctctttactttccctgttgaaaactctcccaatacaacgaatatcgtatcacgagtcttccagtctatggaatctggagctttgaaggcaccaatctggtgccatcggatattcccagttcaagctacttgtggtttgacagagaaagaacttcgggaaacagtatcaaagcttgttcagcggtttgtcaatgataaagacaatacactatcaaaacctgtgaagtttgcagctgggtatcaacgtagaggtgcggaggagacgaaaggaaagattcggaaagacgcttcagatgttctagttcaatgtccgttgctggaccgcattaaatgctttgaaactgtggcagctggagtgaaagacattgtaccagattcagttgtggatctcaaatctccagagttatgtgttctggtggaactgttaccgctctctagaatatcaagtggctcctttgtagctgctgtttcagtgcttccacatagactcgttagcacaaagccgaaactctgcatcaagcctctagtccctgaatccaaacacaaaaagggaccaaactgacaggtgcaaaggctgatcgctgcattcgattttcgagagccaaagatatcaatagaagttgtaatctctctgtttttgtttagatatgtcttttgctttcagtatctctaatggagttaacaacaatgtctgacctatgttattcaagagaacaaagataaaccc

SEQ ID NO: 98035 - protein, 373 aa, Arabidopsis thaliana
  peptide (1)..(373): Ceres Seq. ID no. 13579353
  misc_feature (1)..(373): Homolog of NCBI NO: 24030215 NR Description: unknown protein [Arabidopsis thaliana]
  misc_feature (26)..(373): Homolog of NCBI NO: 14334964 NR Description: unknown protein [Arabidopsis thaliana]
  misc_feature (26)..(271): Homolog of NCBI NO: 15220918 NR Description: hypothetical protein [Arabidopsis thaliana]
  misc_feature (26)..(271): Homolog of NCBI NO: 25372975 NR Description: hypothetical protein [imported] - Arabidopsis >gi|4337179|gb|AAD18100.1| This gene is continued on the 5' end
MSFFFFFFFWPNSGFERDREVERVTMAAVEEVDDVGRTIEEETVCEKRERGEEAETLTPWEQHSSIISIPRFDYKAPSSLLHHSHSGFLVTCNIKREKSATKEVMSILGKYIGSMHEEKPEVLNSTASKKQKVCAQETEEGGEKTVPLENDALQETGENPNVEDLKLANEEHNSLMSLVKLTKSGLLLFTFPVENSPNTTNIVSRVFQSMESGALKAPIWCHRIFPVQATCGLTEKELRETVSKLVQRFVNDKDNTLSKPVKFAAGYQRRGAEETKGKIRKDASDVLVQCPLLDRIKCFETVAAGVKDIVPDSVVDLKSPELCVLVELLPLSRISSGSFVAAVSVLPHRLVSTKPKLCIKPLVPESKHKKGPN

SEQ ID NO: 98036 - protein, 348 aa, Arabidopsis thaliana
  peptide (1)..(348): Ceres Seq. ID no. 13579354
  misc_feature (1)..(348): Homolog of NCBI NO: 24030215 NR Description: unknown protein [Arabidopsis thaliana]
  misc_feature (1)..(348): Homolog of NCBI NO: 14334964 NR Description: unknown protein [Arabidopsis thaliana]
  misc_feature (1)..(246): Homolog of NCBI NO: 15220918 NR Description: hypothetical protein [Arabidopsis thaliana]
  misc_feature (1)..(246): Homolog of NCBI NO: 25372975 NR Description: hypothetical protein [imported] - Arabidopsis >gi|4337179|gb|AAD18100.1| This gene is continued on the 5' end
MAAVEEVDDVGRTIEEETVCEKRERGEEAETLTPWEQHSSIISIPRFDYKAPSSLLHHSHSGFLVTCNIKREKSATKEVMSILGKYIGSMHEEKPEVLNSTASKKQKVCAQETEEGGEKTVPLENDALQETGENPNVEDLKLANEEHNSLMSLVKLTKSGLLLFTFPVENSPNTTNIVSRVFQSMESGALKAPIWCHRIFPVQATCGLTEKELRETVSKLVQRFVNDKDNTLSKPVKFAAGYQRRGAEETKGKIRKDASDVLVQCPLLDRIKCFETVAAGVKDIVPDSVVDLKSPELCVLVELLPLSRISSGSFVAAVSVLPHRLVSTKPKLCIKPLVPESKHKKGPN

SEQ ID NO: 98037 - protein, 269 aa, Arabidopsis thaliana
  peptide (1)..(269): Ceres Seq. ID no. 13579355
  misc_feature (1)..(269): Homolog of NCBI NO: 24030215 NR Description: unknown protein [Arabidopsis thaliana]
  misc_feature (1)..(269): Homolog of NCBI NO: 14334964 NR Description: unknown protein [Arabidopsis thaliana]
  misc_feature (1)..(167): Homolog of NCBI NO: 15220918 NR Description: hypothetical protein [Arabidopsis thaliana]
  misc_feature (1)..(167): Homolog of NCBI NO: 25372975 NR Description: hypothetical protein [imported] - Arabidopsis >gi|4337179|gb|AAD18100.1| This gene is continued on the 5' end
MSILGKYIGSMHEEKPEVLNSTASKKQKVCAQETEEGGEKTVPLENDALQETGENPNVEDLKLANEEHNSLMSLVKLTKSGLLLFTFPVENSPNTTNIVSRVFQSMESGALKAPIWCHRIFPVQATCGLTEKELRETVSKLVQRFVNDKDNTLSKPVKFAAGYQRRGAEETKGKIRKDASDVLVQCPLLDRIKCFETVAAGVKDIVPDSVVDLKSPELCVLVELLPLSRISSGSFVAAVSVLPHRLVSTKPKLCIKPLVPESKHKKGPN

SEQ ID NO: 98038 - DNA, 1745 bp, Arabidopsis thaliana
  misc_feature (1)..(1745): Ceres Seq. ID no. 13579366
  misc_feature: MA Experiment ID: 20000227 Result: Down-regulated in Transcription
  misc_feature: MA Experiment 20000227 PARAMETER Experiment Name: At_Root-Tips-vs-Tops_P Parameter: Tissue Value: Root Tips vs. Root Tops
  misc_feature: MA Experiment ID: 20000265 Result: Down-regulated in Transcription
  misc_feature: MA Experiment 20000265 PARAMETER Experiment Name: At_Open_Flower_P Parameter: Age (day) Value: 21
  misc_feature: MA Experiment 20000265 PARAMETER Experiment Name: At_Open_Flower_P Parameter: Plant Line Value: WS
  misc_feature: MA Experiment 20000265 PARAMETER Experiment Name: At_Open_Flower_P Parameter: Tissue Value: Closed Flower vs. Whole Plant
  misc_feature: MA Experiment ID: 20000286 Result: Down-regulated in Transcription
  misc_feature: MA Experiment 20000286 PARAMETER Experiment Name: At_Open_Flower_P Parameter: Age (day) Value: 21
  misc_feature: MA Experiment 20000286 PARAMETER Experiment Name: At_Open_Flower_P Parameter: Plant Line Value: WS
  misc_feature: MA Experiment 20000286 PARAMETER Experiment Name: At_Open_Flower_P Parameter: Tissue Value: Half Open vs. Whole Plant
  misc_feature: MA Experiment ID: 20001248 Result: Up-regulated in Transcription
  misc_feature: MA Experiment 20001248 PARAMETER Experiment Name: At_Far-red-induction_P Parameter: Age (day) Value: 7
  misc_feature: MA Experiment 20001248 PARAMETER Experiment Name: At_Far-red-induction_P Parameter: Light Value: Far-red vs. White
  misc_feature: MA Experiment 20001248 PARAMETER Experiment Name: At_Far-red-induction_P Parameter: Organism Value: A. thaliana
  misc_feature: MA Experiment 20001248 PARAMETER Experiment Name: At_Far-red-induction_P Parameter: Plant Line Value: Columbia
  misc_feature: MA Experiment 20001248 PARAMETER Experiment Name: At_Far-red-induction_P Parameter: Timepoint (hr) Value: 4
  misc_feature: MA Experiment 20001248 PARAMETER Experiment Name: At_Far-red-induction_P Parameter: Tissue Value: Whole Plant
  misc_feature: MA Experiment ID: 20001451 Result: Up-regulated in Transcription
  misc_feature: MA Experiment 20001451 PARAMETER Experiment Name: At_Far-red-induction_P Parameter: Age (day) Value: 7
  misc_feature: MA Experiment 20001451 PARAMETER Experiment Name: At_Far-red-induction_P Parameter: Light Value: Far-red vs. White
  misc_feature: MA Experiment 20001451 PARAMETER Experiment Name: At_Far-red-induction_P Parameter: Organism Value: A. thaliana
  misc_feature: MA Experiment 20001451 PARAMETER Experiment Name: At_Far-red-induction_P Parameter: Plant Line Value: Columbia
  misc_feature: MA Experiment 20001451 PARAMETER Experiment Name: At_Far-red-induction_P Parameter: Timepoint (hr) Value: 24
  misc_feature: MA Experiment 20001451 PARAMETER Experiment Name: At_Far-red-induction_P Parameter: Tissue Value: Whole Plant
  misc_feature: MA Experiment ID: 20001905 Result: Down-regulated in Transcription
  misc_feature: MA Experiment 20001905 PARAMETER Experiment Name: At_Drought_Reproduction_P Parameter: Age (day) Value: 40
  misc_feature: MA Experiment 20001905 PARAMETER Experiment Name: At_Drought_Reproduction_P Parameter: Organism Value: A. thaliana
  misc_feature: MA Experiment 20001905 PARAMETER Experiment Name: At_Drought_Reproduction_P Parameter: Plant Line Value: WS
  misc_feature: MA Experiment 20001905 PARAMETER Experiment Name: At_Drought_Reproduction_P Parameter: Timepoint (day) Value: 10
  misc_feature: MA Experiment 20001905 PARAMETER Experiment Name: At_Drought_Reproduction_P Parameter: Tissue Value: Rosettes
  misc_feature: MA Experiment 20001905 PARAMETER Experiment Name: At_Drought_Reproduction_P Parameter: Treatment Value: Drought vs. No Drought
actgatgtcagtcaaacaaaaataataatatatgtttttaagttcctctaatttcaatcttctaaacaacaaccctaaatccttatctctatccttgcgcttgatccagattcggttctgattggagctgccatggaacgcatcatcggcggcaagtacaagctcggacggaagatcggcggtggttcgttcggagagatttttctagctacgcacgtcgataccttcgagatcgtagctgttaagatcgagaacagtaaaacaaagcatcctcaacttctctatgaagctaagctatatagaattcttgaaggaggaagtggaattccgcgcataaaatggtttggagttgatggaacagagaatgctttagtgatggatttgctcggtccaagtctcgaagatcttttcgtctactgtgggaggaaattctcaccaaagacagtcttgatgttggctgatcaaatgctaacaagaatagaatttgtacattcgaaaggatatctgcatagagatattaaacccgataacttcctcatgggcctaggtcggaaagcaaatcaggtttatctaattgactttggacttgccaaaagatatcgggatgccaacaccaaccgccacatcccttacagggaaaacaagaatttaacaggaactgcacgatatgcaagttgcaatacacatcttggaattgagcaaagtcgacgggatgatctagaatcgctgggatatgtgcttctgtatttcctaagaggaagtcttccatggcagggtcttaaggctgttgacaagaagcaaaagtatgataaaatctgtgagaagaagatatcaactcccattgaggtgctatgcaaaaatcaccctgtggagtttgcatcatattttcattactgccatacactgacatttgatcagcgcccagattatggattcttgaagcggctttttcgtgatttattttcgcgggaaggatatgagttcgactatatatttgactggactatcataaagtatcaacaagcacagaaatctagaaatcagtctcaggcagttcctgggtctagcaatcctcgtgcaatgccagtggacacaagcaatcatcggggaggaccaaatatttcttatgaagccgaggcctctgaacgcgtcagatcggctaatgccattggtccaagcccacagataaataataatactgctgcagggaggactccggggtttgatcaccctgtccacaagaatatgaacatgccatccacttcattatctcctgcgggtacctcaaaaagaaatgtcggacccgaaacctcaaattctggatatgggagtgggaatagaactggttggacttcgtcattcatgtctccagagaaatgatgcaaagaaaatgtagctttttcctgaaatggtgagtgagatgatgcgctgttaatgtgactccgtgcccttaattcacctctgaaactacagcagaaatcagaacttggtgtcactaacacctttgtatctcctccacctttggctggaagaaagatgcaatggtttctatgtaaattctctgaagtgtgtgtggacaagaaggcgttggttgaagcatttgtgtttacacacacaagacatgaaagtgtatgtgtgcttttcattcaaagatttcccccaacctttgtataattcttacacccggatgtgtaatcttgttatgtgattcatacatatcatttttagctactctttgctatgcg

SEQ ID NO: 98039 - protein, 415 aa, Arabidopsis thaliana
  peptide (1)..(415): Ceres Seq. ID no. 13579367
  misc_feature (1)..(415): Homolog of NCBI NO: 22329010 NR Description: casein kinase I, putative [Arabidopsis thaliana] AT4g28880/F16A16_10 [Arabidopsis thaliana] AT4g28880/F16A16_10 [Arabidopsis thaliana]
  misc_feature (1)..(415): Homolog of NCBI NO: 22329008 NR Description: casein kinase, putative [Arabidopsis thaliana]
  misc_feature (1)..(306): Homolog of NCBI NO: 7434338 NR Description: protein kinase homolog F16A16.10 - Arabidopsis
  misc_feature (1)..(306): Homolog of NCBI NO: 7488241 NR Description: protein kinase homolog F16A16.30 - Arabidopsis
  misc_feature (1)..(300): Homolog of NCBI NO: 34904322 NR Description: unnamed protein product [Oryza sativa (japonica group)] >gi|7340914|dbj|BAA92986.1| unnamed protein product
  misc_feature (1)..(400): Homolog of NCBI NO: 15236114 NR Description: casein kinase, putative [Arabidopsis thaliana]
  misc_feature (1)..(394): Homolog of NCBI NO: 34910448 NR Description: putative casein kinase I [Oryza sativa (japonica group)] >gi|20804657|dbj|BAB92346.1| putative casein kinase I
  misc_feature (1)..(403): Homolog of NCBI NO: 22327902 NR Description: casein kinase, putative [Arabidopsis thaliana] unknown protein [Arabidopsis thaliana] unknown protein [Arabidopsis thaliana] protein [Arabidopsis
  misc_feature (1)..(409): Homolog of NCBI NO: 15240091 NR Description: casein kinase, putative [Arabidopsis thaliana]
  misc_feature (1)..(387): Homolog of NCBI NO: 15218569 NR Description: casein kinase, putative [Arabidopsis thaliana]
MERIIGGKYKLGRKIGGGSFGEIFLATHVDTFEIVAVKIENSKTKHPQLLYEAKLYRILEGGSGIPRIKWFGVDGTENALVMDLLGPSLEDLFVYCGRKFSPKTVLMLADQMLTRIEFVHSKGYLHRDIKPDNFLMGLGRKANQVYLIDFGLAKRYRDANTNRHIPYRENKNLTGTARYASCNTHLGIEQSRRDDLESLGYVLLYFLRGSLPWQGLKAVDKKQKYDKICEKKISTPIEVLCKNHPVEFASYFHYCHTLTFDQRPDYGFLKRLFRDLFSREGYEFDYIFDWTIIKYQQAQKSRNQSQAVPGSSNPRAMPVDTSNHRGGPNISYEAEASERVRSANAIGPSPQINNNTAAGRTPGFDHPVHKNMNMPSTSLSPAGTSKRNVGPETSNSGYGSGNRTGWTSSFMSPEK

SEQ ID NO: 98040 - protein, 334 aa, Arabidopsis thaliana
  peptide (1)..(334): Ceres Seq. ID no. 13579368
  misc_feature (1)..(334): Homolog of NCBI NO: 22329010 NR Description: casein kinase I, putative [Arabidopsis thaliana] AT4g28880/F16A16_10 [Arabidopsis thaliana] AT4g28880/F16A16_10 [Arabidopsis thaliana]
  misc_feature (1)..(334): Homolog of NCBI NO: 22329008 NR Description: casein kinase, putative [Arabidopsis thaliana]
  misc_feature (1)..(225): Homolog of NCBI NO: 7434338 NR Description: protein kinase homolog F16A16.10 - Arabidopsis
  misc_feature (1)..(225): Homolog of NCBI NO: 7488241 NR Description: protein kinase homolog F16A16.30 - Arabidopsis
  misc_feature (1)..(219): Homolog of NCBI NO: 34904322 NR Description: unnamed protein product [Oryza sativa (japonica group)] >gi|7340914|dbj|BAA92986.1| unnamed protein product
  misc_feature (1)..(319): Homolog of NCBI NO: 15236114 NR Description: casein kinase, putative [Arabidopsis thaliana]
  misc_feature (1)..(313): Homolog of NCBI NO: 34910448 NR Description: putative casein kinase I [Oryza sativa (japonica group)] >gi|20804657|dbj|BAB92346.1| putative casein kinase I
  misc_feature (1)..(322): Homolog of NCBI NO: 22327902 NR Description: casein kinase, putative [Arabidopsis thaliana] unknown protein [Arabidopsis thaliana] unknown protein [Arabidopsis thaliana] protein [Arabidopsis
  misc_feature (1)..(328): Homolog of NCBI NO: 15240091 NR Description: casein kinase, putative [Arabidopsis thaliana]
  misc_feature (1)..(306): Homolog of NCBI NO: 15218569 NR Description: casein kinase, putative [Arabidopsis thaliana]
MDLLGPSLEDLFVYCGRKFSPKTVLMLADQMLTRIEFVHSKGYLHRDIKPDNFLMGLGRKANQVYLIDFGLAKRYRDANTNRHIPYRENKNLTGTARYASCNTHLGIEQSRRDDLESLGYVLLYFLRGSLPWQGLKAVDKKQKYDKICEKKISTPIEVLCKNHPVEFASYFHYCHTLTFDQRPDYGFLKRLFRDLFSREGYEFDYIFDWTIIKYQQAQKSRNQSQAVPGSSNPRAMPVDTSNHRGGPNISYEAEASERVRSANAIGPSPQINNNTAAGRTPGFDHPVHKNMNMPSTSLSPAGTSKRNVGPETSNSGYGSGNRTGWTSSFMSPEK

SEQ ID NO: 98041 - protein, 309 aa, Arabidopsis thaliana
  peptide (1)..(309): Ceres Seq. ID no. 13579369
  misc_feature (1)..(309): Homolog of NCBI NO: 22329010 NR Description: casein kinase I, putative [Arabidopsis thaliana] AT4g28880/F16A16_10 [Arabidopsis thaliana] AT4g28880/F16A16_10 [Arabidopsis thaliana]
  misc_feature (1)..(309): Homolog of NCBI NO: 22329008 NR Description: casein kinase, putative [Arabidopsis thaliana]
  misc_feature (1)..(200): Homolog of NCBI NO: 7434338 NR Description: protein kinase homolog F16A16.10 - Arabidopsis
  misc_feature (1)..(200): Homolog of NCBI NO: 7488241 NR Description: protein kinase homolog F16A16.30 - Arabidopsis
  misc_feature (1)..(194): Homolog of NCBI NO: 34904322 NR Description: unnamed protein product [Oryza sativa (japonica group)] >gi|7340914|dbj|BAA92986.1| unnamed protein product
  misc_feature (1)..(294): Homolog of NCBI NO: 15236114 NR Description: casein kinase, putative [Arabidopsis thaliana]
  misc_feature (1)..(288): Homolog of NCBI NO: 34910448 NR Description: putative casein kinase I [Oryza sativa (japonica group)] >gi|20804657|dbj|BAB92346.1| putative casein kinase I
  misc_feature (1)..(297): Homolog of NCBI NO: 22327902 NR Description: casein kinase, putative [Arabidopsis thaliana] unknown protein [Arabidopsis thaliana] unknown protein [Arabidopsis thaliana] protein [Arabidopsis
  misc_feature (1)..(303): Homolog of NCBI NO: 15240091 NR Description: casein kinase, putative [Arabidopsis thaliana]
  misc_feature (1)..(281): Homolog of NCBI NO: 15218569 NR Description: casein kinase, putative [Arabidopsis thaliana]
MLADQMLTRIEFVHSKGYLHRDIKPDNFLMGLGRKANQVYLIDFGLAKRYRDANTNRHIPYRENKNLTGTARYASCNTHLGIEQSRRDDLESLGYVLLYFLRGSLPWQGLKAVDKKQKYDKICEKKISTPIEVLCKNHPVEFASYFHYCHTLTFDQRPDYGFLKRLFRDLFSREGYEFDYIFDWTIIKYQQAQKSRNQSQAVPGSSNPRAMPVDTSNHRGGPNISYEAEASERVRSANAIGPSPQINNNTAAGRTPGFDHPVHKNMNMPSTSLSPAGTSKRNVGPETSNSGYGSGNRTGWTSSFMSPEK

SEQ ID NO: 98042 - DNA, 1533 bp, Arabidopsis thaliana
  misc_feature (1)..(1533): Ceres Seq. ID no. 13579374
  misc_feature: MA Experiment ID: 108579 Result: Down-regulated in Transcription
  misc_feature: MA Experiment 108579 PARAMETER Experiment Name: At_4deg_Cold_cDNA_P Parameter: Temperature (deg C) Value: 4 vs. 22
  misc_feature: MA Experiment 108579 PARAMETER Experiment Name: At_4deg_Cold_cDNA_P Parameter: Timepoint (hr) Value: 6
  misc_feature: MA Experiment 108579 PARAMETER Experiment Name: At_4deg_Cold_cDNA_P Parameter: Tissue Value: Aerial
  misc_feature: MA Experiment ID: 20000314 Result: Down-regulated in Transcription
  misc_feature: MA Experiment 20000314 PARAMETER Experiment Name: At_14day_Shoots-Roots_Sub_P Parameter: Age (day) Value: 14
  misc_feature: MA Experiment 20000314 PARAMETER Experiment Name: At_14day_Shoots-Roots_Sub_P Parameter: Organism Value: A. thaliana
  misc_feature: MA Experiment 20000314 PARAMETER Experiment Name: At_14day_Shoots-Roots_Sub_P Parameter: Plant Line Value: WS
  misc_feature: MA Experiment 20000314 PARAMETER Experiment Name: At_14day_Shoots-Roots_Sub_P Parameter: Tissue Value: Roots vs. Whole Plant
  misc_feature: MA Experiment ID: 20000328 Result: Down-regulated in Transcription
  misc_feature: MA Experiment 20000328 PARAMETER Experiment Name: At_42deg_Heat_Sub_P Parameter: Age (day) Value: 14
  misc_feature: MA Experiment 20000328 PARAMETER Experiment Name: At_42deg_Heat_Sub_P Parameter: Organism Value: A. thaliana
  misc_feature: MA Experiment 20000328 PARAMETER Experiment Name: At_42deg_Heat_Sub_P Parameter: Plant Line Value: WS
  misc_feature: MA Experiment 20000328 PARAMETER Experiment Name: At_42deg_Heat_Sub_P Parameter: Temperature (deg C) Value: 42 vs. 22
  misc_feature: MA Experiment 20000328 PARAMETER Experiment Name: At_42deg_Heat_Sub_P Parameter: Timepoint (hr) Value: 6
  misc_feature: MA Experiment 20000328 PARAMETER Experiment Name: At_42deg_Heat_Sub_P Parameter: Tissue Value: Aerial
  misc_feature: MA Experiment ID: 20000355 Result: Down-regulated in Transcription
  misc_feature: MA Experiment 20000355 PARAMETER Experiment Name: At_Siliques_Sub_P Parameter: Age (day) Value: 21
  misc_feature: MA Experiment 20000355 PARAMETER Experiment Name: At_Siliques_Sub_P Parameter: Organism Value: A. thaliana
  misc_feature: MA Experiment 20000355 PARAMETER Experiment Name: At_Siliques_Sub_P Parameter: Plant Line Value: WS
  misc_feature: MA Experiment 20000355 PARAMETER Experiment Name: At_Siliques_Sub_P Parameter: Tissue Value: Less Than 5mm Siliques vs. Whole Plant
  misc_feature: MA Experiment ID: 20000440 Result: Up-regulated in Transcription
  misc_feature: MA Experiment 20000440 PARAMETER Experiment Name: At_Closed-Flower__Sub_P Parameter: Tissue Value: Closed Flower vs. Whole Plant
acccccccgtctttttgttcaactcctacacactccaatcacacaattcacaacccattgagaaaccaataaaataacctcaatcaaaaaaaaaaaaaaaaaaaaaaaaaagatgaaaatctcaatttagtaaaggagaaaaaagccatttcgaataacttgaaaaggttttggttttgcagaagaaaatgaaggagaaggcggagagtggtggaggagtaggatacgtgagagcagatcagatagatttaaagagtctggacgagcaattgcagagacacttaagtaaagcatggacgatggagaagaggaagagtttgagtgatggtgaagataacgtcaataacacccgacataaccagaacaacttcggacatcgacagcttgtgtttcagaggccgcttcttggtggtggatatagcaacaacaacaacagcagcaagaacgacataattaggtcgaccgaggttgagaagtcgaggagagagtgggagattgatccttctaagcttataatcaaaagtgtgattgctagaggtacttttggtacggttcaccgtggaatctacgatggtcaagatgtcgccgtaaaactactagactggggagaagaggggcacaggtcagacgcagagatagcttcgcttagagctgctttcactcaagaagttgctgtgtggcataagctcgaccatcccaatgtcaccaagttcataggagcggcgatggggacatcggagatgagcatacaaacggaaaacgggcaaatgggaatgccgagtaacgtttgctgtgtcgtggttgagtattgccccggcggcgctctcaagtcattcctcatcaaaactcgccgccgcaaactcgccttcaaagtcgttatccaactctcccttgatcttgctcgcgggttgagttacttgcactctcagaagattgtgcatagagacgtgaaaacggagaacatgcttttagataagtcacgcaccttaaagattgcagattttggtgtggctcgtctagaggcttcaaaccctaacgacatgaccggtgagaccggaaccttgggctatatggctcctgaggtgctaaacgggagtccctacaacagaaagtgcgatgtgtatagctttgggatatgtctttgggagatttactgttgcgacatgccttatcctgacctcagcttctccgaagtaacctccgccgtcgtccgccagaatttgagaccagagatacctagatgttgtccaagctcgctggcgaacgtgatgaagaggtgttgggatgcgaatccggagaagcggccggagatggaggaagttgtggctatgttggaggctattgatacttccaaaggcggaggaatgattcctcctgaccaacaacaaggctgtttctgtttccgccgacaccgaggcccatgaagtacacacacatgcactacgttcccattattattataattaactcttactattttggaagaagagagattatttttaaaagttaattgtggggtaattaaaatgtttt

SEQ ID NO: 98043 - protein, 411 aa, Arabidopsis thaliana; identical to SEQ ID NO: 36421
  peptide (1)..(411): Ceres Seq. ID no. 13579375
  misc_feature (108)..(382): Pfam Name: Protein kinase domain Pfam Description: Protein kinase domain
  misc_feature (1)..(411): Homolog of NCBI NO: 15232131 NR Description: protein kinase, putative [Arabidopsis thaliana] putative protein kinase [Arabidopsis thaliana]
  misc_feature (96)..(411): Homolog of NCBI NO: 15240597 NR Description: protein kinase, putative [Arabidopsis thaliana]
  misc_feature (9)..(49): Homolog of NCBI NO: 15240597 NR Description: protein kinase, putative [Arabidopsis thaliana]
  misc_feature (96)..(411): Homolog of NCBI NO: 21553402 NR Description: protein kinase [Arabidopsis thaliana]
  misc_feature (9)..(49): Homolog of NCBI NO: 21553402 NR Description: protein kinase [Arabidopsis thaliana]
  misc_feature (95)..(411): Homolog of NCBI NO: 34911620 NR Description: protein kinase -like [Oryza sativa (japonica
  misc_feature (7)..(34): Homolog of NCBI NO: 34911620 NR Description: protein kinase -like [Oryza sativa (japonica
  misc_feature (98)..(411): Homolog of NCBI NO: 29367399 NR Description: putative protein kinase [Oryza sativa (japonica
  misc_feature (6)..(42): Homolog of NCBI NO: 29367399 NR Description: putative protein kinase [Oryza sativa (japonica
  misc_feature (90)..(411): Homolog of NCBI NO: 15233574 NR Description: protein kinase, putative [Arabidopsis thaliana]

SEQ ID NO: 98044 - protein, 374 aa, Arabidopsis thaliana; identical to SEQ ID NO: 36422
  peptide (1)..(374): Ceres Seq. ID no. 13579376
  misc_feature (71)..(345): Pfam Name: Protein kinase domain Pfam Description: Protein kinase domain
  misc_feature (1)..(374): Homolog of NCBI NO: 15232131 NR Description: protein kinase, putative [Arabidopsis thaliana] putative protein kinase [Arabidopsis thaliana]
  misc_feature (59)..(374): Homolog of NCBI NO: 15240597 NR Description: protein kinase, putative [Arabidopsis thaliana]
  misc_feature (1)..(12): Homolog of NCBI NO: 15240597 NR Description: protein kinase, putative [Arabidopsis thaliana]
  misc_feature (59)..(374): Homolog of NCBI NO: 21553402 NR Description: protein kinase [Arabidopsis thaliana]
  misc_feature (1)..(12): Homolog of NCBI NO: 21553402 NR Description: protein kinase [Arabidopsis thaliana]
  misc_feature (58)..(374): Homolog of NCBI NO: 34911620 NR Description: protein kinase -like [Oryza sativa (japonica
  misc_feature (61)..(374): Homolog of NCBI NO: 29367399 NR Description: putative protein kinase [Oryza sativa (japonica
  misc_feature (53)..(374): Homolog of NCBI NO: 15233574 NR Description: protein kinase, putative [Arabidopsis thaliana]
  misc_feature (1)..(374): Homolog of NCBI NO: 18403507 NR Description: protein kinase, putative [Arabidopsis thaliana]
  misc_feature (62)..(374): Homolog of NCBI NO: 15229398 NR Description: protein kinase, putative (ATMRK1) [Arabidopsis

SEQ ID NO: 98045 - protein, 232 aa, Arabidopsis thaliana; identical to SEQ ID NO: 36423
  peptide (1)..(232): Ceres Seq. ID no. 13579377
  misc_feature (1)..(203): Pfam Name: Protein kinase domain Pfam Description: Protein kinase domain
  misc_feature (1)..(232): Homolog of NCBI NO: 15232131 NR Description: protein kinase, putative [Arabidopsis thaliana] putative protein kinase [Arabidopsis thaliana]
  misc_feature (1)..(232): Homolog of NCBI NO: 15240597 NR Description: protein kinase, putative [Arabidopsis thaliana]
  misc_feature (1)..(232): Homolog of NCBI NO: 21553402 NR Description: protein kinase [Arabidopsis thaliana]
  misc_feature (1)..(232): Homolog of NCBI NO: 34911620 NR Description: protein kinase -like [Oryza sativa (japonica
  misc_feature (1)..(232): Homolog of NCBI NO: 29367399 NR Description: putative protein kinase [Oryza sativa (japonica
  misc_feature (1)..(232): Homolog of NCBI NO: 15233574 NR Description: protein kinase, putative [Arabidopsis thaliana]
  misc_feature (1)..(232): Homolog of NCBI NO: 18403507 NR Description: protein kinase, putative [Arabidopsis thaliana]
  misc_feature (1)..(232): Homolog of NCBI NO: 15229398 NR Description: protein kinase, putative (ATMRK1) [Arabidopsis
  misc_feature (1)..(232): Homolog of NCBI NO: 21554375 NR Description: ATMRK1 [Arabidopsis thaliana]
  misc_feature (1)..(231): Homolog of NCBI NO: 14626298 NR Description: putative protein kinase [Oryza sativa (japonica

SEQ ID NO: 98046 - DNA, 1824 bp, Arabidopsis thaliana
  misc_feature (1)..(1824): Ceres Seq. ID no. 13579380
  misc_feature: MA Experiment ID: 20000166 Result: Up-regulated in Transcription
  misc_feature: MA Experiment 20000166 PARAMETER Experiment Name: At_100uM_ABA_P Parameter: Age (day) Value: 14
  misc_feature: MA Experiment 20000166 PARAMETER Experiment Name: At_100uM_ABA_P Parameter: Organism Value: A. thaliana
  misc_feature: MA Experiment 20000166 PARAMETER Experiment Name: At_100uM_ABA_P Parameter: Plant Line Value: WS
  misc_feature: MA Experiment 20000166 PARAMETER Experiment Name: At_100uM_ABA_P Parameter: Timepoint (hr) Value: 1
  misc_feature: MA Experiment 20000166 PARAMETER Experiment Name: At_100uM_ABA_P Parameter: Tissue Value: Aerial
  misc_feature: MA Experiment 20000166 PARAMETER Experiment Name: At_100uM_ABA_P Parameter: Treatment Value: 100uM ABA vs. No Treatment
  misc_feature: MA Experiment ID: 20000169 Result: Up-regulated in Transcription
  misc_feature: MA Experiment 20000169 PARAMETER Experiment Name: At_100uM_ABA_P Parameter: Age (day) Value: 14
  misc_feature: MA Experiment 20000169 PARAMETER Experiment Name: At_100uM_ABA_P Parameter: Organism Value: A. thaliana
  misc_feature: MA Experiment 20000169 PARAMETER Experiment Name: At_100uM_ABA_P Parameter: Plant Line Value: WS
  misc_feature: MA Experiment 20000169 PARAMETER Experiment Name: At_100uM_ABA_P Parameter: Timepoint (hr) Value: 6
  misc_feature: MA Experiment 20000169 PARAMETER Experiment Name: At_100uM_ABA_P Parameter: Tissue Value: Aerial
  misc_feature: MA Experiment 20000169 PARAMETER Experiment Name: At_100uM_ABA_P Parameter: Treatment Value: 100uM ABA vs. No Treatment
  misc_feature: MA Experiment ID: 20000173 Result: Up-regulated in Transcription
  misc_feature: MA Experiment 20000173 PARAMETER Experiment Name: At_42deg_Heat_P Parameter: Age (day) Value: 14
  misc_feature: MA Experiment 20000173 PARAMETER Experiment Name: At_42deg_Heat_P Parameter: Organism Value: A. thaliana
  misc_feature: MA Experiment 20000173 PARAMETER Experiment Name: At_42deg_Heat_P Parameter: Plant Line Value: WS
  misc_feature: MA Experiment 20000173 PARAMETER Experiment Name: At_42deg_Heat_P Parameter: Temperature (deg C) Value: 42 vs. 22
  misc_feature: MA Experiment 20000173 PARAMETER Experiment Name: At_42deg_Heat_P Parameter: Timepoint (hr) Value: 6
  misc_feature: MA Experiment 20000173 PARAMETER Experiment Name: At_42deg_Heat_P Parameter: Tissue Value: Aerial
  misc_feature: MA Experiment ID: 20000182 Result: Up-regulated in Transcription
  misc_feature: MA Experiment 20000182 PARAMETER Experiment Name: At_2mM_SA_P Parameter: Age (day) Value: 14
  misc_feature: MA Experiment 20000182 PARAMETER Experiment Name: At_2mM_SA_P Parameter: Organism Value: A. thaliana
  misc_feature: MA Experiment 20000182 PARAMETER Experiment Name: At_2mM_SA_P Parameter: Plant Line Value: WS
  misc_feature: MA Experiment 20000182 PARAMETER Experiment Name: At_2mM_SA_P Parameter: Timepoint (hr) Value: 6
  misc_feature: MA Experiment 20000182 PARAMETER Experiment Name: At_2mM_SA_P Parameter: Tissue Value: Aerial
  misc_feature: MA Experiment 20000182 PARAMETER Experiment Name: At_2mM_SA_P Parameter: Treatment Value: 2mM SA vs. No Treatment
  misc_feature: MA Experiment ID: 20000184 Result: Up-regulated in Transcription
  misc_feature: MA Experiment 20000184 PARAMETER Experiment Name: At_Shoots__P Parameter: Age (day) Value: 7
  misc_feature: MA Experiment 20000184 PARAMETER Experiment Name: At_Shoots__P Parameter: Tissue Value: Shoots vs. Whole Plant
  misc_feature: MA Experiment ID: 20000185 Result: Up-regulated in Transcription
  misc_feature: MA Experiment 20000185 PARAMETER Experiment Name: At_Roots__P Parameter: Age (day) Value: 7 vs. 21
  misc_feature: MA Experiment 20000185 PARAMETER Experiment Name: At_Roots__P Parameter: Organism Value: A. thaliana
  misc_feature: MA Experiment 20000185 PARAMETER Experiment Name: At_Roots__P Parameter: Tissue Value: Roots vs. Whole Plant
  misc_feature: MA Experiment ID: 20000211 Result: Up-regulated in Transcription
  misc_feature: MA Experiment 20000211 PARAMETER Experiment Name: At_0.001percent_MeJA__P Parameter: Age (day) Value: 14
  misc_feature: MA Experiment 20000211 PARAMETER Experiment Name: At_0.001percent_MeJA__P Parameter: Organism Value: A. thaliana
  misc_feature: MA Experiment 20000211 PARAMETER Experiment Name: At_0.001percent_MeJA__P Parameter: Plant Line Value: WS
  misc_feature: MA Experiment 20000211 PARAMETER Experiment Name: At_0.001percent_MeJA__P Parameter: Timepoint (hr) Value: 1
  misc_feature: MA Experiment 20000211 PARAMETER Experiment Name: At_0.001percent_MeJA__P Parameter: Tissue Value: Aerial
  misc_feature: MA Experiment 20000211 PARAMETER Experiment Name: At_0.001percent_MeJA__P Parameter: Treatment Value: 0.001percent MeJA vs. No Treatment
  misc_feature: MA Experiment ID: 20000227 Result: Down-regulated in Transcription
  misc_feature: MA Experiment 20000227 PARAMETER Experiment Name: At_Root-Tips-vs-Tops_P Parameter: Tissue Value: Root Tips vs. Root Tops
  misc_feature: MA Experiment ID: 20000234 Result: Down-regulated in Transcription
  misc_feature: MA Experiment 20000234 PARAMETER Experiment Name: At_Siliques_P Parameter: Age (day) Value: 21
  misc_feature: MA Experiment 20000234 PARAMETER Experiment Name: At_Siliques_P Parameter: Organism Value: A. thaliana
  misc_feature: MA Experiment 20000234 PARAMETER Experiment Name: At_Siliques_P Parameter: Plant Line Value: WS
  misc_feature: MA Experiment 20000234 PARAMETER Experiment Name: At_Siliques_P Parameter: Tissue Value: Less Than 5mm Siliques vs. Whole Plant
  misc_feature: MA Experiment ID: 20000264 Result: Down-regulated in Transcription
  misc_feature: MA Experiment 20000264 PARAMETER Experiment Name: At_Open_Flower_P Parameter: Age (day) Value: 21
  misc_feature: MA Experiment 20000264 PARAMETER Experiment Name: At_Open_Flower_P Parameter: Plant Line Value: WS
  misc_feature: MA Experiment 20000264 PARAMETER Experiment Name: At_Open_Flower_P Parameter: Tissue Value: Open Flower vs. Whole Plant
  misc_feature: MA Experiment ID: 20000265 Result: Down-regulated in Transcription
  misc_feature: MA Experiment 20000265 PARAMETER Experiment Name: At_Open_Flower_P Parameter: Age (day) Value: 21
  misc_feature: MA Experiment 20000265 PARAMETER Experiment Name: At_Open_Flower_P Parameter: Plant Line Value: WS
  misc_feature: MA Experiment 20000265 PARAMETER Experiment Name: At_Open_Flower_P Parameter: Tissue Value: Closed Flower vs. Whole Plant
  misc_feature: MA Experiment ID: 20000269 Result: Down-regulated in Transcription
  misc_feature: MA Experiment 20000269 PARAMETER Experiment Name: At_1mM_KNO3_L-vs-H_Roots_P Parameter: Age (day) Value: 7,10,12
  misc_feature: MA Experiment 20000269 PARAMETER Experiment Name: At_1mM_KNO3_L-vs-H_Roots_P Parameter: Organism Value: A. thaliana
  misc_feature: MA Experiment 20000269 PARAMETER Experiment Name: At_1mM_KNO3_L-vs-H_Roots_P Parameter: Plant Line Value: WS
  misc_feature: MA Experiment 20000269 PARAMETER Experiment Name: At_1mM_KNO3_L-vs-H_Roots_P Parameter: Timepoint (day) Value: 7,10,12
  misc_feature: MA Experiment 20000269 PARAMETER Experiment Name: At_1mM_KNO3_L-vs-H_Roots_P Parameter: Tissue Value: Roots
  misc_feature: MA Experiment 20000269 PARAMETER Experiment Name: At_1mM_KNO3_L-vs-H_Roots_P Parameter: Treatment Value: 1mM KNO3 vs. 50mM KNO3
  misc_feature: MA Experiment ID: 20000286 Result: Down-regulated in Transcription
  misc_feature: MA Experiment 20000286 PARAMETER Experiment Name: At_Open_Flower_P Parameter: Age (day) Value: 21
  misc_feature: MA Experiment 20000286 PARAMETER Experiment Name: At_Open_Flower_P Parameter: Plant Line Value: WS
  misc_feature: MA Experiment 20000286 PARAMETER Experiment Name: At_Open_Flower_P Parameter: Tissue Value: Half Open vs. Whole Plant
  misc_feature: MA Experiment ID: 20000436 Result: Up-regulated in Transcription
  misc_feature: MA Experiment 20000436 PARAMETER Experiment Name: At_Drought_P Parameter: Age (day) Value: 7
  misc_feature: MA Experiment 20000436 PARAMETER Experiment Name: At_Drought_P Parameter: Organism Value: A. thaliana
  misc_feature: MA Experiment 20000436 PARAMETER Experiment Name: At_Drought_P Parameter: Plant Line Value: WS
  misc_feature: MA Experiment 20000436 PARAMETER Experiment Name: At_Drought_P Parameter: Timepoint (hr) Value: 12
  misc_feature: MA Experiment 20000436 PARAMETER Experiment Name: At_Drought_P Parameter: Tissue Value: Whole Plant
  misc_feature: MA Experiment 20000436 PARAMETER Experiment Name: At_Drought_P Parameter: Treatment Value: Drought vs. No Drought
  misc_feature: MA Experiment ID: 20000437 Result: Up-regulated in Transcription
  misc_feature: MA Experiment 20000437 PARAMETER Experiment Name: At_Drought_P Parameter: Age (day) Value: 8
  misc_feature: MA Experiment 20000437 PARAMETER Experiment Name: At_Drought_P Parameter: Organism Value: A. thaliana
  misc_feature: MA Experiment 20000437 PARAMETER Experiment Name: At_Drought_P Parameter: Plant Line Value: WS
  misc_feature: MA Experiment 20000437 PARAMETER Experiment Name: At_Drought_P Parameter: Timepoint (hr) Value: 24
  misc_feature: MA Experiment 20000437 PARAMETER Experiment Name: At_Drought_P Parameter: Tissue Value: Whole Plant
  misc_feature: MA Experiment 20000437 PARAMETER Experiment Name: At_Drought_P Parameter: Treatment Value: Drought vs. No Drought
  misc_feature: MA Experiment ID: 20000438 Result: Up-regulated in Transcription
  misc_feature: MA Experiment 20000438 PARAMETER Experiment Name: At_Shoots__P Parameter: Age (day) Value: 14
  misc_feature: MA Experiment 20000438 PARAMETER Experiment Name: At_Shoots__P Parameter: Tissue Value: Shoots vs. Whole Plant
  misc_feature: MA Experiment ID: 20000441 Result: Up-regulated in Transcription
  misc_feature: MA Experiment 20000441 PARAMETER Experiment Name: At_1uM_BR-BRZ__P Parameter: Tissue Value: Shoot Apices
  misc_feature: MA Experiment 20000441 PARAMETER Experiment Name: At_1uM_BR-BRZ__P Parameter: Treatment Value: 1uM BR vs. No Treatment
  misc_feature: MA Experiment ID: 20000443 Result: Up-regulated in Transcription
  misc_feature: MA Experiment 20000443 PARAMETER Experiment Name: At_1uM_BR-BRZ__P Parameter: Tissue Value: Shoot Apices
  misc_feature: MA Experiment 20000443 PARAMETER Experiment Name: At_1uM_BR-BRZ__P Parameter: Treatment Value: 1uM BRZ vs. No Treatment
  misc_feature: MA Experiment ID: 20000452 Result: Down-regulated in Transcription
  misc_feature: MA Experiment 20000452 PARAMETER Experiment Name: At_CS6879_Shoots-Roots_P Parameter: Age (day) Value: 14
  misc_feature: MA Experiment 20000452 PARAMETER Experiment Name: At_CS6879_Shoots-Roots_P Parameter: Organism Value: A. thaliana
  misc_feature: MA Experiment 20000452 PARAMETER Experiment Name: At_CS6879_Shoots-Roots_P Parameter: Plant Line Value: CS6879 vs. WS
  misc_feature: MA Experiment 20000452 PARAMETER Experiment Name: At_CS6879_Shoots-Roots_P Parameter: Tissue Value: Shoots
  misc_feature: MA Experiment ID: 20000453 Result: Up-regulated in Transcription
  misc_feature: MA Experiment 20000453 PARAMETER Experiment Name: At_100uM_ABA_P Parameter: Age (day) Value: 15
  misc_feature: MA Experiment 20000453 PARAMETER Experiment Name: At_100uM_ABA_P Parameter: Organism Value: A. thaliana
  misc_feature: MA Experiment 20000453 PARAMETER Experiment Name: At_100uM_ABA_P Parameter: Plant Line Value: WS
  misc_feature: MA Experiment 20000453 PARAMETER Experiment Name: At_100uM_ABA_P Parameter: Timepoint (hr) Value: 24
  misc_feature: MA Experiment 20000453 PARAMETER Experiment Name: At_100uM_ABA_P Parameter: Tissue Value: Aerial
  misc_feature: MA Experiment 20000453 PARAMETER Experiment Name: At_100uM_ABA_P Parameter: Treatment Value: 100uM ABA vs. No Treatment
  misc_feature: MA Experiment ID: 20000455 Result: Up-regulated in Transcription
  misc_feature: MA Experiment 20000455 PARAMETER Experiment Name: At_100uM_ABA_P Parameter: Age (day) Value: 16
  misc_feature: MA Experiment 20000455 PARAMETER Experiment Name: At_100uM_ABA_P Parameter: Organism Value: A. thaliana
  misc_feature: MA Experiment 20000455 PARAMETER Experiment Name: At_100uM_ABA_P Parameter: Plant Line Value: WS
  misc_feature: MA Experiment 20000455 PARAMETER Experiment Name: At_100uM_ABA_P Parameter: Timepoint (hr) Value: 48
  misc_feature: MA Experiment 20000455 PARAMETER Experiment Name: At_100uM_ABA_P Parameter: Tissue Value: Aerial
  misc_feature: MA Experiment 20000455 PARAMETER Experiment Name: At_100uM_ABA_P Parameter: Treatment Value: 100uM ABA vs. No Treatment
  misc_feature: MA Experiment ID: 20000709 Result: Up-regulated in Transcription
  misc_feature: MA Experiment 20000709 PARAMETER Experiment Name: At_15mM_NH4NO3_L-to-H_P Parameter: Age (hr) Value: 14
  misc_feature: MA Experiment 20000709 PARAMETER Experiment Name: At_15mM_NH4NO3_L-to-H_P Parameter: Organism Value: A. thaliana
  misc_feature: MA Experiment 20000709 PARAMETER Experiment Name: At_15mM_NH4NO3_L-to-H_P Parameter: Plant Line Value: WS
  misc_feature: MA Experiment 20000709 PARAMETER Experiment Name: At_15mM_NH4NO3_L-to-H_P Parameter: Timepoint (hr) Value: 4
  misc_feature: MA Experiment 20000709 PARAMETER Experiment Name: At_15mM_NH4NO3_L-to-H_P Parameter: Tissue Value: Aerial
  misc_feature: MA Experiment 20000709 PARAMETER Experiment Name: At_15mM_NH4NO3_L-to-H_P Parameter: Treatment Value: 15mM NH4NO3 vs. 30mM Mannitol
  misc_feature: MA Experiment ID: 20001247 Result: Up-regulated in Transcription
  misc_feature: MA Experiment 20001247 PARAMETER Experiment Name: At_Far-red-induction_P Parameter: Age (day) Value: 7
  misc_feature: MA Experiment 20001247 PARAMETER Experiment Name: At_Far-red-induction_P Parameter: Light Value: Far-red vs. White
  misc_feature: MA Experiment 20001247 PARAMETER Experiment Name: At_Far-red-induction_P Parameter: Organism Value: A. thaliana
  misc_feature: MA Experiment 20001247 PARAMETER Experiment Name: At_Far-red-induction_P Parameter: Plant Line Value: Columbia
  misc_feature: MA Experiment 20001247 PARAMETER Experiment Name: At_Far-red-induction_P Parameter: Timepoint (hr) Value: 1
  misc_feature: MA Experiment 20001247 PARAMETER Experiment Name: At_Far-red-induction_P Parameter: Tissue Value: Whole Plant
  misc_feature: MA Experiment ID: 20001450 Result: Up-regulated in Transcription
  misc_feature: MA Experiment 20001450 PARAMETER Experiment Name: At_Far-red-induction_P Parameter: Age (day) Value: 7
  misc_feature: MA Experiment 20001450 PARAMETER Experiment Name: At_Far-red-induction_P Parameter: Light Value: Far-red vs. White
  misc_feature: MA Experiment 20001450 PARAMETER Experiment Name: At_Far-red-induction_P Parameter: Organism Value: A. thaliana
  misc_feature: MA Experiment 20001450 PARAMETER Experiment Name: At_Far-red-induction_P Parameter: Plant Line Value: Columbia
  misc_feature: MA Experiment 20001450 PARAMETER Experiment Name: At_Far-red-induction_P Parameter: Timepoint (hr) Value: 8
  misc_feature: MA Experiment 20001450 PARAMETER Experiment Name: At_Far-red-induction_P Parameter: Tissue Value: Whole Plant
  misc_feature: MA Experiment ID: 20001451 Result: Up-regulated in Transcription
  misc_feature: MA Experiment 20001451 PARAMETER Experiment Name: At_Far-red-induction_P Parameter: Age (day) Value: 7
  misc_feature: MA Experiment 20001451 PARAMETER Experiment Name: At_Far-red-induction_P Parameter: Light Value: Far-red vs. White
  misc_feature: MA Experiment 20001451 PARAMETER Experiment Name: At_Far-red-induction_P Parameter: Organism Value: A. thaliana
  misc_feature: MA Experiment 20001451 PARAMETER Experiment Name: At_Far-red-induction_P Parameter: Plant Line Value: Columbia
  misc_feature: MA Experiment 20001451 PARAMETER Experiment Name: At_Far-red-induction_P Parameter: Timepoint (hr) Value: 24
  misc_feature: MA Experiment 20001451 PARAMETER Experiment Name: At_Far-red-induction_P Parameter: Tissue Value: Whole Plant
  misc_feature: MA Experiment ID: 20001555 Result: Up-regulated in Transcription
  misc_feature: MA Experiment 20001555 PARAMETER Experiment Name: At_Drought_Soil_Dry_P Parameter: Age (day) Value: 24
  misc_feature: MA Experiment 20001555 PARAMETER Experiment Name: At_Drought_Soil_Dry_P Parameter: Organism Value: A. thaliana
  misc_feature: MA Experiment 20001555 PARAMETER Experiment Name: At_Drought_Soil_Dry_P Parameter: Plant Line Value: WS
  misc_feature: MA Experiment 20001555 PARAMETER Experiment Name: At_Drought_Soil_Dry_P Parameter: Post Timepoint (hr) Value: None
  misc_feature: MA Experiment 20001555 PARAMETER Experiment Name: At_Drought_Soil_Dry_P Parameter: Post-Treatment Value: None
  misc_feature: MA Experiment 20001555 PARAMETER Experiment Name: At_Drought_Soil_Dry_P Parameter: Timepoint (day) Value: 10
  misc_feature: MA Experiment 20001555 PARAMETER Experiment Name: At_Drought_Soil_Dry_P Parameter: Treatment Value: Drought vs. No Drought
  misc_feature: MA Experiment ID: 20001556 Result: Up-regulated in Transcription
  misc_feature: MA Experiment 20001556 PARAMETER Experiment Name: At_Drought_Soil_Dry_P Parameter: Age (day) Value: 26
  misc_feature: MA Experiment 20001556 PARAMETER Experiment Name: At_Drought_Soil_Dry_P Parameter: Organism Value: A. thaliana
  misc_feature: MA Experiment 20001556 PARAMETER Experiment Name: At_Drought_Soil_Dry_P Parameter: Plant Line Value: WS
  misc_feature: MA Experiment 20001556 PARAMETER Experiment Name: At_Drought_Soil_Dry_P Parameter: Post Timepoint (hr) Value: None
  misc_feature: MA Experiment 20001556 PARAMETER Experiment Name: At_Drought_Soil_Dry_P Parameter: Post-Treatment Value: None
  misc_feature: MA Experiment 20001556 PARAMETER Experiment Name: At_Drought_Soil_Dry_P Parameter: Timepoint (day) Value: 12
  misc_feature: MA Experiment 20001556 PARAMETER Experiment Name: At_Drought_Soil_Dry_P Parameter: Treatment Value: Drought vs. No Drought
  misc_feature: MA Experiment ID: 20001773 Result: Down-regulated in Transcription
  misc_feature: MA Experiment 20001773 PARAMETER Experiment Name: At_Far-red-enriched-adult_P Parameter: Age (day) Value: 30
  misc_feature: MA Experiment 20001773 PARAMETER Experiment Name: At_Far-red-enriched-adult_P Parameter: Light Value: Far-red enriched vs. White
  misc_feature: MA Experiment 20001773 PARAMETER Experiment Name: At_Far-red-enriched-adult_P Parameter: Organism Value: A. thaliana
  misc_feature: MA Experiment 20001773 PARAMETER Experiment Name: At_Far-red-enriched-adult_P Parameter: Plant Line Value: Columbia
  misc_feature: MA Experiment 20001773 PARAMETER Experiment Name: At_Far-red-enriched-adult_P Parameter: Timepoint (hr) Value: 48
  misc_feature: MA Experiment 20001773 PARAMETER Experiment Name: At_Far-red-enriched-adult_P Parameter: Tissue Value: Aerial
  misc_feature: MA Experiment ID: 20001904 Result: Up-regulated in Transcription
  misc_feature: MA Experiment 20001904 PARAMETER Experiment Name: At_Drought_Reproduction_P Parameter: Age (day) Value: 37
  misc_feature: MA Experiment 20001904 PARAMETER Experiment Name: At_Drought_Reproduction_P Parameter: Organism Value: A. thaliana
  misc_feature: MA Experiment 20001904 PARAMETER Experiment Name: At_Drought_Reproduction_P Parameter: Plant Line Value: WS
  misc_feature: MA Experiment 20001904 PARAMETER Experiment Name: At_Drought_Reproduction_P Parameter: Timepoint (day) Value: 7
  misc_feature: MA Experiment 20001904 PARAMETER Experiment Name: At_Drought_Reproduction_P Parameter: Tissue Value: Rosettes
  misc_feature: MA Experiment 20001904 PARAMETER Experiment Name: At_Drought_Reproduction_P Parameter: Treatment Value: Drought vs. No Drought
  misc_feature: MA Experiment ID: 20001905 Result: Up-regulated in Transcription
  misc_feature: MA Experiment 20001905 PARAMETER Experiment Name: At_Drought_Reproduction_P Parameter: Age (day) Value: 40
  misc_feature: MA Experiment 20001905 PARAMETER Experiment Name: At_Drought_Reproduction_P Parameter: Organism Value: A. thaliana
  misc_feature: MA Experiment 20001905 PARAMETER Experiment Name: At_Drought_Reproduction_P Parameter: Plant Line Value: WS
  misc_feature: MA Experiment 20001905 PARAMETER Experiment Name: At_Drought_Reproduction_P Parameter: Timepoint (day) Value: 10
  misc_feature: MA Experiment 20001905 PARAMETER Experiment Name: At_Drought_Reproduction_P Parameter: Tissue Value: Rosettes
  misc_feature: MA Experiment 20001905 PARAMETER Experiment Name: At_Drought_Reproduction_P Parameter: Treatment Value: Drought vs. No Drought
  misc_feature: MA Experiment ID: 20001906 Result: Up-regulated in Transcription
  misc_feature: MA Experiment 20001906 PARAMETER Experiment Name: At_Drought_Reproduction_P Parameter: Age (day) Value: 35
  misc_feature: MA Experiment 20001906 PARAMETER Experiment Name: At_Drought_Reproduction_P Parameter: Organism Value: A. thaliana
  misc_feature: MA Experiment 20001906 PARAMETER Experiment Name: At_Drought_Reproduction_P Parameter: Plant Line Value: WS
  misc_feature: MA Experiment 20001906 PARAMETER Experiment Name: At_Drought_Reproduction_P Parameter: Timepoint (day) Value: 5
  misc_feature: MA Experiment 20001906 PARAMETER Experiment Name: At_Drought_Reproduction_P Parameter: Tissue Value: Siliques
  misc_feature: MA Experiment 20001906 PARAMETER Experiment Name: At_Drought_Reproduction_P Parameter: Treatment Value: Drought vs. No Drought
  misc_feature: MA Experiment ID: 20001911 Result: Up-regulated in Transcription
  misc_feature: MA Experiment 20001911 PARAMETER Experiment Name: At_Drought_Reproduction_P Parameter: Age (day) Value: 40
  misc_feature: MA Experiment 20001911 PARAMETER Experiment Name: At_Drought_Reproduction_P Parameter: Organism Value: A. thaliana
  misc_feature: MA Experiment 20001911 PARAMETER Experiment Name: At_Drought_Reproduction_P Parameter: Plant Line Value: WS
  misc_feature: MA Experiment 20001911 PARAMETER Experiment Name: At_Drought_Reproduction_P Parameter: Timepoint (day) Value: 10
  misc_feature: MA Experiment 20001911 PARAMETER Experiment Name: At_Drought_Reproduction_P Parameter: Tissue Value: Flowers
  misc_feature: MA Experiment 20001911 PARAMETER Experiment Name: At_Drought_Reproduction_P Parameter: Treatment Value: Drought vs. No Drought
aaaacagaaagaaaaaaaaaatgaagaagagtatcgaaactccgttattgttgaacaccaaacaatcacaagacgaagataaagaaaaaataagatgggagaagatgaagaaagttgcttcaatggctgctccaatggtcgccgtgaacatgtctcaataccttcttcaagcaacttctacaatgatcgtcggtcaccggagcgaactcgctctcgccggaatcgctctaggaagctcctttgctaatgttaccggctttggtgttctttttggactttcaggttcattggaaacactatgtggtcaagcatatggagcaaaacaatatcacaagcttggatcttacactttcacttcaatagttttccttttgattatctctgttccgatttcgattctttggatgttcatgaaccagatcttgctgttgcttcatcaagatcctcaaatagcagagttagctggtgtgtactgtctctggctggtaccagctttattcggttactctgttctcgagtcgttggttcgatattttcagtcacaaagcttgatttatccaatggtcttgagctctctagctgctctgtctttccatgttcctctctgttggctaatggttcataaatttgattttggagccaaaggagcggctgcgtctatcggtatctcttactggctcaacgcggtttttctttgggtttatatgaaacgctctagtcgttgtgtcgaaacgcggatttatatgtccaaggatgtttttgttcatacaaatatcttctttcaatttgccattccttctgcaatgatgtgttggtaagtatgtacaactttattaaaaatccatatagaattaaccaagtgatggtagtctagtggtggtcattgttttgtggataggtgaaagatttaaaatcttaggttacataaataaatgtgtaatggattttttttcccttcactaatattctattgacacttattttcttattgctcttgcttccttcaatagccttgagtggttagctttcgaggtcattactttgctgtctggtcttctacccaactcaaagctcgaaacatcggttatttcgatttgcctcacgacctcttcattgcattacaatctagtaaatggaattggtgatgcagcaagcaccaatgtggctaatgagctaggagctgggaatccgcgaggggctcgtgattctgctgcggctgcaatcataattgcagctgttgagtcagttattgtgagctctagtctgttcttgtctcgcagtgtgtggccttatgcatatagcaatgtggaggaagtaattagttatgtgactgatatcactcctattctttgtatctcaatcctcatggacagcttcttgaccgtcctctccgggattgtgagaggaacagggtggcaaaaaattggagcttatgtgaacataacctcttattatgtcattggtattcctgttggacttctattgtgttttcatcttcacttcaatgggaaaggactttgggctggtttagtcacaggatcaacattacaaactctaatcctatttcttgttattggatttaccaattggagcaaagaggcaattaaggctagggagagaattggtgatgagaaagtttggagacatgactcattgcttaattgaagaaaaaaagaaatacaaacttttgggggattttgattgcttctttttttgtgtgtgtttgtgcaataaccttcagttgattgtaatttatattgaaagtacattatagtctttcatatgatattagagtgtaagaaagtttgaaaatatatctcagtt

SEQ ID NO: 98047 - protein, 271 aa, Arabidopsis thaliana
  peptide (1)..(271): Ceres Seq. ID no. 13579381
  misc_feature (7)..(270): Homolog of NCBI NO: 30697399 NR Description: MATE efflux protein - related [Arabidopsis >gi|12597760|gb|AAG60073.1|AC013288_7 MATE efflux family protein,
  misc_feature (7)..(269): Homolog of NCBI NO: 13430684 NR Description: putative MATE efflux family protein [Arabidopsis
  misc_feature (7)..(271): Homolog of NCBI NO: 18408592 NR Description: MATE efflux protein - related [Arabidopsis >gi|15529196|gb|AAK97692.1| At1g66760/F4N21_11 [Arabidopsis
  misc_feature (11)..(269): Homolog of NCBI NO: 15217763 NR Description: MATE efflux protein family [Arabidopsis thaliana]
  misc_feature (18)..(271): Homolog of NCBI NO: 15219745 NR Description: MATE efflux protein - related [Arabidopsis >gi|12597755|gb|AAG60068.1|AC013288_2 MATE efflux family protein,
  misc_feature (11)..(269): Homolog of NCBI NO: 22325453 NR Description: MATE efflux protein family [Arabidopsis thaliana] unknown protein [Arabidopsis thaliana]
  misc_feature (10)..(270): Homolog of NCBI NO: 15223961 NR Description: MATE efflux protein family [Arabidopsis thaliana]
  misc_feature (11)..(270): Homolog of NCBI NO: 15228073 NR Description: MATE efflux protein family [Arabidopsis thaliana]
  misc_feature (11)..(269): Homolog of NCBI NO: 15228085 NR Description: MATE efflux protein family [Arabidopsis thaliana]
  misc_feature (11)..(269): Homolog of NCBI NO: 25411056 NR Description: hypothetical protein At2g04100 [imported] - thaliana >gi|4734005|gb|AAD28682.1| hypothetical protein
NRKKKKMKKSIETPLLLNTKQSQDEDKEKIRWEKMKKVASMAAPMVAVNMSQYLLQATSTMIVGHRSELALAGIALGSSFANVTGFGVLFGLSGSLETLCGQAYGAKQYHKLGSYTFTSIVFLLIISVPISILWMFMNQILLLLHQDPQIAELAGVYCLWLVPALFGYSVLESLVRYFQSQSLIYPMVLSSLAALSFHVPLCWLMVHKFDFGAKGAAASIGISYWLNAVFLWVYMKRSSRCVETRIYMSKDVFVHTNIFFQFAIPSAMMCW

SEQ ID NO: 98048 - protein, 265 aa, Arabidopsis thaliana
  peptide (1)..(265): Ceres Seq. ID no. 13579382
  misc_feature (1)..(264): Homolog of NCBI NO: 30697399 NR Description: MATE efflux protein - related [Arabidopsis >gi|12597760|gb|AAG60073.1|AC013288_7 MATE efflux family protein,
  misc_feature (1)..(263): Homolog of NCBI NO: 13430684 NR Description: putative MATE efflux family protein [Arabidopsis
  misc_feature (1)..(265): Homolog of NCBI NO: 18408592 NR Description: MATE efflux protein - related [Arabidopsis >gi|15529196|gb|AAK97692.1| At1g66760/F4N21_11 [Arabidopsis
  misc_feature (5)..(263): Homolog of NCBI NO: 15217763 NR Description: MATE efflux protein family [Arabidopsis thaliana]
  misc_feature (12)..(265): Homolog of NCBI NO: 15219745 NR Description: MATE efflux protein - related [Arabidopsis >gi|12597755|gb|AAG60068.1|AC013288_2 MATE efflux family protein,
  misc_feature (5)..(263): Homolog of NCBI NO: 22325453 NR Description: MATE efflux protein family [Arabidopsis thaliana] unknown protein [Arabidopsis thaliana]
  misc_feature (4)..(264): Homolog of NCBI NO: 15223961 NR Description: MATE efflux protein family [Arabidopsis thaliana]
  misc_feature (5)..(264): Homolog of NCBI NO: 15228073 NR Description: MATE efflux protein family [Arabidopsis thaliana]
  misc_feature (5)..(263): Homolog of NCBI NO: 15228085 NR Description: MATE efflux protein family [Arabidopsis thaliana]
  misc_feature (5)..(263): Homolog of NCBI NO: 25411056 NR Description: hypothetical protein At2g04100 [imported] - thaliana >gi|4734005|gb|AAD28682.1| hypothetical protein
MKKSIETPLLLNTKQSQDEDKEKIRWEKMKKVASMAAPMVAVNMSQYLLQATSTMIVGHRSELALAGIALGSSFANVTGFGVLFGLSGSLETLCGQAYGAKQYHKLGSYTFTSIVFLLIISVPISILWMFMNQILLLLHQDPQIAELAGVYCLWLVPALFGYSVLESLVRYFQSQSLIYPMVLSSLAALSFHVPLCWLMVHKFDFGAKGAAASIGISYWLNAVFLWVYMKRSSRCVETRIYMSKDVFVHTNIFFQFAIPSAMMCW

SEQ ID NO: 98049 - protein, 237 aa, Arabidopsis thaliana
  peptide (1)..(237): Ceres Seq. ID no. 13579383
  misc_feature (1)..(236): Homolog of NCBI NO: 30697399 NR Description: MATE efflux protein - related [Arabidopsis >gi|12597760|gb|AAG60073.1|AC013288_7 MATE efflux family protein,
  misc_feature (1)..(235): Homolog of NCBI NO: 13430684 NR Description: putative MATE efflux family protein [Arabidopsis
  misc_feature (1)..(237): Homolog of NCBI NO: 18408592 NR Description: MATE efflux protein - related [Arabidopsis >gi|15529196|gb|AAK97692.1| At1g66760/F4N21_11 [Arabidopsis
  misc_feature (1)..(235): Homolog of NCBI NO: 15217763 NR Description: MATE efflux protein family [Arabidopsis thaliana]
  misc_feature (1)..(237): Homolog of NCBI NO: 15219745 NR Description: MATE efflux protein - related [Arabidopsis >gi|12597755|gb|AAG60068.1|AC013288_2 MATE efflux family protein,
  misc_feature (1)..(235): Homolog of NCBI NO: 22325453 NR Description: MATE efflux protein family [Arabidopsis thaliana] unknown protein [Arabidopsis thaliana]
  misc_feature (1)..(236): Homolog of NCBI NO: 15223961 NR Description: MATE efflux protein family [Arabidopsis thaliana]
  misc_feature (1)..(236): Homolog of NCBI NO: 15228073 NR Description: MATE efflux protein family [Arabidopsis thaliana]
  misc_feature (1)..(235): Homolog of NCBI NO: 15228085 NR Description: MATE efflux protein family [Arabidopsis thaliana]
  misc_feature (1)..(235): Homolog of NCBI NO: 25411056 NR Description: hypothetical protein At2g04100 [imported] - thaliana >gi|4734005|gb|AAD28682.1| hypothetical protein
MKKVASMAAPMVAVNMSQYLLQATSTMIVGHRSELALAGIALGSSFANVTGFGVLFGLSGSLETLCGQAYGAKQYHKLGSYTFTSIVFLLIISVPISILWMFMNQILLLLHQDPQIAELAGVYCLWLVPALFGYSVLESLVRYFQSQSLIYPMVLSSLAALSFHVPLCWLMVHKFDFGAKGAAASIGISYWLNAVFLWVYMKRSSRCVETRIYMSKDVFVHTNIFFQFAIPSAMMCW

SEQ ID NO: 98050 - DNA, 1105 bp, Arabidopsis thaliana
  misc_feature (1)..(1105): Ceres Seq. ID no. 13579388
  misc_feature: MA Experiment ID: 108573 Result: Up-regulated in Transcription
  misc_feature: MA Experiment 108573 PARAMETER Experiment Name: At_Drought_cDNA_P Parameter: Timepoint (hr) Value: 6
  misc_feature: MA Experiment 108573 PARAMETER Experiment Name: At_Drought_cDNA_P Parameter: Tissue Value: Aerial
  misc_feature: MA Experiment 108573 PARAMETER Experiment Name: At_Drought_cDNA_P Parameter: Treatment Value: Drought vs. No Drought
  misc_feature: MA Experiment ID: 108579 Result: Down-regulated in Transcription
  misc_feature: MA Experiment 108579 PARAMETER Experiment Name: At_4deg_Cold_cDNA_P Parameter: Temperature (deg C) Value: 4 vs. 22
  misc_feature: MA Experiment 108579 PARAMETER Experiment Name: At_4deg_Cold_cDNA_P Parameter: Timepoint (hr) Value: 6
  misc_feature: MA Experiment 108579 PARAMETER Experiment Name: At_4deg_Cold_cDNA_P Parameter: Tissue Value: Aerial
  misc_feature: MA Experiment ID: 20000227 Result: Down-regulated in Transcription
  misc_feature: MA Experiment 20000227 PARAMETER Experiment Name: At_Root-Tips-vs-Tops_P Parameter: Tissue Value: Root Tips vs. Root Tops
  misc_feature: MA Experiment ID: 20000234 Result: Down-regulated in Transcription
  misc_feature: MA Experiment 20000234 PARAMETER Experiment Name: At_Siliques_P Parameter: Age (day) Value: 21
  misc_feature: MA Experiment 20000234 PARAMETER Experiment Name: At_Siliques_P Parameter: Organism Value: A. thaliana
  misc_feature: MA Experiment 20000234 PARAMETER Experiment Name: At_Siliques_P Parameter: Plant Line Value: WS
  misc_feature: MA Experiment 20000234 PARAMETER Experiment Name: At_Siliques_P Parameter: Tissue Value: Less Than 5mm Siliques vs. Whole Plant
  misc_feature: MA Experiment ID: 20000235 Result: Down-regulated in Transcription
  misc_feature: MA Experiment 20000235 PARAMETER Experiment Name: At_Siliques_P Parameter: Age (day) Value: 21
  misc_feature: MA Experiment 20000235 PARAMETER Experiment Name: At_Siliques_P Parameter: Organism Value: A. thaliana
  misc_feature: MA Experiment 20000235 PARAMETER Experiment Name: At_Siliques_P Parameter: Plant Line Value: WS
  misc_feature: MA Experiment 20000235 PARAMETER Experiment Name: At_Siliques_P Parameter: Tissue Value: 5-10mm Siliques vs. Whole Plant
  misc_feature: MA Experiment ID: 20000264 Result: Down-regulated in Transcription
  misc_feature: MA Experiment 20000264 PARAMETER Experiment Name: At_Open_Flower_P Parameter: Age (day) Value: 21
  misc_feature: MA Experiment 20000264 PARAMETER Experiment Name: At_Open_Flower_P Parameter: Plant Line Value: WS
  misc_feature: MA Experiment 20000264 PARAMETER Experiment Name: At_Open_Flower_P Parameter: Tissue Value: Open Flower vs. Whole Plant
  misc_feature: MA Experiment ID: 20000265 Result: Down-regulated in Transcription
  misc_feature: MA Experiment 20000265 PARAMETER Experiment Name: At_Open_Flower_P Parameter: Age (day) Value: 21
  misc_feature: MA Experiment 20000265 PARAMETER Experiment Name: At_Open_Flower_P Parameter: Plant Line Value: WS
  misc_feature: MA Experiment 20000265 PARAMETER Experiment Name: At_Open_Flower_P Parameter: Tissue Value: Closed Flower vs. Whole Plant
  misc_feature: MA Experiment ID: 20000286 Result: Down-regulated in Transcription
  misc_feature: MA Experiment 20000286 PARAMETER Experiment Name: At_Open_Flower_P Parameter: Age (day) Value: 21
  misc_feature: MA Experiment 20000286 PARAMETER Experiment Name: At_Open_Flower_P Parameter: Plant Line Value: WS
  misc_feature: MA Experiment 20000286 PARAMETER Experiment Name: At_Open_Flower_P Parameter: Tissue Value: Half Open vs. Whole Plant
  misc_feature: MA Experiment ID: 20001450 Result: Up-regulated in Transcription
  misc_feature: MA Experiment 20001450 PARAMETER Experiment Name: At_Far-red-induction_P Parameter: Age (day) Value: 7
  misc_feature: MA Experiment 20001450 PARAMETER Experiment Name: At_Far-red-induction_P Parameter: Light Value: Far-red vs. White
  misc_feature: MA Experiment 20001450 PARAMETER Experiment Name: At_Far-red-induction_P Parameter: Organism Value: A. thaliana
  misc_feature: MA Experiment 20001450 PARAMETER Experiment Name: At_Far-red-induction_P Parameter: Plant Line Value: Columbia
  misc_feature: MA Experiment 20001450 PARAMETER Experiment Name: At_Far-red-induction_P Parameter: Timepoint (hr) Value: 8
  misc_feature: MA Experiment 20001450 PARAMETER Experiment Name: At_Far-red-induction_P Parameter: Tissue Value: Whole Plant
gcacgagtacgcagaaattctgtctgcgtctccgaaccaactctatccttctctcaatccgatccgttccgttcactacttgtctcaatttcgaaccaattggatcgcatcttttaggggctcaaacctttggtgacgaggacgaggaagaagattgtcgcatctgatttatatcggaaaaaggtctcttgccggaaaggacacgatccgctttcataaaggagagattttgacagattcagtagacgccatggatgtgcctagctcttgggatgctttacggaaacaggctagaaagattgaagctcagcttgacgagcagatgcattcatatcgtagacttgtttccacaaaggctttatcaaaatcagatggtaatgagagtgatcttgaagctgggattgacttacttcttaggcaactgcaacaagttaatgctcagatgcaagcatgggtatcttctggtgggtcagaaatggtctcccatactttaactcgacatcaagagatccttcaagatctgacacaggagttttatcgacaccgctccagtcttagagcaaaacaagagcatgcttcacttcttgaggactttagagaatttgatcggactagattagatttagaagatggatatgggtctgaacaagccctgatcaaggaacatatgggaatcaaccgcaatacagctcagatggacggtgtcatttcacaagctcaggcaacactcggtacgcttgtgtttcaacgttcaacttttggaggcatcaactcaaagcttagcaatgtcgccagccgtctacctacggtgaacactattctggcagcgataaagaggaaaaagtcgatggatacaatcattctttcactcgttgcggctgtatgcacatttctcatattcatttactggataaccaagtagaatttgcccatttctttcgtttcatctttatgttgggccacgtctggttttcccatgatgtcaatttgttctgcaattatcggtgttctagtaaagaatctaaagatcaaaaacataaatattgtgtacagaaaatttcatccctgtctttgcagtctagacgagcttgttaaatgttgagtt

SEQ ID NO: 98051 - protein, 223 aa, Arabidopsis thaliana; identical to SEQ ID NO: 86087
  peptide (1)..(223): Ceres Seq. ID no. 13579389
  misc_feature (51)..(201): Pfam Name: Vesicle transport v-SNARE protein Pfam Description: Vesicle transport v-SNARE protein
  misc_feature (1)..(223): Homolog of NCBI NO: 18394296 NR Description: cis-Golgi SNARE protein, putative [Arabidopsis >gi|27805476|sp|Q9LMP7|GS11_ARATH Golgi SNARE 11 protein
  misc_feature (38)..(223): Homolog of NCBI NO: 6850926 NR Description: hypothetical protein [Cicer arietinum]
  misc_feature (1)..(223): Homolog of NCBI NO: 15225431 NR Description: cis-Golgi SNARE protein, putative [Arabidopsis >gi|11132048|sp|O22151|GS12_ARATH Golgi SNARE 12 protein
  misc_feature (51)..(219): Homolog of NCBI NO: 4758456 NR Description: golgi SNAP receptor complex member 1; Golgi SNARE kDa [Homo sapiens] >gi|12643659|sp|O95249|GS28_HUMAN 28 kDa Golgi
  misc_feature (51)..(219): Homolog of NCBI NO: 11132038 NR Description: 28 kDa Golgi SNARE protein (Golgi SNAP receptor
  misc_feature (51)..(219): Homolog of NCBI NO: 16758358 NR Description: golgi SNAP receptor complex member 1; cis-Golgi (p28) [Rattus norvegicus] >gi|11131963|sp|Q62931|GS28_RAT 28 kDa
  misc_feature (51)..(219): Homolog of NCBI NO: 30388705 NR Description: Gosr1 protein [Mus musculus]
  misc_feature (51)..(219): Homolog of NCBI NO: 3335132 NR Description: GOS28/P28 protein [Homo sapiens]
  misc_feature (38)..(219): Homolog of NCBI NO: 28280046 NR Description: Similar to golgi SNAP receptor complex member 1
  misc_feature (6)..(221): Homolog of NCBI NO: 39581354 NR Description: Hypothetical protein CBG15298 [Caenorhabditis

SEQ ID NO: 98052 - protein, 199 aa, Arabidopsis thaliana; identical to SEQ ID NO: 86088
  peptide (1)..(199): Ceres Seq. ID no. 13579390
  misc_feature (27)..(177): Pfam Name: Vesicle transport v-SNARE protein Pfam Description: Vesicle transport v-SNARE protein
  misc_feature (1)..(199): Homolog of NCBI NO: 18394296 NR Description: cis-Golgi SNARE protein, putative [Arabidopsis >gi|27805476|sp|Q9LMP7|GS11_ARATH Golgi SNARE 11 protein
  misc_feature (14)..(199): Homolog of NCBI NO: 6850926 NR Description: hypothetical protein [Cicer arietinum]
  misc_feature (1)..(199): Homolog of NCBI NO: 15225431 NR Description: cis-Golgi SNARE protein, putative [Arabidopsis >gi|11132048|sp|O22151|GS12_ARATH Golgi SNARE 12 protein
  misc_feature (27)..(195): Homolog of NCBI NO: 4758456 NR Description: golgi SNAP receptor complex member 1; Golgi SNARE kDa [Homo sapiens] >gi|12643659|sp|O95249|GS28_HUMAN 28 kDa Golgi
  misc_feature (27)..(195): Homolog of NCBI NO: 11132038 NR Description: 28 kDa Golgi SNARE protein (Golgi SNAP receptor
  misc_feature (27)..(195): Homolog of NCBI NO: 16758358 NR Description: golgi SNAP receptor complex member 1; cis-Golgi (p28) [Rattus norvegicus] >gi|11131963|sp|Q62931|GS28_RAT 28 kDa
  misc_feature (27)..(195): Homolog of NCBI NO: 30388705 NR Description: Gosr1 protein [Mus musculus]
  misc_feature (27)..(195): Homolog of NCBI NO: 3335132 NR Description: GOS28/P28 protein [Homo sapiens]
  misc_feature (14)..(195): Homolog of NCBI NO: 28280046 NR Description: Similar to golgi SNAP receptor complex member 1
  misc_feature (1)..(197): Homolog of NCBI NO: 39581354 NR Description: Hypothetical protein CBG15298 [Caenorhabditis

SEQ ID NO: 98053 - protein, 159 aa, Arabidopsis thaliana; identical to SEQ ID NO: 86089
  peptide (1)..(159): Ceres Seq. ID no. 13579391
  misc_feature (1)..(137): Pfam Name: Vesicle transport v-SNARE protein Pfam Description: Vesicle transport v-SNARE protein
  misc_feature (1)..(159): Homolog of NCBI NO: 18394296 NR Description: cis-Golgi SNARE protein, putative [Arabidopsis >gi|27805476|sp|Q9LMP7|GS11_ARATH Golgi SNARE 11 protein
  misc_feature (1)..(159): Homolog of NCBI NO: 6850926 NR Description: hypothetical protein [Cicer arietinum]
  misc_feature (1)..(159): Homolog of NCBI NO: 15225431 NR Description: cis-Golgi SNARE protein, putative [Arabidopsis >gi|11132048|sp|O22151|GS12_ARATH Golgi SNARE 12 protein
  misc_feature (1)..(155): Homolog of NCBI NO: 4758456 NR Description: golgi SNAP receptor complex member 1; Golgi SNARE kDa [Homo sapiens] >gi|12643659|sp|O95249|GS28_HUMAN 28 kDa Golgi
  misc_feature (1)..(155): Homolog of NCBI NO: 11132038 NR Description: 28 kDa Golgi SNARE protein (Golgi SNAP receptor
  misc_feature (1)..(155): Homolog of NCBI NO: 16758358 NR Description: golgi SNAP receptor complex member 1; cis-Golgi (p28) [Rattus norvegicus] >gi|11131963|sp|Q62931|GS28_RAT 28 kDa
  misc_feature (1)..(155): Homolog of NCBI NO: 30388705 NR Description: Gosr1 protein [Mus musculus]
  misc_feature (1)..(155): Homolog of NCBI NO: 3335132 NR Description: GOS28/P28 protein [Homo sapiens]
  misc_feature (1)..(155): Homolog of NCBI NO: 28280046 NR Description: Similar to golgi SNAP receptor complex member 1
  misc_feature (1)..(157): Homolog of NCBI NO: 39581354 NR Description: Hypothetical protein CBG15298 [Caenorhabditis

SEQ ID NO: 98054 - DNA, 1613 bp, Arabidopsis thaliana
  misc_feature (1)..(1613): Ceres Seq. ID no. 13579395
  misc_feature: MA Experiment ID: 108488 Result: Down-regulated in Transcription
  misc_feature: MA Experiment ID: 20000087 Result: Up-regulated in Transcription
  misc_feature: MA Experiment 20000087 PARAMETER Experiment Name: At_100uM_ABA_Mutants_cDNA_P Parameter: Plant Line Value: WS
  misc_feature: MA Experiment 20000087 PARAMETER Experiment Name: At_100uM_ABA_Mutants_cDNA_P Parameter: Timepoint (hr) Value: 6
  misc_feature: MA Experiment 20000087 PARAMETER Experiment Name: At_100uM_ABA_Mutants_cDNA_P Parameter: Tissue Value: Aerial
  misc_feature: MA Experiment 20000087 PARAMETER Experiment Name: At_100uM_ABA_Mutants_cDNA_P Parameter: Treatment Value: 100uM ABA vs. No Treatment
  misc_feature: MA Experiment ID: 20000112 Result: Up-regulated in Transcription
  misc_feature: MA Experiment 20000112 PARAMETER Experiment Name: At_42deg_Heat_cDNA_P Parameter: Temperature (deg C) Value: 42 vs. 22
  misc_feature: MA Experiment 20000112 PARAMETER Experiment Name: At_42deg_Heat_cDNA_P Parameter: Timepoint (hr) Value: 2
  misc_feature: MA Experiment 20000112 PARAMETER Experiment Name: At_42deg_Heat_cDNA_P Parameter: Tissue Value: Aerial
  misc_feature: MA Experiment ID: 20000113 Result: Up-regulated in Transcription
  misc_feature: MA Experiment 20000113 PARAMETER Experiment Name: At_42deg_Heat_cDNA_P Parameter: Temperature (deg C) Value: 42 vs. 22
  misc_feature: MA Experiment 20000113 PARAMETER Experiment Name: At_42deg_Heat_cDNA_P Parameter: Timepoint (hr) Value: 8
  misc_feature: MA Experiment 20000113 PARAMETER Experiment Name: At_42deg_Heat_cDNA_P Parameter: Tissue Value: Aerial
  misc_feature: MA Experiment ID: 20000179 Result: Down-regulated in Transcription
  misc_feature: MA Experiment 20000179 PARAMETER Experiment Name: At_Germinating_Seeds_P Parameter: Age (hr) Value: 6 vs. 0
  misc_feature: MA Experiment 20000179 PARAMETER Experiment Name: At_Germinating_Seeds_P Parameter: Tissue Value: Germinating Seeds
  misc_feature: MA Experiment ID: 20001557 Result: Up-regulated in Transcription
  misc_feature: MA Experiment 20001557 PARAMETER Experiment Name: At_Drought_Soil_Dry_P Parameter: Age (day) Value: 27
  misc_feature: MA Experiment 20001557 PARAMETER Experiment Name: At_Drought_Soil_Dry_P Parameter: Organism Value: A. thaliana
  misc_feature: MA Experiment 20001557 PARAMETER Experiment Name: At_Drought_Soil_Dry_P Parameter: Plant Line Value: WS
  misc_feature: MA Experiment 20001557 PARAMETER Experiment Name: At_Drought_Soil_Dry_P Parameter: Post Timepoint (hr) Value: 3
  misc_feature: MA Experiment 20001557 PARAMETER Experiment Name: At_Drought_Soil_Dry_P Parameter: Post-Treatment Value: Re-Water vs. No Drought
  misc_feature: MA Experiment 20001557 PARAMETER Experiment Name: At_Drought_Soil_Dry_P Parameter: Timepoint (day) Value: 13
  misc_feature: MA Experiment 20001557 PARAMETER Experiment Name: At_Drought_Soil_Dry_P Parameter: Treatment Value: Drought vs. No Drought
  misc_feature: MA Experiment ID: 20001558 Result: Up-regulated in Transcription
  misc_feature: MA Experiment 20001558 PARAMETER Experiment Name: At_Drought_Soil_Dry_P Parameter: Age (day) Value: 27
  misc_feature: MA Experiment 20001558 PARAMETER Experiment Name: At_Drought_Soil_Dry_P Parameter: Organism Value: A. thaliana
  misc_feature: MA Experiment 20001558 PARAMETER Experiment Name: At_Drought_Soil_Dry_P Parameter: Plant Line Value: WS
  misc_feature: MA Experiment 20001558 PARAMETER Experiment Name: At_Drought_Soil_Dry_P Parameter: Post Timepoint (hr) Value: 6
  misc_feature: MA Experiment 20001558 PARAMETER Experiment Name: At_Drought_Soil_Dry_P Parameter: Post-Treatment Value: Re-Water vs. No Drought
  misc_feature: MA Experiment 20001558 PARAMETER Experiment Name: At_Drought_Soil_Dry_P Parameter: Timepoint (day) Value: 13
  misc_feature: MA Experiment 20001558 PARAMETER Experiment Name: At_Drought_Soil_Dry_P Parameter: Treatment Value: Drought vs. No Drought
  misc_feature: MA Experiment ID: 20001911 Result: Up-regulated in Transcription
  misc_feature: MA Experiment 20001911 PARAMETER Experiment Name: At_Drought_Reproduction_P Parameter: Age (day) Value: 40
  misc_feature: MA Experiment 20001911 PARAMETER Experiment Name: At_Drought_Reproduction_P Parameter: Organism Value: A. thaliana
  misc_feature: MA Experiment 20001911 PARAMETER Experiment Name: At_Drought_Reproduction_P Parameter: Plant Line Value: WS
  misc_feature: MA Experiment 20001911 PARAMETER Experiment Name: At_Drought_Reproduction_P Parameter: Timepoint (day) Value: 10
  misc_feature: MA Experiment 20001911 PARAMETER Experiment Name: At_Drought_Reproduction_P Parameter: Tissue Value: Flowers
  misc_feature: MA Experiment 20001911 PARAMETER Experiment Name: At_Drought_Reproduction_P Parameter: Treatment Value: Drought vs. No Drought
aaaaacaaaaaaacaaagaggatttaagggttacgagtcgcctccccaaaacccttgtccctagtctcttctgcttcttcttcttcaaaatctctctcttcaccaaatcctcagaagatgagcaacgacaaggatagcttcaacgtctccgatcttactgctgctcttaaggacgaggatcgagctggccttgtcaatgctctaaagaacaagctgcagaatctggctggtcagcgttctgatgtgctcgagaatctgactcccaatgtgagaaagcgcgttgatgccttgagggatatacagagccaacatgatgaactagaggcaaaattccgtgaggagagagctattcttgaagccaagtatcaaacgctgtatcagcctttgtatgtcaagcgttatgagattgtgaatggcactactgaagttgaactggctccagaggatgataccaaggtggaccaaggagaggagaaaactgcagaagagaaaggagttccaagtttctggctgacagctctgaaaaataacgatgttatttccgaggaggtcacagagcgtgatgaaggggctctcaaatatcttaaagatattaagtggtgcaagattgaagagcctaaaggattcaaacttgagtttttctttgacacgaatccgtattttaagaacactgtcttgacaaagtcttatcatatgattgatgaagatgagccactgcttgagaaggctatggggacagaaattgattggtatcctggaaagtgtctaactcagaagattctcaagaagaagcctaagaaaggttcaaagaatactaaaccaatcaccaaactcgaagattgtgaaagcttcttcaacttctttagtcctccagaagttccggatgaagatgaagatatcgacgaggaaagagctgaggatcttcaaaacctgatggaacaagattatgacatcggatctactattcgggaaaagattattcctcgtgctgtctcatggtttactggtgaggctatggaagcagaggattttgaaatagatgacgatgaggaagatgacattgatgaggatgaagatgaggaagacgaagaggatgaggaggacgatgatgatgaggatgaagaagaaagcaagaccaaaaagaagccatcaatcggcaacaagaagggagggagatctcagatagttggtgaaggtaaacaagatgagaggccacccgaatgcaagcaacagtaatcttttactacgctctaccagacataaaaggattgcgtgaaaatataattcaggtcattctctgttcatcaagaatgaggattgagaaaaggttttgggatttttaaaagtgaaattcatcttgtaggagtttcgttcgtttttctattggtgtgtttattttctctaaagcactttaataatataccttggtatttaatttatgaatcaagcatcatcatccctagtctctgcattcactacttcatcccctacctaaactttgtcgacgaaagagattttaataaccatttagatagtaatgggtagtgggaatgatcattattcttttgttcaccgtcctttgattttcaatggtaaccattttgttgtgtaag

SEQ ID NO: 98055 - protein, 372 aa, Arabidopsis thaliana
  peptide (1)..(372): Ceres Seq. ID no. 13579396
  misc_feature (52)..(301): Pfam Name: Nucleosome assembly protein (NAP) Pfam Description: Nucleosome assembly protein (NAP)
  misc_feature (1)..(372): Homolog of NCBI NO: 549975 NR Description: nucleosome assembly protein I-like protein;
  misc_feature (1)..(372): Homolog of NCBI NO: 15236115 NR Description: nucleosome assembly protein I-related protein
  misc_feature (1)..(372): Homolog of NCBI NO: 18423918 NR Description: nucleosome assembly protein [Arabidopsis >gi|13877573|gb|AAK43864.1|AF370487_1 nucleosome assembly protein thaliana] >gi|17978721|gb|AAL47354.1| nucleosome assembly protein
  misc_feature (1)..(372): Homolog of NCBI NO: 8777435 NR Description: nucleosome assembly protein [Arabidopsis thaliana]
  misc_feature (1)..(372): Homolog of NCBI NO: 15224782 NR Description: nucleosome assembly protein -related [Arabidopsis
  misc_feature (1)..(372): Homolog of NCBI NO: 7488816 NR Description: nucleosome assembly protein 1 - garden pea
  misc_feature (1)..(372): Homolog of NCBI NO: 2129840 NR Description: nucleosome assembly protein 1 - soybean
  misc_feature (1)..(372): Homolog of NCBI NO: 29569109 NR Description: nucleosome/chromatin assembly factor group A [Zea
  misc_feature (1)..(372): Homolog of NCBI NO: 21898560 NR Description: nucleosome/chromatin assembly factor group A [Zea
  misc_feature (1)..(320): Homolog of NCBI NO: 15231361 NR Description: nucleosome assembly protein -related [Arabidopsis
MSNDKDSFNVSDLTAALKDEDRAGLVNALKNKLQNLAGQRSDVLENLTPNVRKRVDALRDIQSQHDELEAKFREERAILEAKYQTLYQPLYVKRYEIVNGTTEVELAPEDDTKVDQGEEKTAEEKGVPSFWLTALKNNDVISEEVTERDEGALKYLKDIKWCKIEEPKGFKLEFFFDTNPYFKNTVLTKSYHMIDEDEPLLEKAMGTEIDWYPGKCLTQKILKKKPKKGSKNTKPITKLEDCESFFNFFSPPEVPDEDEDIDEERAEDLQNLMEQDYDIGSTIREKIIPRAVSWFTGEAMEAEDFEIDDDEEDDIDEDEDEEDEEDEEDDDDEDEEESKTKKKPSIGNKKGGRSQIVGEGKQDERPPECKQQ

SEQ ID NO: 98056 - DNA, 1812 bp, Arabidopsis thaliana
  misc_feature (1)..(1812): Ceres Seq. ID no. 13579397
  misc_feature: MA Experiment ID: 20000315 Result: Down-regulated in Transcription
  misc_feature: MA Experiment 20000315 PARAMETER Experiment Name: At_14day_Shoots-Roots_Sub_P Parameter: Age (day) Value: 14
  misc_feature: MA Experiment 20000315 PARAMETER Experiment Name: At_14day_Shoots-Roots_Sub_P Parameter: Organism Value: A. thaliana
  misc_feature: MA Experiment 20000315 PARAMETER Experiment Name: At_14day_Shoots-Roots_Sub_P Parameter: Plant Line Value: WS
  misc_feature: MA Experiment 20000315 PARAMETER Experiment Name: At_14day_Shoots-Roots_Sub_P Parameter: Tissue Value: Shoots vs. Whole Plant
  misc_feature: MA Experiment ID: 20000328 Result: Up-regulated in Transcription
  misc_feature: MA Experiment 20000328 PARAMETER Experiment Name: At_42deg_Heat_Sub_P Parameter: Age (day) Value: 14
  misc_feature: MA Experiment 20000328 PARAMETER Experiment Name: At_42deg_Heat_Sub_P Parameter: Organism Value: A. thaliana
  misc_feature: MA Experiment 20000328 PARAMETER Experiment Name: At_42deg_Heat_Sub_P Parameter: Plant Line Value: WS
  misc_feature: MA Experiment 20000328 PARAMETER Experiment Name: At_42deg_Heat_Sub_P Parameter: Temperature (deg C) Value: 42 vs. 22
  misc_feature: MA Experiment 20000328 PARAMETER Experiment Name: At_42deg_Heat_Sub_P Parameter: Timepoint (hr) Value: 6
  misc_feature: MA Experiment 20000328 PARAMETER Experiment Name: At_42deg_Heat_Sub_P Parameter: Tissue Value: Aerial
  misc_feature: MA Experiment ID: 20000355 Result: Down-regulated in Transcription
  misc_feature: MA Experiment 20000355 PARAMETER Experiment Name: At_Siliques_Sub_P Parameter: Age (day) Value: 21
  misc_feature: MA Experiment 20000355 PARAMETER Experiment Name: At_Siliques_Sub_P Parameter: Organism Value: A. thaliana
  misc_feature: MA Experiment 20000355 PARAMETER Experiment Name: At_Siliques_Sub_P Parameter: Plant Line Value: WS
  misc_feature: MA Experiment 20000355 PARAMETER Experiment Name: At_Siliques_Sub_P Parameter: Tissue Value: Less Than 5mm Siliques vs. Whole Plant
  misc_feature: MA Experiment ID: 20000440 Result: Down-regulated in Transcription
  misc_feature: MA Experiment 20000440 PARAMETER Experiment Name: At_Closed-Flower__Sub_P Parameter: Tissue Value: Closed Flower vs. Whole Plant
ggttttggcacattaccctctttcctgttaaagttgtctcgtctccttctcgtctccttcctcaagcatattctctgcgcttaaagtactttgatggcattgggacacttgtgcagcatccactgtttccttaaaatagggaaacaagaagagcttcttgtcctagatattggtttgcctattcccagtttcttcctcattaactttattggtagcagagcctcatccatctggtgaacttgtgaagcttcctctgtgattcttttggcgattggttagaaatatggtttcttctcagtgttctgttgcaaacaaaaaccagactgggaagccgtttcagaaacatctatctttatccatcagccctccaaaatctgtcttgggtgataaccttgagcttcaattctctgatgtctttggaccaatgcctgaagctaactctgaagaggcctgtgatgttgcttacgacgagcctgctgttgtctacagtcgatcccactcattggttggcccgtctttggttgttagccattctttgaagatgaacaagctcactttacgagaaactgaggactcagttgacttggtggagtgtgttgaaggtgaatcgataaaagagaacgatgaattctctggtaatgatgacactgacagtgagaaatctccagaggaggtctcaggtgtagtaggcattgaggactttgaggtattgaaggttgtgggacaaggtgcatttggaaaagtgtaccaggtgaggaaaaaagacacgtctgagatatacgcgatgaaggtcatgagaaaagataaaattgttgagaagaatcatgctgaatacatgaaagccgagcgcgatattctaaccaaaatcgatcatcctttcattgtgcaacttaaatactcttttcagaccaaatacagattgtatcttgttcttgactttataaacggaggtcatcttttcttccagctctatcaccaagggcttttcagggaggacttggctcgtgtgtacactgcagaaatcgtctctgcagtttcccatctccatgagaaaggcataatgcatagagatcttaaacctgaaaacatactcatggacgtagatggccatgtgatgttaactgattttggtttagcaaaagaatttgaagaaaacacaagatcaaactccatgtgtgggactacggagtatatggcccctgagattgttcgtggaaaaggacatgataaggctgccgactggtggagtgtaggaatccttctgtatgagatgctcactggaaagccgccgtttctcgggagcaaaggaaagatacagcagaaaatcgttaaggacaagatcaagcttccacagtttctgtctaatgaagctcatgccttgctgaaagggctgctgcaaaaagagccagaaaggagactgggaagtggaccgagcggagcagaggagataaaaaaacacaaatggttcaaggcgataaactggaagaagctggaggctagagaagtacaaccaagtttcaagccggcggtttcgggaagacaatgcatagctaattttgacaagtgttggactgacatgtctgttttggattctccagcaagtagtcccaactctgatgctaaggcgaacccttttacaaacttcacatacgtcaggcctcctcattcattccttcatcggaccacatccaacttgtagatgaactataatatgttacccccgcttctgtttttgtaatccgaaacatatgaacatgcacaaaatcaacggttgtttgaagaaacctatttctcgatttaatatattatact

SEQ ID NO: 98057 - protein, 471 aa, Arabidopsis thaliana; identical to SEQ ID NO: 80387
  peptide (1)..(471): Ceres Seq. ID no. 13579398
  misc_feature (140)..(395): Pfam Name: Protein kinase domain Pfam Description: Protein kinase domain
  misc_feature (1)..(471): Homolog of NCBI NO: 15231959 NR Description: ribosomal-protein S6 kinase (ATPK19) -related
  misc_feature (1)..(471): Homolog of NCBI NO: 2129541 NR Description: protein kinase ATPK19 (EC 2.7.1.-) - Arabidopsis
  misc_feature (1)..(471): Homolog of NCBI NO: 15231960 NR Description: ribosomal-protein S6 kinase (ATPK6) -related
  misc_feature (1)..(471): Homolog of NCBI NO: 21537155 NR Description: putative ribosomal-protein S6 kinase ATPK6
  misc_feature (1)..(463): Homolog of NCBI NO: 1362152 NR Description: ribosomal protein S6 kinase homolog (clone - oat >gi|871986|emb|CAA56313.1| putative pp70 ribosomal protein
  misc_feature (1)..(459): Homolog of NCBI NO: 37575481 NR Description: ribosomal protein S6 kinase [Zea mays]
  misc_feature (26)..(459): Homolog of NCBI NO: 7649389 NR Description: S6 ribosomal protein kinase [Asparagus
  misc_feature (168)..(459): Homolog of NCBI NO: 33146662 NR Description: putative S6 ribosomal protein kinase [Oryza
  misc_feature (106)..(457): Homolog of NCBI NO: 464395 NR Description: Protein kinase 2 >gi|102261|pir||A38578 protein
  misc_feature (90)..(459): Homolog of NCBI NO: 28422368 NR Description: Unknown (protein for MGC:55713) [Danio rerio]

SEQ ID NO: 98058 - protein, 424 aa, Arabidopsis thaliana; identical to SEQ ID NO: 80388
  peptide (1)..(424): Ceres Seq. ID no. 13579399
  misc_feature (93)..(348): Pfam Name: Protein kinase domain Pfam Description: Protein kinase domain
  misc_feature (1)..(424): Homolog of NCBI NO: 15231959 NR Description: ribosomal-protein S6 kinase (ATPK19) -related
  misc_feature (1)..(424): Homolog of NCBI NO: 2129541 NR Description: protein kinase ATPK19 (EC 2.7.1.-) - Arabidopsis
  misc_feature (1)..(424): Homolog of NCBI NO: 15231960 NR Description: ribosomal-protein S6 kinase (ATPK6) -related
  misc_feature (1)..(424): Homolog of NCBI NO: 21537155 NR Description: putative ribosomal-protein S6 kinase ATPK6
  misc_feature (1)..(416): Homolog of NCBI NO: 1362152 NR Description: ribosomal protein S6 kinase homolog (clone - oat >gi|871986|emb|CAA56313.1| putative pp70 ribosomal protein
  misc_feature (1)..(412): Homolog of NCBI NO: 37575481 NR Description: ribosomal protein S6 kinase [Zea mays]
  misc_feature (1)..(412): Homolog of NCBI NO: 7649389 NR Description: S6 ribosomal protein kinase [Asparagus
  misc_feature (121)..(412): Homolog of NCBI NO: 33146662 NR Description: putative S6 ribosomal protein kinase [Oryza
  misc_feature (59)..(410): Homolog of NCBI NO: 464395 NR Description: Protein kinase 2 >gi|102261|pir||A38578 protein
  misc_feature (43)..(412): Homolog of NCBI NO: 28422368 NR Description: Unknown (protein for MGC:55713) [Danio rerio]

SEQ ID NO: 98059 - protein, 385 aa, Arabidopsis thaliana; identical to SEQ ID NO: 80389
  peptide (1)..(385): Ceres Seq. ID no. 13579400
  misc_feature (54)..(309): Pfam Name: Protein kinase domain Pfam Description: Protein kinase domain
  misc_feature (1)..(385): Homolog of NCBI NO: 15231959 NR Description: ribosomal-protein S6 kinase (ATPK19) -related
  misc_feature (1)..(385): Homolog of NCBI NO: 2129541 NR Description: protein kinase ATPK19 (EC 2.7.1.-) - Arabidopsis
  misc_feature (1)..(385): Homolog of NCBI NO: 15231960 NR Description: ribosomal-protein S6 kinase (ATPK6) -related
  misc_feature (1)..(385): Homolog of NCBI NO: 21537155 NR Description: putative ribosomal-protein S6 kinase ATPK6
  misc_feature (1)..(377): Homolog of NCBI NO: 1362152 NR Description: ribosomal protein S6 kinase homolog (clone - oat >gi|871986|emb|CAA56313.1| putative pp70 ribosomal protein
  misc_feature (1)..(373): Homolog of NCBI NO: 37575481 NR Description: ribosomal protein S6 kinase [Zea mays]
  misc_feature (1)..(373): Homolog of NCBI NO: 7649389 NR Description: S6 ribosomal protein kinase [Asparagus
  misc_feature (82)..(373): Homolog of NCBI NO: 33146662 NR Description: putative S6 ribosomal protein kinase [Oryza
  misc_feature (20)..(371): Homolog of NCBI NO: 464395 NR Description: Protein kinase 2 >gi|102261|pir||A38578 protein
  misc_feature (4)..(373): Homolog of NCBI NO: 28422368 NR Description: Unknown (protein for MGC:55713) [Danio rerio]

SEQ ID NO: 98060 - DNA, 1236 bp, Arabidopsis thaliana
  misc_feature (1)..(1236): Ceres Seq. ID no. 13579413
  misc_feature: MA Experiment ID: 108462 Result: Up-regulated in Transcription
  misc_feature: MA Experiment 108462 PARAMETER Experiment Name: At_Germinating_Seeds_cDNA_P Parameter: Age (day) Value: 2 vs. 0
  misc_feature: MA Experiment 108462 PARAMETER Experiment Name: At_Germinating_Seeds_cDNA_P Parameter: Tissue Value: Germinating Seeds
  misc_feature: MA Experiment ID: 108463 Result: Up-regulated in Transcription
  misc_feature: MA Experiment 108463 PARAMETER Experiment Name: At_Germinating_Seeds_cDNA_P Parameter: Age (day) Value: 3 vs. 0
  misc_feature: MA Experiment 108463 PARAMETER Experiment Name: At_Germinating_Seeds_cDNA_P Parameter: Tissue Value: Germinating Seeds
  misc_feature: MA Experiment ID: 108464 Result: Up-regulated in Transcription
  misc_feature: MA Experiment 108464 PARAMETER Experiment Name: At_Germinating_Seeds_cDNA_P Parameter: Age (day) Value: 4 vs. 0
  misc_feature: MA Experiment 108464 PARAMETER Experiment Name: At_Germinating_Seeds_cDNA_P Parameter: Tissue Value: Germinating Seeds
  misc_feature: MA Experiment ID: 108488 Result: Down-regulated in Transcription
  misc_feature: MA Experiment ID: 108572 Result: Up-regulated in Transcription
  misc_feature: MA Experiment 108572 PARAMETER Experiment Name: At_Drought_cDNA_P Parameter: Timepoint (hr) Value: 1
  misc_feature: MA Experiment 108572 PARAMETER Experiment Name: At_Drought_cDNA_P Parameter: Tissue Value: Aerial
  misc_feature: MA Experiment 108572 PARAMETER Experiment Name: At_Drought_cDNA_P Parameter: Treatment Value: Drought vs. No Drought
  misc_feature: MA Experiment ID: 108574 Result: Up-regulated in Transcription
  misc_feature: MA Experiment 108574 PARAMETER Experiment Name: At_Wounding__cDNA_P Parameter: Timepoint (hr) Value: 1
  misc_feature: MA Experiment 108574 PARAMETER Experiment Name: At_Wounding__cDNA_P Parameter: Tissue Value: Aerial
  misc_feature: MA Experiment 108574 PARAMETER Experiment Name: At_Wounding__cDNA_P Parameter: Treatment Value: Wounding vs. No Wounding
  misc_feature: MA Experiment ID: 108594 Result: Up-regulated in Transcription
  misc_feature: MA Experiment 108594 PARAMETER Experiment Name: At_Ler-rhl_Root_cDNA_P Parameter: Plant Line Value: null
  misc_feature: MA Experiment ID: 108595 Result: Up-regulated in Transcription
  misc_feature: MA Experiment 108595 PARAMETER Experiment Name: At_Ler-pi_Ovule_cDNA_P Parameter: Plant Line Value: null
  misc_feature: MA Experiment ID: 108605 Result: Up-regulated in Transcription
  misc_feature: MA Experiment 108605 PARAMETER Experiment Name: At_100uM_ABA_cDNA_P Parameter: Timepoint (hr) Value: 6
  misc_feature: MA Experiment 108605 PARAMETER Experiment Name: At_100uM_ABA_cDNA_P Parameter: Tissue Value: Aerial
  misc_feature: MA Experiment 108605 PARAMETER Experiment Name: At_100uM_ABA_cDNA_P Parameter: Treatment Value: 100uM ABA vs. No Treatment
  misc_feature: MA Experiment ID: 108607 Result: Up-regulated in Transcription
  misc_feature: MA Experiment 108607 PARAMETER Experiment Name: At_100uM_ABA_cDNA_P Parameter: Timepoint (hr) Value: 4
  misc_feature: MA Experiment 108607 PARAMETER Experiment Name: At_100uM_ABA_cDNA_P Parameter: Tissue Value: Aerial
  misc_feature: MA Experiment 108607 PARAMETER Experiment Name: At_100uM_ABA_cDNA_P Parameter: Treatment Value: 100uM ABA vs. No Treatment
  misc_feature: MA Experiment ID: 108608 Result: Up-regulated in Transcription
  misc_feature: MA Experiment 108608 PARAMETER Experiment Name: At_100uM_ABA_cDNA_P Parameter: Timepoint (hr) Value: 1
  misc_feature: MA Experiment 108608 PARAMETER Experiment Name: At_100uM_ABA_cDNA_P Parameter: Tissue Value: Aerial
  misc_feature: MA Experiment 108608 PARAMETER Experiment Name: At_100uM_ABA_cDNA_P Parameter: Treatment Value: 100uM ABA vs. No Treatment
  misc_feature: MA Experiment ID: 108609 Result: Up-regulated in Transcription
  misc_feature: MA Experiment 108609 PARAMETER Experiment Name: At_100uM_ABA_cDNA_P Parameter: Timepoint (hr) Value: 24
  misc_feature: MA Experiment 108609 PARAMETER Experiment Name: At_100uM_ABA_cDNA_P Parameter: Tissue Value: Aerial
  misc_feature: MA Experiment 108609 PARAMETER Experiment Name: At_100uM_ABA_cDNA_P Parameter: Treatment Value: 100uM ABA vs. No Treatment
  misc_feature: MA Experiment ID: 108667 Result: Up-regulated in Transcription
  misc_feature: MA Experiment 108667 PARAMETER Experiment Name: At_2mM_SA_cDNA_P Parameter: Plant Line Value: WS
  misc_feature: MA Experiment 108667 PARAMETER Experiment Name: At_2mM_SA_cDNA_P Parameter: Timepoint (hr) Value: 1
  misc_feature: MA Experiment 108667 PARAMETER Experiment Name: At_2mM_SA_cDNA_P Parameter: Treatment Value: 2mM SA vs. No Treatment
  misc_feature: MA Experiment ID: 20000070 Result: Up-regulated in Transcription
  misc_feature: MA Experiment 20000070 PARAMETER Experiment Name: At_100uM_ABA_Mutants_cDNA_P Parameter: Plant Line Value: CS24
  misc_feature: MA Experiment 20000070 PARAMETER Experiment Name: At_100uM_ABA_Mutants_cDNA_P Parameter: Timepoint (hr) Value: 6
  misc_feature: MA Experiment 20000070 PARAMETER Experiment Name: At_100uM_ABA_Mutants_cDNA_P Parameter: Tissue Value: Aerial
  misc_feature: MA Experiment 20000070 PARAMETER Experiment Name: At_100uM_ABA_Mutants_cDNA_P Parameter: Treatment Value: 100uM ABA vs. No Treatment
  misc_feature: MA Experiment ID: 20000166 Result: Up-regulated in Transcription
  misc_feature: MA Experiment 20000166 PARAMETER Experiment Name: At_100uM_ABA_P Parameter: Age (day) Value: 14
  misc_feature: MA Experiment 20000166 PARAMETER Experiment Name: At_100uM_ABA_P Parameter: Organism Value: A. thaliana
  misc_feature: MA Experiment 20000166 PARAMETER Experiment Name: At_100uM_ABA_P Parameter: Plant Line Value: WS
  misc_feature: MA Experiment 20000166 PARAMETER Experiment Name: At_100uM_ABA_P Parameter: Timepoint (hr) Value: 1
  misc_feature: MA Experiment 20000166 PARAMETER Experiment Name: At_100uM_ABA_P Parameter: Tissue Value: Aerial
  misc_feature: MA Experiment 20000166 PARAMETER Experiment Name: At_100uM_ABA_P Parameter: Treatment Value: 100uM ABA vs. No Treatment
  misc_feature: MA Experiment ID: 20000227 Result: Down-regulated in Transcription
  misc_feature: MA Experiment 20000227 PARAMETER Experiment Name: At_Root-Tips-vs-Tops_P Parameter: Tissue Value: Root Tips vs. Root Tops
  misc_feature: MA Experiment ID: 20000460 Result: Up-regulated in Transcription
  misc_feature: MA Experiment 20000460 PARAMETER Experiment Name: At_10percent_PEG_P Parameter: Age (day) Value: 12
  misc_feature: MA Experiment 20000460 PARAMETER Experiment Name: At_10percent_PEG_P Parameter: Organism Value: A. thaliana
  misc_feature: MA Experiment 20000460 PARAMETER Experiment Name: At_10percent_PEG_P Parameter: Plant Line Value: WS
  misc_feature: MA Experiment 20000460 PARAMETER Experiment Name: At_10percent_PEG_P Parameter: Timepoint (day) Value: 12
  misc_feature: MA Experiment 20000460 PARAMETER Experiment Name: At_10percent_PEG_P Parameter: Tissue Value: Whole Plant
  misc_feature: MA Experiment 20000460 PARAMETER Experiment Name: At_10percent_PEG_P Parameter: Treatment Value: 10percent PEG vs. No Treatment
  misc_feature: MA Experiment ID: 20000527 Result: Up-regulated in Transcription
  misc_feature: MA Experiment 20000527 PARAMETER Experiment Name: At_10percent_PEG_P Parameter: Age (day) Value: 20
  misc_feature: MA Experiment 20000527 PARAMETER Experiment Name: At_10percent_PEG_P Parameter: Organism Value: A. thaliana
  misc_feature: MA Experiment 20000527 PARAMETER Experiment Name: At_10percent_PEG_P Parameter: Plant Line Value: WS
  misc_feature: MA Experiment 20000527 PARAMETER Experiment Name: At_10percent_PEG_P Parameter: Timepoint (day) Value: 20
  misc_feature: MA Experiment 20000527 PARAMETER Experiment Name: At_10percent_PEG_P Parameter: Tissue Value: Whole Plant
  misc_feature: MA Experiment 20000527 PARAMETER Experiment Name: At_10percent_PEG_P Parameter: Treatment Value: 10percent PEG vs. No Treatment
  misc_feature: MA Experiment ID: 20000573 Result: Down-regulated in Transcription
  misc_feature: MA Experiment 20000573 PARAMETER Experiment Name: At_100uM_ABA_Mutants__P Parameter: Organism Value: A. thaliana
  misc_feature: MA Experiment 20000573 PARAMETER Experiment Name: At_100uM_ABA_Mutants__P Parameter: Plant Line Value: CS22 vs. Ler wt
  misc_feature: MA Experiment 20000573 PARAMETER Experiment Name: At_100uM_ABA_Mutants__P Parameter: Timepoint (hr) Value: N/A
  misc_feature: MA Experiment 20000573 PARAMETER Experiment Name: At_100uM_ABA_Mutants__P Parameter: Tissue Value: Whole Plant
  misc_feature: MA Experiment 20000573 PARAMETER Experiment Name: At_100uM_ABA_Mutants__P Parameter: Treatment Value: None
  misc_feature: MA Experiment ID: 20000574 Result: Down-regulated in Transcription
  misc_feature: MA Experiment 20000574 PARAMETER Experiment Name: At_100uM_ABA_Mutants__P Parameter: Organism Value: A. thaliana
  misc_feature: MA Experiment 20000574 PARAMETER Experiment Name: At_100uM_ABA_Mutants__P Parameter: Plant Line Value: CS23 vs. Ler wt
  misc_feature: MA Experiment 20000574 PARAMETER Experiment Name: At_100uM_ABA_Mutants__P Parameter: Timepoint (hr) Value: N/A
  misc_feature: MA Experiment 20000574 PARAMETER Experiment Name: At_100uM_ABA_Mutants__P Parameter: Tissue Value: Whole Plant
  misc_feature: MA Experiment 20000574 PARAMETER Experiment Name: At_100uM_ABA_Mutants__P Parameter: Treatment Value: None
  misc_feature: MA Experiment ID: 20000794 Result: Down-regulated in Transcription
  misc_feature: MA Experiment 20000794 PARAMETER Experiment Name: At_Petals_P Parameter: Age (day) Value: 23-25 days
  misc_feature: MA Experiment 20000794 PARAMETER Experiment Name: At_Petals_P Parameter: Plant Line Value: WS
  misc_feature: MA Experiment 20000794 PARAMETER Experiment Name: At_Petals_P Parameter: Tissue Value: Petals vs. Whole plant
  misc_feature: MA Experiment ID: 20001247 Result: Up-regulated in Transcription
  misc_feature: MA Experiment 20001247 PARAMETER Experiment Name: At_Far-red-induction_P Parameter: Age (day) Value: 7
  misc_feature: MA Experiment 20001247 PARAMETER Experiment Name: At_Far-red-induction_P Parameter: Light Value: Far-red vs. White
  misc_feature: MA Experiment 20001247 PARAMETER Experiment Name: At_Far-red-induction_P Parameter: Organism Value: A. thaliana
  misc_feature: MA Experiment 20001247 PARAMETER Experiment Name: At_Far-red-induction_P Parameter: Plant Line Value: Columbia
  misc_feature: MA Experiment 20001247 PARAMETER Experiment Name: At_Far-red-induction_P Parameter: Timepoint (hr) Value: 1
  misc_feature: MA Experiment 20001247 PARAMETER Experiment Name: At_Far-red-induction_P Parameter: Tissue Value: Whole Plant
  misc_feature: MA Experiment ID: 20001248 Result: Up-regulated in Transcription
  misc_feature: MA Experiment 20001248 PARAMETER Experiment Name: At_Far-red-induction_P Parameter: Age (day) Value: 7
  misc_feature: MA Experiment 20001248 PARAMETER Experiment Name: At_Far-red-induction_P Parameter: Light Value: Far-red vs. White
  misc_feature: MA Experiment 20001248 PARAMETER Experiment Name: At_Far-red-induction_P Parameter: Organism Value: A. thaliana
  misc_feature: MA Experiment 20001248 PARAMETER Experiment Name: At_Far-red-induction_P Parameter: Plant Line Value: Columbia
  misc_feature: MA Experiment 20001248 PARAMETER Experiment Name: At_Far-red-induction_P Parameter: Timepoint (hr) Value: 4
  misc_feature: MA Experiment 20001248 PARAMETER Experiment Name: At_Far-red-induction_P Parameter: Tissue Value: Whole Plant
  misc_feature: MA Experiment ID: 20001450 Result: Up-regulated in Transcription
  misc_feature: MA Experiment 20001450 PARAMETER Experiment Name: At_Far-red-induction_P Parameter: Age (day) Value: 7
  misc_feature: MA Experiment 20001450 PARAMETER Experiment Name: At_Far-red-induction_P Parameter: Light Value: Far-red vs. White
  misc_feature: MA Experiment 20001450 PARAMETER Experiment Name: At_Far-red-induction_P Parameter: Organism Value: A. thaliana
  misc_feature: MA Experiment 20001450 PARAMETER Experiment Name: At_Far-red-induction_P Parameter: Plant Line Value: Columbia
  misc_feature: MA Experiment 20001450 PARAMETER Experiment Name: At_Far-red-induction_P Parameter: Timepoint (hr) Value: 8
  misc_feature: MA Experiment 20001450 PARAMETER Experiment Name: At_Far-red-induction_P Parameter: Tissue Value: Whole Plant
  misc_feature: MA Experiment ID: 20001757 Result: Down-regulated in Transcription
  misc_feature: MA Experiment 20001757 PARAMETER Experiment Name: At_50mM_NH4NO3_L-to-H_P Parameter: Timepoint (hr) Value: 6
  misc_feature: MA Experiment 20001757 PARAMETER Experiment Name: At_50mM_NH4NO3_L-to-H_P Parameter: Tissue Value: Leaf
  misc_feature: MA Experiment 20001757 PARAMETER Experiment Name: At_50mM_NH4NO3_L-to-H_P Parameter: Treatment Value: 50mM NH4NO3 vs 100mM Mannitol
  misc_feature: MA Experiment ID: 20001905 Result: Up-regulated in Transcription
  misc_feature: MA Experiment 20001905 PARAMETER Experiment Name: At_Drought_Reproduction_P Parameter: Age (day) Value: 40
  misc_feature: MA Experiment 20001905 PARAMETER Experiment Name: At_Drought_Reproduction_P Parameter: Organism Value: A. thaliana
  misc_feature: MA Experiment 20001905 PARAMETER Experiment Name: At_Drought_Reproduction_P Parameter: Plant Line Value: WS
  misc_feature: MA Experiment 20001905 PARAMETER Experiment Name: At_Drought_Reproduction_P Parameter: Timepoint (day) Value: 10
  misc_feature: MA Experiment 20001905 PARAMETER Experiment Name: At_Drought_Reproduction_P Parameter: Tissue Value: Rosettes
  misc_feature: MA Experiment 20001905 PARAMETER Experiment Name: At_Drought_Reproduction_P Parameter: Treatment Value: Drought vs. No Drought
tctcggaccaatatacaaaaccgtgtgttcttctctgtatcttattaaatcaaaaccaattttgttcttcttctttgattcttttttccttcattttttaacgtatcttgagagatcgacgatgtcgtcgaagaaatccctagttcaaagtctcttcaacatttccaaaacctactccaggatttctggtcttacccgaatgcgtccgaccaaatccggcggcattcctcccgacgccggagattctggaatccgccgcagatttctccacaagagggcatttttctcgccggagatagttcctaaaggtggtaacttgatggagaaactcagggaattgactttgtccaataataatcgtattagactcgacgagatgttaccgccaccttcgccgaagaaatcatcaccggagtttttcccggcggtcacggtggaagacgtgaagaagctcatgagagcagcggaaatggagctggtgaaatcgaagctgagagagattggcaagaactgggttccttattcggagtttgttcgggtctgcggagaatacagttcggatcctgaacaaggtaaccgggtcgcgaatatgcttgacgaagctggaaacgtcatcgttttgggaaaactcgtctgccttaaacccgaagagctaacaagcgccatggctggtctgattccgacactcgaacccagtctcgacgccgagacaagacaagagttcgaacaacttgagatcataaaatcagatatcgacaaaagagccgatgatctggttcgaaaagaattatgggccggattaggcctaataatggcccaaacagttggattttttaggctgacgttttgggaactgtcgtgggacgtgatggaacccatatgcttctacgtaacttcgacatatttcatggctggttacgccttcttcctccgaacttcaaaggaaccttcctttgaaggtttttacaaaagccggttcgagacgaagcagaaacgtttgattaaaatgcttgatttcgatatcgatcgatttaccaagctacagaagatgcatcgtccaaatttgactaaatctggtcgttgttgatcgtaattcttttcttcttctttttcctaaatcggatgctaaattaatgtatagacgactgaaattttcgtagagaataattagttttagagggataaaaaaaagtcttctcatgcgggggtaacactaaataactaaatcaattaatt

SEQ ID NO: 98061 - protein, 361 aa, Arabidopsis thaliana
  peptide (1)..(361): Ceres Seq. ID no. 13579414
  misc_feature (180)..(360): Pfam Name: Protein of unknown function, DUF607 Pfam Description: Protein of unknown function, DUF607
  misc_feature (41)..(361): Homolog of NCBI NO: 15240047 NR Description: expressed protein [Arabidopsis thaliana] contains similarity to unknown
  misc_feature (41)..(361): Homolog of NCBI NO: 14596231 NR Description: Unknown protein [Arabidopsis thaliana]
  misc_feature (49)..(350): Homolog of NCBI NO: 15224063 NR Description: expressed protein [Arabidopsis thaliana]
  misc_feature (49)..(350): Homolog of NCBI NO: 24496456 NR Description: hypothetical protein [Arabidopsis thaliana]
  misc_feature (36)..(353): Homolog of NCBI NO: 15234535 NR Description: hypothetical protein [Arabidopsis thaliana]
  misc_feature (76)..(349): Homolog of NCBI NO: 37535778 NR Description: unknown protein [Oryza sativa (japonica
  misc_feature (119)..(349): Homolog of NCBI NO: 20330769 NR Description: Hypothetical protein [Oryza sativa (japonica
  misc_feature (121)..(350): Homolog of NCBI NO: 15239011 NR Description: hypothetical protein [Arabidopsis thaliana]
  misc_feature (143)..(357): Homolog of NCBI NO: 34909244 NR Description: B1148D12.10 [Oryza sativa (japonica
  misc_feature (131)..(352): Homolog of NCBI NO: 18391039 NR Description: expressed protein [Arabidopsis thaliana]
LGPIYKTVCSSLYLIKSKPILFFFFDSFFLHFLTYLERSTMSSKKSLVQSLFNISKTYSRISGLTRMRPTKSGGIPPDAGDSGIRRRFLHKRAFFSPEIVPKGGNLMEKLRELTLSNNNRIRLDEMLPPPSPKKSSPEFFPAVTVEDVKKLMRAAEMELVKSKLREIGKNWVPYSEFVRVCGEYSSDPEQGNRVANMLDEAGNVIVLGKLVCLKPEELTSAMAGLIPTLEPSLDAETRQEFEQLEIIKSDIDKRADDLVRKELWAGLGLIMAQTVGFFRLTFWELSWDVMEPICFYVTSTYFMAGYAFFLRTSKEPSFEGFYKSRFETKQKRLIKMLDFDIDRFTKLQKMHRPNLTKSGRC

SEQ ID NO: 98062 - protein, 321 aa, Arabidopsis thaliana; identical to SEQ ID NO: 86339
  peptide (1)..(321): Ceres Seq. ID no. 13579415
  misc_feature (140)..(320): Pfam Name: Protein of unknown function, DUF607 Pfam Description: Protein of unknown function, DUF607
  misc_feature (1)..(321): Homolog of NCBI NO: 15240047 NR Description: expressed protein [Arabidopsis thaliana] contains similarity to unknown
  misc_feature (1)..(321): Homolog of NCBI NO: 14596231 NR Description: Unknown protein [Arabidopsis thaliana]
  misc_feature (9)..(310): Homolog of NCBI NO: 15224063 NR Description: expressed protein [Arabidopsis thaliana]
  misc_feature (9)..(310): Homolog of NCBI NO: 24496456 NR Description: hypothetical protein [Arabidopsis thaliana]
  misc_feature (1)..(313): Homolog of NCBI NO: 15234535 NR Description: hypothetical protein [Arabidopsis thaliana]
  misc_feature (36)..(309): Homolog of NCBI NO: 37535778 NR Description: unknown protein [Oryza sativa (japonica
  misc_feature (79)..(309): Homolog of NCBI NO: 20330769 NR Description: Hypothetical protein [Oryza sativa (japonica
  misc_feature (81)..(310): Homolog of NCBI NO: 15239011 NR Description: hypothetical protein [Arabidopsis thaliana]
  misc_feature (103)..(317): Homolog of NCBI NO: 34909244 NR Description: B1148D12.10 [Oryza sativa (japonica
  misc_feature (91)..(312): Homolog of NCBI NO: 18391039 NR Description: expressed protein [Arabidopsis thaliana]

SEQ ID NO: 98063 - protein, 295 aa, Arabidopsis thaliana; identical to SEQ ID NO: 86340
  peptide (1)..(295): Ceres Seq. ID no. 13579416
  misc_feature (114)..(294): Pfam Name: Protein of unknown function, DUF607 Pfam Description: Protein of unknown function, DUF607
  misc_feature (1)..(295): Homolog of NCBI NO: 15240047 NR Description: expressed protein [Arabidopsis thaliana] contains similarity to unknown
  misc_feature (1)..(295): Homolog of NCBI NO: 14596231 NR Description: Unknown protein [Arabidopsis thaliana]
  misc_feature (1)..(284): Homolog of NCBI NO: 15224063 NR Description: expressed protein [Arabidopsis thaliana]
  misc_feature (1)..(284): Homolog of NCBI NO: 24496456 NR Description: hypothetical protein [Arabidopsis thaliana]
  misc_feature (1)..(287): Homolog of NCBI NO: 15234535 NR Description: hypothetical protein [Arabidopsis thaliana]
  misc_feature (10)..(283): Homolog of NCBI NO: 37535778 NR Description: unknown protein [Oryza sativa (japonica
  misc_feature (53)..(283): Homolog of NCBI NO: 20330769 NR Description: Hypothetical protein [Oryza sativa (japonica
  misc_feature (55)..(284): Homolog of NCBI NO: 15239011 NR Description: hypothetical protein [Arabidopsis thaliana]
  misc_feature (77)..(291): Homolog of NCBI NO: 34909244 NR Description: B1148D12.10 [Oryza sativa (japonica
  misc_feature (65)..(286): Homolog of NCBI NO: 18391039 NR Description: expressed protein [Arabidopsis thaliana]

SEQ ID NO: 98064 - DNA, 439 bp, Arabidopsis thaliana
  misc_feature (1)..(439): Ceres Seq. ID no. 13579417
  misc_feature: MA Experiment ID: 20001905 Result: Up-regulated in Transcription
  misc_feature: MA Experiment 20001905 PARAMETER Experiment Name: At_Drought_Reproduction_P Parameter: Age (day) Value: 40
  misc_feature: MA Experiment 20001905 PARAMETER Experiment Name: At_Drought_Reproduction_P Parameter: Organism Value: A. thaliana
  misc_feature: MA Experiment 20001905 PARAMETER Experiment Name: At_Drought_Reproduction_P Parameter: Plant Line Value: WS
  misc_feature: MA Experiment 20001905 PARAMETER Experiment Name: At_Drought_Reproduction_P Parameter: Timepoint (day) Value: 10
  misc_feature: MA Experiment 20001905 PARAMETER Experiment Name: At_Drought_Reproduction_P Parameter: Tissue Value: Rosettes
  misc_feature: MA Experiment 20001905 PARAMETER Experiment Name: At_Drought_Reproduction_P Parameter: Treatment Value: Drought vs. No Drought
aaaaaaaaaaacgcaaaaaccaaagatgggtgagatgatcaaagccagacgcatactcctcttctccatcgtattcctcttcttcttctctcaggcctttcttttgtgttcagctgagggtgagcatggctcaagaaatctcgcagtggtgatgaagaaaagggtgaaatacagaggacctcgcaacacaacaacatcctctgcagcctcaactattatgttcccaggctccttccatattggtgctgcttcctctttactccttgctcttcttttataagctcccttgtagtgatcattattgtactgtttgacaatgattcatgtaatttgcttttctcgattgattttgtagaaatttctcaaatggtctaaaattctgtttgtaaattatttgctctgtttcagtattgtgaaagttaataagatatttgaagct

SEQ ID NO: 98065 - protein, 92 aa, Arabidopsis thaliana
  peptide (1)..(92): Ceres Seq. ID no. 13579418
  misc_feature (9)..(92): Homolog of NCBI NO: 18417123 NR Description: expressed protein [Arabidopsis thaliana] unknown protein [Arabidopsis thaliana]
KKKTQKPKMGEMIKARRILLFSIVFLFFFSQAFLLCSAEGEHGSRNLAVVMKKRVKYRGPRNTTTSSAASTIMFPGSFHIGAASSLLLALLL

SEQ ID NO: 98066 - protein, 84 aa, Arabidopsis thaliana; identical to SEQ ID NO: 27916
  peptide (1)..(84): Ceres Seq. ID no. 13579419
  misc_feature (1)..(84): Homolog of NCBI NO: 18417123 NR Description: expressed protein [Arabidopsis thaliana] unknown protein [Arabidopsis thaliana]

SEQ ID NO: 98067 - protein, 81 aa, Arabidopsis thaliana; identical to SEQ ID NO: 27917
  peptide (1)..(81): Ceres Seq. ID no. 13579420
  misc_feature (1)..(81): Homolog of NCBI NO: 18417123 NR Description: expressed protein [Arabidopsis thaliana] unknown protein [Arabidopsis thaliana]

SEQ ID NO: 98068 - DNA, 1904 bp, Arabidopsis thaliana
  misc_feature (1)..(1904): Ceres Seq. ID no. 13579424
  misc_feature: MA Experiment ID: 20000182 Result: Up-regulated in Transcription
  misc_feature: MA Experiment 20000182 PARAMETER Experiment Name: At_2mM_SA_P Parameter: Age (day) Value: 14
  misc_feature: MA Experiment 20000182 PARAMETER Experiment Name: At_2mM_SA_P Parameter: Organism Value: A. thaliana
  misc_feature: MA Experiment 20000182 PARAMETER Experiment Name: At_2mM_SA_P Parameter: Plant Line Value: WS
  misc_feature: MA Experiment 20000182 PARAMETER Experiment Name: At_2mM_SA_P Parameter: Timepoint (hr) Value: 6
  misc_feature: MA Experiment 20000182 PARAMETER Experiment Name: At_2mM_SA_P Parameter: Tissue Value: Aerial
  misc_feature: MA Experiment 20000182 PARAMETER Experiment Name: At_2mM_SA_P Parameter: Treatment Value: 2mM SA vs. No Treatment
  misc_feature: MA Experiment ID: 20000227 Result: Up-regulated in Transcription
  misc_feature: MA Experiment 20000227 PARAMETER Experiment Name: At_Root-Tips-vs-Tops_P Parameter: Tissue Value: Root Tips vs. Root Tops
  misc_feature: MA Experiment ID: 20000451 Result: Down-regulated in Transcription
  misc_feature: MA Experiment 20000451 PARAMETER Experiment Name: At_CS6879_Shoots-Roots_P Parameter: Age (day) Value: 14
  misc_feature: MA Experiment 20000451 PARAMETER Experiment Name: At_CS6879_Shoots-Roots_P Parameter: Organism Value: A. thaliana
  misc_feature: MA Experiment 20000451 PARAMETER Experiment Name: At_CS6879_Shoots-Roots_P Parameter: Plant Line Value: CS6879 vs. WS
  misc_feature: MA Experiment 20000451 PARAMETER Experiment Name: At_CS6879_Shoots-Roots_P Parameter: Tissue Value: Roots
  misc_feature: MA Experiment ID: 20000495 Result: Down-regulated in Transcription
  misc_feature: MA Experiment 20000495 PARAMETER Experiment Name: At_Guard_Cells_P Parameter: Harvest Date Value: 8/2/2002
  misc_feature: MA Experiment 20000495 PARAMETER Experiment Name: At_Guard_Cells_P Parameter: Organism Value: A. thaliana
  misc_feature: MA Experiment 20000495 PARAMETER Experiment Name: At_Guard_Cells_P Parameter: Tissue Value: Guard Cells vs. Leaves
  misc_feature: MA Experiment ID: 20000709 Result: Up-regulated in Transcription
  misc_feature: MA Experiment 20000709 PARAMETER Experiment Name: At_15mM_NH4NO3_L-to-H_P Parameter: Age (hr) Value: 14
  misc_feature: MA Experiment 20000709 PARAMETER Experiment Name: At_15mM_NH4NO3_L-to-H_P Parameter: Organism Value: A. thaliana
  misc_feature: MA Experiment 20000709 PARAMETER Experiment Name: At_15mM_NH4NO3_L-to-H_P Parameter: Plant Line Value: WS
  misc_feature: MA Experiment 20000709 PARAMETER Experiment Name: At_15mM_NH4NO3_L-to-H_P Parameter: Timepoint (hr) Value: 4
  misc_feature: MA Experiment 20000709 PARAMETER Experiment Name: At_15mM_NH4NO3_L-to-H_P Parameter: Tissue Value: Aerial
  misc_feature: MA Experiment 20000709 PARAMETER Experiment Name: At_15mM_NH4NO3_L-to-H_P Parameter: Treatment Value: 15mM NH4NO3 vs. 30mM Mannitol
  misc_feature: MA Experiment ID: 20001905 Result: Up-regulated in Transcription
  misc_feature: MA Experiment 20001905 PARAMETER Experiment Name: At_Drought_Reproduction_P Parameter: Age (day) Value: 40
  misc_feature: MA Experiment 20001905 PARAMETER Experiment Name: At_Drought_Reproduction_P Parameter: Organism Value: A. thaliana
  misc_feature: MA Experiment 20001905 PARAMETER Experiment Name: At_Drought_Reproduction_P Parameter: Plant Line Value: WS
  misc_feature: MA Experiment 20001905 PARAMETER Experiment Name: At_Drought_Reproduction_P Parameter: Timepoint (day) Value: 10
  misc_feature: MA Experiment 20001905 PARAMETER Experiment Name: At_Drought_Reproduction_P Parameter: Tissue Value: Rosettes
  misc_feature: MA Experiment 20001905 PARAMETER Experiment Name: At_Drought_Reproduction_P Parameter: Treatment Value: Drought vs. No Drought
gcaaagaacaaaccagtgaaggaaaaatggagatatggttacttatcttgggctctctcttcctctctctccttctcaatttactcctctttcgccgccgtgactcctcctctcttccgttaccacctgaccctaacttcttccctttccttggaaccctccaatggctccggcaaggcttaggtggactcaacaactatctccgctccgtccaccaccgtctcggtcccatcatcacccttcgcatcacttcccgccccgctatcttcgtcgccgatcgttctcttgctcaccaggctctcgttttgaacggtgccgttttcgctgatcgtccaccggctgctccgatcagtaagattatttcgagtaaccaacataacatcagctctagtttatatggagccacgtggcgtcttcttcgccggaatctcacttctgagattcttcacccctcgcgcgtgagatcttactctcacgcgcggcgttgggttcttgagattctttttgatcgatttggtaaaagcagaggtgaagaaccgattgttgttgttgatcatcttcactatgcaatgtttgcgcttcttgttctcatgtgttttggagataagcttgacgagaaacaaatcaaacaggtggaatatgttcagagacgacagcttcttggcttttccagattcaatattctcaatctctggcctaagtttactaaattgattttgcgaaagagatgggaagagtttttccagatgcggagagagcagcatgacgttttgcttccgttgattcgtgctcggagaaagattgttgaagagagaaagaatagatcatcagaggaagaagaagacaacaaagtgtatgtacaatcatacgttgatactctgcttgagctggagcttccagatgagaagaggaagctgaacgaagatgagattgttagtttgtgttcggagtttctcaacggtgggactgatacaacggccaccgcgttgcaatggatcatggcgaacttggtgaaaaacccggagattcagaagaggttatacgaggagatcaaaagcgtagttggggaagaagcaaaggaagtagaggaagaagacgcgcaaaagatgccgtatctaaaggcagtggtgatggagggtctccggagacatcctccgggacattttgtactcccgcacagtgtaactgaggacactgtgttgggaggatacaaagtcccgaagaagggaacaattaatttcatggtggcagagattgggagggatccaatggtgtgggaggaaccaatggcgtttaagccagagaggtttatgggagaagaagaagcggtggacataaccggaagcagagggataaagatgatgccgttcggggcgggtagaaggatttgtccagggattgggctagcgatgctgcatcttgagtactatgtggcgaatatggtgagggagtttgagtggaaagaggtccaaggtcatgaagtggacttgacggagaagtttgagtttaccgtagtcatgaagcattcgcttaaggctcttgctgttcttaggagaagtcactagttgtctacttcttaaacttcagtttagtattcaccaaagactaggtgatgtatgaagaattgaagttatgggcattttgttagctgaagtcaactatggaactatcttttttattaaagtacattttgtaccttggaataaatgatagaaacaacaatccttttattttgtattaaaaggaatcttttatgacgagtgtttttacaagaaaggtacataggtctagaaaagtgtgggatttctagtgtttagtgactagatgatttagaaaagtgtgggattttgatggttgttgatacttttgttgggagaaatcgaaagagtaaaagcmtttgtggt

SEQ ID NO: 98069 - protein, 520 aa, Arabidopsis thaliana
  peptide (1)..(520): Ceres Seq. ID no. 15222681
  misc_feature (41)..(516): Pfam Name: Cytochrome P450 Pfam Description: Cytochrome P450
  misc_feature (9)..(520): Homolog of NCBI NO: 15224379 NR Description: cytochrome P450, putative [Arabidopsis thaliana]
  misc_feature (9)..(520): Homolog of NCBI NO: 15217801 NR Description: cytochrome P450, putative [Arabidopsis thaliana]
  misc_feature (9)..(520): Homolog of NCBI NO: 15450601 NR Description: At1g64950/F13O11_25 [Arabidopsis thaliana]
  misc_feature (9)..(520): Homolog of NCBI NO: 15217800 NR Description: cytochrome P450, putative [Arabidopsis thaliana]
  misc_feature (9)..(520): Homolog of NCBI NO: 15217798 NR Description: cytochrome P450, putative [Arabidopsis thaliana]
  misc_feature (9)..(520): Homolog of NCBI NO: 15217771 NR Description: cytochrome P450, putative [Arabidopsis thaliana]
  misc_feature (9)..(520): Homolog of NCBI NO: 1432145 NR Description: cytochrome P450 [Arabidopsis thaliana]
  misc_feature (9)..(310): Homolog of NCBI NO: 9757853 NR Description: cytochrome P450-like protein [Arabidopsis
  misc_feature (341)..(518): Homolog of NCBI NO: 9757853 NR Description: cytochrome P450-like protein [Arabidopsis
  misc_feature (11)..(518): Homolog of NCBI NO: 15228566 NR Description: cytochrome P450, putative [Arabidopsis thaliana]
KEQTSEGKMEIWLLILGSLFLSLLLNLLLFRRRDSSSLPLPPDPNFFPFLGTLQWLRQGLGGLNNYLRSVHHRLGPIITLRITSRPAIFVADRSLAHQALVLNGAVFADRPPAAPISKIISSNQHNISSSLYGATWRLLRRNLTSEILHPSRVRSYSHARRWVLEILFDRFGKSRGEEPIVVVDHLHYAMFALLVLMCFGDKLDEKQIKQVEYVQRRQLLGFSRFNILNLWPKFTKLILRKRWEEFFQMRREQHDVLLPLIRARRKIVEERKNRSSEEEEDNKVYVQSYVDTLLELELPDEKRKLNEDEIVSLCSEFLNGGTDTTATALQWIMANLVKNPEIQKRLYEEIKSVVGEEAKEVEEEDAQKMPYLKAVVMEGLRRHPPGHFVLPHSVTEDTVLGGYKVPKKGTINFMVAEIGRDPMVWEEPMAFKPERFMGEEEAVDITGSRGIKMMPFGAGRRICPGIGLAMLHLEYYVANMVREFEWKEVQGHEVDLTEKFEFTVVMKHSLKALAVLRRSH

SEQ ID NO: 98070 - protein, 512 aa, Arabidopsis thaliana
  peptide (1)..(512): Ceres Seq. ID no. 15222682
  misc_feature (33)..(508): Pfam Name: Cytochrome P450 Pfam Description: Cytochrome P450
  misc_feature (1)..(512): Homolog of NCBI NO: 15224379 NR Description: cytochrome P450, putative [Arabidopsis thaliana]
  misc_feature (1)..(512): Homolog of NCBI NO: 15217801 NR Description: cytochrome P450, putative [Arabidopsis thaliana]
  misc_feature (1)..(512): Homolog of NCBI NO: 15450601 NR Description: At1g64950/F13O11_25 [Arabidopsis thaliana]
  misc_feature (1)..(512): Homolog of NCBI NO: 15217800 NR Description: cytochrome P450, putative [Arabidopsis thaliana]
  misc_feature (1)..(512): Homolog of NCBI NO: 15217798 NR Description: cytochrome P450, putative [Arabidopsis thaliana]
  misc_feature (1)..(512): Homolog of NCBI NO: 15217771 NR Description: cytochrome P450, putative [Arabidopsis thaliana]
  misc_feature (1)..(512): Homolog of NCBI NO: 1432145 NR Description: cytochrome P450 [Arabidopsis thaliana]
  misc_feature (1)..(302): Homolog of NCBI NO: 9757853 NR Description: cytochrome P450-like protein [Arabidopsis
  misc_feature (333)..(510): Homolog of NCBI NO: 9757853 NR Description: cytochrome P450-like protein [Arabidopsis
  misc_feature (3)..(510): Homolog of NCBI NO: 15228566 NR Description: cytochrome P450, putative [Arabidopsis thaliana]
MEIWLLILGSLFLSLLLNLLLFRRRDSSSLPLPPDPNFFPFLGTLQWLRQGLGGLNNYLRSVHHRLGPIITLRITSRPAIFVADRSLAHQALVLNGAVFADRPPAAPISKIISSNQHNISSSLYGATWRLLRRNLTSEILHPSRVRSYSHARRWVLEILFDRFGKSRGEEPIVVVDHLHYAMFALLVLMCFGDKLDEKQIKQVEYVQRRQLLGFSRFNILNLWPKFTKLILRKRWEEFFQMRREQHDVLLPLIRARRKIVEERKNRSSEEEEDNKVYVQSYVDTLLELELPDEKRKLNEDEIVSLCSEFLNGGTDTTATALQWIMANLVKNPEIQKRLYEEIKSVVGEEAKEVEEEDAQKMPYLKAVVMEGLRRHPPGHFVLPHSVTEDTVLGGYKVPKKGTINFMVAEIGRDPMVWEEPMAFKPERFMGEEEAVDITGSRGIKMMPFGAGRRICPGIGLAMLHLEYYVANMVREFEWKEVQGHEVDLTEKFEFTVVMKHSLKALAVLRRSH

SEQ ID NO: 98071 - protein, 331 aa, Arabidopsis thaliana
  peptide (1)..(331): Ceres Seq. ID no. 15222683
  misc_feature (1)..(327): Pfam Name: Cytochrome P450 Pfam Description: Cytochrome P450
  misc_feature (1)..(331): Homolog of NCBI NO: 15224379 NR Description: cytochrome P450, putative [Arabidopsis thaliana]
  misc_feature (1)..(331): Homolog of NCBI NO: 15217801 NR Description: cytochrome P450, putative [Arabidopsis thaliana]
  misc_feature (1)..(331): Homolog of NCBI NO: 15450601 NR Description: At1g64950/F13O11_25 [Arabidopsis thaliana]
  misc_feature (1)..(331): Homolog of NCBI NO: 15217800 NR Description: cytochrome P450, putative [Arabidopsis thaliana]
  misc_feature (1)..(331): Homolog of NCBI NO: 15217798 NR Description: cytochrome P450, putative [Arabidopsis thaliana]
  misc_feature (1)..(331): Homolog of NCBI NO: 15217771 NR Description: cytochrome P450, putative [Arabidopsis thaliana]
  misc_feature (1)..(331): Homolog of NCBI NO: 1432145 NR Description: cytochrome P450 [Arabidopsis thaliana]
  misc_feature (1)..(121): Homolog of NCBI NO: 9757853 NR Description: cytochrome P450-like protein [Arabidopsis
  misc_feature (152)..(329): Homolog of NCBI NO: 9757853 NR Description: cytochrome P450-like protein [Arabidopsis
  misc_feature (1)..(329): Homolog of NCBI NO: 15228566 NR Description: cytochrome P450, putative [Arabidopsis thaliana]
MFALLVLMCFGDKLDEKQIKQVEYVQRRQLLGFSRFNILNLWPKFTKLILRKRWEEFFQMRREQHDVLLPLIRARRKIVEERKNRSSEEEEDNKVYVQSYVDTLLELELPDEKRKLNEDEIVSLCSEFLNGGTDTTATALQWIMANLVKNPEIQKRLYEEIKSVVGEEAKEVEEEDAQKMPYLKAVVMEGLRRHPPGHFVLPHSVTEDTVLGGYKVPKKGTINFMVAEIGRDPMVWEEPMAFKPERFMGEEEAVDITGSRGIKMMPFGAGRRICPGIGLAMLHLEYYVANMVREFEWKEVQGHEVDLTEKFEFTVVMKHSLKALAVLRRSH

SEQ ID NO: 98072 - DNA, 2967 bp, Arabidopsis thaliana
  misc_feature (1)..(2967): Ceres Seq. ID no. 13579425
  misc_feature: MA Experiment ID: 20000180 Result: Down-regulated in Transcription
  misc_feature: MA Experiment 20000180 PARAMETER Experiment Name: At_Germinating_Seeds_P Parameter: Age (hr) Value: 24 vs. 0
  misc_feature: MA Experiment 20000180 PARAMETER Experiment Name: At_Germinating_Seeds_P Parameter: Tissue Value: Germinating Seeds
  misc_feature: MA Experiment ID: 20000182 Result: Up-regulated in Transcription
  misc_feature: MA Experiment 20000182 PARAMETER Experiment Name: At_2mM_SA_P Parameter: Age (day) Value: 14
  misc_feature: MA Experiment 20000182 PARAMETER Experiment Name: At_2mM_SA_P Parameter: Organism Value: A. thaliana
  misc_feature: MA Experiment 20000182 PARAMETER Experiment Name: At_2mM_SA_P Parameter: Plant Line Value: WS
  misc_feature: MA Experiment 20000182 PARAMETER Experiment Name: At_2mM_SA_P Parameter: Timepoint (hr) Value: 6
  misc_feature: MA Experiment 20000182 PARAMETER Experiment Name: At_2mM_SA_P Parameter: Tissue Value: Aerial
  misc_feature: MA Experiment 20000182 PARAMETER Experiment Name: At_2mM_SA_P Parameter: Treatment Value: 2mM SA vs. No Treatment
  misc_feature: MA Experiment ID: 20000184 Result: Down-regulated in Transcription
  misc_feature: MA Experiment 20000184 PARAMETER Experiment Name: At_Shoots__P Parameter: Age (day) Value: 7
  misc_feature: MA Experiment 20000184 PARAMETER Experiment Name: At_Shoots__P Parameter: Tissue Value: Shoots vs. Whole Plant
  misc_feature: MA Experiment ID: 20000234 Result: Down-regulated in Transcription
  misc_feature: MA Experiment 20000234 PARAMETER Experiment Name: At_Siliques_P Parameter: Age (day) Value: 21
  misc_feature: MA Experiment 20000234 PARAMETER Experiment Name: At_Siliques_P Parameter: Organism Value: A. thaliana
  misc_feature: MA Experiment 20000234 PARAMETER Experiment Name: At_Siliques_P Parameter: Plant Line Value: WS
  misc_feature: MA Experiment 20000234 PARAMETER Experiment Name: At_Siliques_P Parameter: Tissue Value: Less Than 5mm Siliques vs. Whole Plant
  misc_feature: MA Experiment ID: 20000235 Result: Down-regulated in Transcription
  misc_feature: MA Experiment 20000235 PARAMETER Experiment Name: At_Siliques_P Parameter: Age (day) Value: 21
  misc_feature: MA Experiment 20000235 PARAMETER Experiment Name: At_Siliques_P Parameter: Organism Value: A. thaliana
  misc_feature: MA Experiment 20000235 PARAMETER Experiment Name: At_Siliques_P Parameter: Plant Line Value: WS
  misc_feature: MA Experiment 20000235 PARAMETER Experiment Name: At_Siliques_P Parameter: Tissue Value: 5-10mm Siliques vs. Whole Plant
  misc_feature: MA Experiment ID: 20000264 Result: Down-regulated in Transcription
  misc_feature: MA Experiment 20000264 PARAMETER Experiment Name: At_Open_Flower_P Parameter: Age (day) Value: 21
  misc_feature: MA Experiment 20000264 PARAMETER Experiment Name: At_Open_Flower_P Parameter: Plant Line Value: WS
  misc_feature: MA Experiment 20000264 PARAMETER Experiment Name: At_Open_Flower_P Parameter: Tissue Value: Open Flower vs. Whole Plant
  misc_feature: MA Experiment ID: 20000265 Result: Down-regulated in Transcription
  misc_feature: MA Experiment 20000265 PARAMETER Experiment Name: At_Open_Flower_P Parameter: Age (day) Value: 21
  misc_feature: MA Experiment 20000265 PARAMETER Experiment Name: At_Open_Flower_P Parameter: Plant Line Value: WS
  misc_feature: MA Experiment 20000265 PARAMETER Experiment Name: At_Open_Flower_P Parameter: Tissue Value: Closed Flower vs. Whole Plant
  misc_feature: MA Experiment ID: 20000286 Result: Down-regulated in Transcription
  misc_feature: MA Experiment 20000286 PARAMETER Experiment Name: At_Open_Flower_P Parameter: Age (day) Value: 21
  misc_feature: MA Experiment 20000286 PARAMETER Experiment Name: At_Open_Flower_P Parameter: Plant Line Value: WS
  misc_feature: MA Experiment 20000286 PARAMETER Experiment Name: At_Open_Flower_P Parameter: Tissue Value: Half Open vs. Whole Plant
  misc_feature: MA Experiment ID: 20000438 Result: Down-regulated in Transcription
  misc_feature: MA Experiment 20000438 PARAMETER Experiment Name: At_Shoots__P Parameter: Age (day) Value: 14
  misc_feature: MA Experiment 20000438 PARAMETER Experiment Name: At_Shoots__P Parameter: Tissue Value: Shoots vs. Whole Plant
  misc_feature: MA Experiment ID: 20001248 Result: Up-regulated in Transcription
  misc_feature: MA Experiment 20001248 PARAMETER Experiment Name: At_Far-red-induction_P Parameter: Age (day) Value: 7
  misc_feature: MA Experiment 20001248 PARAMETER Experiment Name: At_Far-red-induction_P Parameter: Light Value: Far-red vs. White
  misc_feature: MA Experiment 20001248 PARAMETER Experiment Name: At_Far-red-induction_P Parameter: Organism Value: A. thaliana
  misc_feature: MA Experiment 20001248 PARAMETER Experiment Name: At_Far-red-induction_P Parameter: Plant Line Value: Columbia
  misc_feature: MA Experiment 20001248 PARAMETER Experiment Name: At_Far-red-induction_P Parameter: Timepoint (hr) Value: 4
  misc_feature: MA Experiment 20001248 PARAMETER Experiment Name: At_Far-red-induction_P Parameter: Tissue Value: Whole Plant
  misc_feature: MA Experiment ID: 20001450 Result: Up-regulated in Transcription
  misc_feature: MA Experiment 20001450 PARAMETER Experiment Name: At_Far-red-induction_P Parameter: Age (day) Value: 7
  misc_feature: MA Experiment 20001450 PARAMETER Experiment Name: At_Far-red-induction_P Parameter: Light Value: Far-red vs. White
  misc_feature: MA Experiment 20001450 PARAMETER Experiment Name: At_Far-red-induction_P Parameter: Organism Value: A. thaliana
  misc_feature: MA Experiment 20001450 PARAMETER Experiment Name: At_Far-red-induction_P Parameter: Plant Line Value: Columbia
  misc_feature: MA Experiment 20001450 PARAMETER Experiment Name: At_Far-red-induction_P Parameter: Timepoint (hr) Value: 8
  misc_feature: MA Experiment 20001450 PARAMETER Experiment Name: At_Far-red-induction_P Parameter: Tissue Value: Whole Plant
atgtctttcgatgagcttctaagatttgtgagtgaagtccaaggagaacggcacgcagggttggactacgtgcaagatatcttccacagcgttaaacaccacaacgtttttcatcaccatggacttgttcatctcaacgccttctatcgctacctcttcagcgataccaactctcctcttcccatgtctggccaggtgcatcatgacatgaaggcgccgttatcgcattactttgtgtacacgggacataactcttacttgactgggaaccaagtgaacagcagaagcagcgtagaaccgatcgtgcaggctctcagaaaaggcgtaaaagtgatcgagctcgacttatggcctaatccttcagggaacgctgctgaagttcgtcatggcaggacgcttacttcgcatgaagatttgcagaaatgtctaaccgccattaaggataacgcgtttcatgtgtctgactatccagtcatcatcactctcgaagatcatttgccacccaagcttcaagcgcaagttgctaagatgttaactaaaacatacagagggatgctgtttcgtcgtgtctcagagagttttaagcattttccatcaccagaagaacttaaggggaagatcctgatctctacgaagcctccaaaggagtatcttgagagcaaaactgtacacaccacaagaactccaacggttaaagagacttcgtggaacagagtagcgaacaagattcttgaagaatataaagatatggagagtgaagctgtaggatatagagacttgatagcaatccacgctgcaaactgcaaagatccttcaaaggattgcttgagtgatgatccagagaagcctatacgggtcagcatggacgagcagtggctagacactatggttaggaccagaggaacggatcttgtcaggtttacacagaggaatctggtgaggatatatccaaagggcacaagagtggactcgtcaaactacgatcctcatgttgggtggacacacggtgctcaaatggttgcttttaacatgcaaggacatgggaagcaactatggataatgcaaggaatgttcagggggaatggtggatgtgggtacgttaaaaagcctcgcatcttgctagacgagcacacactcttcgacccttgcaaaaggtttcccattaagaccactcttaaggttaagatttacactggcgaaggatgggatttggatttccatcatacacactttgatcaatactctcctccagatttcttcgtcaagattggaatagcaggagtaccgagagacacggtctcatacagaacggaaacagctgtcgatcagtggtttcctatatggggcaacgacgagttcctgtttcagctgtctgttccagaactggcgcttctgtggttcaaagtccaagactacgacaatgacacccagaatgatttcgcaggacagacatgtcttcctctgccggaactgaagtccggagttagagccgtccggcttcacgatcgaacaggcaaggcctacaagaacacgaggcttctcgtcagcttcgccttggatcctccttatacgtttcatcatcaacgcaccatggaagaagaaggcagcccagatatcatcatcgttggcgccggtatctccggcctttccaccgctgttggactacacaggcttgggatcagaagcatggtgctggaatcttcggagacactgagagcgacaggatttgcatttaccacttggttcaatgcttggaaggccatggaagctctcggcgtttctcagcatattcgcagtctccatgatcgccttgaaggatgggtggttggaacaatttctgcaggaactcctcccacagagatgctgtttccagaatccgaagaatatgagtctcgatgcgtacagaggaagctgttgttagaggctctagcaggtgagttgcctgaagagaccatcaggttttcgtctaaggttgttcatattgaattgtctggatgctacaagaaggttcatctctccgacgggaccattctcaaaaccaaggttttggtagggtgcgatggagtgtactcagtggttggtaagtggctaggcttcaaaaatcccgctacaactgcccggttagcaatccgagggctcacacattttccggaaggccatggatttgggaaaaggttcttccagttttatggagacggcgttcgttccggttttatcccatgtgaccacaacactgtctactggttcctaacccacacctccactgatatagatgaggagacaaattcggaaatcctcaaagagtttgtgctgaacaagatcaaagacttgcctgaaaacattaagaatgtggtggagaccactgatcttgatagcatggtgatgtctcaactgaagtaccgacctccatgggaactgctatggtcaaacatcacaaaagacaacgtgtgcgttgcaggagatgcacttcacccaatgactcctgatatcggacaaggaggttgctcagccatggaggatggagttatccttgctcgttgtctaggtgaagcgataaaggcaaagagtctgaaaggtgaaacagaagaaaatgaagaagagggttataagaggattgaagaaggtttgaagaagtatgcaggagaaaggaaatggagaagcattgatcttataacaacggcatatacagtaggattcatacagcagagcagagggaagtggatgaacatgttcagagacaggttcctgtcgtcttacctttctaggatgctgctgaaaaagtcccatttcgattgcggaagccttgtcccatgatgattctcaaacataagtcaaaagcttgtgattcttcttgtcatcaccaactgcagaacagttttcacctttggtttgcttcaaagactatctatctgtttagtgttatttcatataacaaactcagaattaataaagtaagtttgtgtagtg

SEQ ID NO: 98073 - protein, 937 aa, Arabidopsis thaliana
  peptide (1)..(937): Ceres Seq. ID no. 13579426
  misc_feature (679)..(895): Pfam Name: Monooxygenase Pfam Description: Monooxygenase
  misc_feature (1)..(525): Homolog of NCBI NO: 15233918 NR Description: phosphoinositide-specific phospholipase C
  misc_feature (1)..(496): Homolog of NCBI NO: 557880 NR Description: phosphoinositide-specific phospholipase C
  misc_feature (531)..(937): Homolog of NCBI NO: 15233923 NR Description: monooxygenase 2 (MO2) [Arabidopsis thaliana]
  misc_feature (1)..(521): Homolog of NCBI NO: 18424132 NR Description: phosphoinositide specific phospholipase C thaliana] >gi|902923|dbj|BAA07547.1| phosphoinositide specific
  misc_feature (1)..(521): Homolog of NCBI NO: 2769704 NR Description: phosphoinositol-specific phospholipase C delta
  misc_feature (531)..(935): Homolog of NCBI NO: 15239070 NR Description: monooxygenase 2 (MO2), putative [Arabidopsis >gi|10176744|dbj|BAB09975.1| monooxygenase [Arabidopsis thaliana]
  misc_feature (531)..(921): Homolog of NCBI NO: 21537119 NR Description: monooxygenase [Arabidopsis thaliana]
  misc_feature (245)..(517): Homolog of NCBI NO: 7435169 NR Description: phosphoinositide-specific phospholipase C (EC
  misc_feature (1)..(255): Homolog of NCBI NO: 7435169 NR Description: phosphoinositide-specific phospholipase C (EC
  misc_feature (245)..(517): Homolog of NCBI NO: 7435168 NR Description: phosphoinositide-specific phospholipase C (EC
MSFDELLRFVSEVQGERHAGLDYVQDIFHSVKHHNVFHHHGLVHLNAFYRYLFSDTNSPLPMSGQVHHDMKAPLSHYFVYTGHNSYLTGNQVNSRSSVEPIVQALRKGVKVIELDLWPNPSGNAAEVRHGRTLTSHEDLQKCLTAIKDNAFHVSDYPVIITLEDHLPPKLQAQVAKMLTKTYRGMLFRRVSESFKHFPSPEELKGKILISTKPPKEYLESKTVHTTRTPTVKETSWNRVANKILEEYKDMESEAVGYRDLIAIHAANCKDPSKDCLSDDPEKPIRVSMDEQWLDTMVRTRGTDLVRFTQRNLVRIYPKGTRVDSSNYDPHVGWTHGAQMVAFNMQGHGKQLWIMQGMFRGNGGCGYVKKPRILLDEHTLFDPCKRFPIKTTLKVKIYTGEGWDLDFHHTHFDQYSPPDFFVKIGIAGVPRDTVSYRTETAVDQWFPIWGNDEFLFQLSVPELALLWFKVQDYDNDTQNDFAGQTCLPLPELKSGVRAVRLHDRTGKAYKNTRLLVSFALDPPYTFHHQRTMEEEGSPDIIIVGAGISGLSTAVGLHRLGIRSMVLESSETLRATGFAFTTWFNAWKAMEALGVSQHIRSLHDRLEGWVVGTISAGTPPTEMLFPESEEYESRCVQRKLLLEALAGELPEETIRFSSKVVHIELSGCYKKVHLSDGTILKTKVLVGCDGVYSVVGKWLGFKNPATTARLAIRGLTHFPEGHGFGKRFFQFYGDGVRSGFIPCDHNTVYWFLTHTSTDIDEETNSEILKEFVLNKIKDLPENIKNVVETTDLDSMVMSQLKYRPPWELLWSNITKDNVCVAGDALHPMTPDIGQGGCSAMEDGVILARCLGEAIKAKSLKGETEENEEEGYKRIEEGLKKYAGERKWRSIDLITTAYTVGFIQQSRGKWMNMFRDRFLSSYLSRMLLKKSHFDCGSLVP

SEQ ID NO: 98074 - protein, 876 aa, Arabidopsis thaliana
  peptide (1)..(876): Ceres Seq. ID no. 13579427
  misc_feature (618)..(834): Pfam Name: Monooxygenase Pfam Description: Monooxygenase
  misc_feature (1)..(464): Homolog of NCBI NO: 15233918 NR Description: phosphoinositide-specific phospholipase C
  misc_feature (1)..(435): Homolog of NCBI NO: 557880 NR Description: phosphoinositide-specific phospholipase C
  misc_feature (470)..(876): Homolog of NCBI NO: 15233923 NR Description: monooxygenase 2 (MO2) [Arabidopsis thaliana]
  misc_feature (1)..(460): Homolog of NCBI NO: 18424132 NR Description: phosphoinositide specific phospholipase C thaliana] >gi|902923|dbj|BAA07547.1| phosphoinositide specific
  misc_feature (1)..(460): Homolog of NCBI NO: 2769704 NR Description: phosphoinositol-specific phospholipase C delta
  misc_feature (470)..(874): Homolog of NCBI NO: 15239070 NR Description: monooxygenase 2 (MO2), putative [Arabidopsis >gi|10176744|dbj|BAB09975.1| monooxygenase [Arabidopsis thaliana]
  misc_feature (470)..(860): Homolog of NCBI NO: 21537119 NR Description: monooxygenase [Arabidopsis thaliana]
  misc_feature (184)..(456): Homolog of NCBI NO: 7435169 NR Description: phosphoinositide-specific phospholipase C (EC
  misc_feature (1)..(194): Homolog of NCBI NO: 7435169 NR Description: phosphoinositide-specific phospholipase C (EC
  misc_feature (184)..(456): Homolog of NCBI NO: 7435168 NR Description: phosphoinositide-specific phospholipase C (EC
MSGQVHHDMKAPLSHYFVYTGHNSYLTGNQVNSRSSVEPIVQALRKGVKVIELDLWPNPSGNAAEVRHGRTLTSHEDLQKCLTAIKDNAFHVSDYPVIITLEDHLPPKLQAQVAKMLTKTYRGMLFRRVSESFKHFPSPEELKGKILISTKPPKEYLESKTVHTTRTPTVKETSWNRVANKILEEYKDMESEAVGYRDLIAIHAANCKDPSKDCLSDDPEKPIRVSMDEQWLDTMVRTRGTDLVRFTQRNLVRIYPKGTRVDSSNYDPHVGWTHGAQMVAFNMQGHGKQLWIMQGMFRGNGGCGYVKKPRILLDEHTLFDPCKRFPIKTTLKVKIYTGEGWDLDFHHTHFDQYSPPDFFVKIGIAGVPRDTVSYRTETAVDQWFPIWGNDEFLFQLSVPELALLWFKVQDYDNDTQNDFAGQTCLPLPELKSGVRAVRLHDRTGKAYKNTRLLVSFALDPPYTFHHQRTMEEEGSPDIIIVGAGISGLSTAVGLHRLGIRSMVLESSETLRATGFAFTTWFNAWKAMEALGVSQHIRSLHDRLEGWVVGTISAGTPPTEMLFPESEEYESRCVQRKLLLEALAGELPEETIRFSSKVVHIELSGCYKKVHLSDGTILKTKVLVGCDGVYSVVGKWLGFKNPATTARLAIRGLTHFPEGHGFGKRFFQFYGDGVRSGFIPCDHNTVYWFLTHTSTDIDEETNSEILKEFVLNKIKDLPENIKNVVETTDLDSMVMSQLKYRPPWELLWSNITKDNVCVAGDALHPMTPDIGQGGCSAMEDGVILARCLGEAIKAKSLKGETEENEEEGYKRIEEGLKKYAGERKWRSIDLITTAYTVGFIQQSRGKWMNMFRDRFLSSYLSRMLLKKSHFDCGSLVP

SEQ ID NO: 98075 - protein, 868 aa, Arabidopsis thaliana
  peptide (1)..(868): Ceres Seq. ID no. 13579428
  misc_feature (610)..(826): Pfam Name: Monooxygenase Pfam Description: Monooxygenase
  misc_feature (1)..(456): Homolog of NCBI NO: 15233918 NR Description: phosphoinositide-specific phospholipase C
  misc_feature (1)..(427): Homolog of NCBI NO: 557880 NR Description: phosphoinositide-specific phospholipase C
  misc_feature (462)..(868): Homolog of NCBI NO: 15233923 NR Description: monooxygenase 2 (MO2) [Arabidopsis thaliana]
  misc_feature (1)..(452): Homolog of NCBI NO: 18424132 NR Description: phosphoinositide specific phospholipase C thaliana] >gi|902923|dbj|BAA07547.1| phosphoinositide specific
  misc_feature (1)..(452): Homolog of NCBI NO: 2769704 NR Description: phosphoinositol-specific phospholipase C delta
  misc_feature (462)..(866): Homolog of NCBI NO: 15239070 NR Description: monooxygenase 2 (MO2), putative [Arabidopsis >gi|10176744|dbj|BAB09975.1| monooxygenase [Arabidopsis thaliana]
  misc_feature (462)..(852): Homolog of NCBI NO: 21537119 NR Description: monooxygenase [Arabidopsis thaliana]
  misc_feature (176)..(448): Homolog of NCBI NO: 7435169 NR Description: phosphoinositide-specific phospholipase C (EC
  misc_feature (1)..(186): Homolog of NCBI NO: 7435169 NR Description: phosphoinositide-specific phospholipase C (EC
  misc_feature (176)..(448): Homolog of NCBI NO: 7435168 NR Description: phosphoinositide-specific phospholipase C (EC
MKAPLSHYFVYTGHNSYLTGNQVNSRSSVEPIVQALRKGVKVIELDLWPNPSGNAAEVRHGRTLTSHEDLQKCLTAIKDNAFHVSDYPVIITLEDHLPPKLQAQVAKMLTKTYRGMLFRRVSESFKHFPSPEELKGKILISTKPPKEYLESKTVHTTRTPTVKETSWNRVANKILEEYKDMESEAVGYRDLIAIHAANCKDPSKDCLSDDPEKPIRVSMDEQWLDTMVRTRGTDLVRFTQRNLVRIYPKGTRVDSSNYDPHVGWTHGAQMVAFNMQGHGKQLWIMQGMFRGNGGCGYVKKPRILLDEHTLFDPCKRFPIKTTLKVKIYTGEGWDLDFHHTHFDQYSPPDFFVKIGIAGVPRDTVSYRTETAVDQWFPIWGNDEFLFQLSVPELALLWFKVQDYDNDTQNDFAGQTCLPLPELKSGVRAVRLHDRTGKAYKNTRLLVSFALDPPYTFHHQRTMEEEGSPDIIIVGAGISGLSTAVGLHRLGIRSMVLESSETLRATGFAFTTWFNAWKAMEALGVSQHIRSLHDRLEGWVVGTISAGTPPTEMLFPESEEYESRCVQRKLLLEALAGELPEETIRFSSKVVHIELSGCYKKVHLSDGTILKTKVLVGCDGVYSVVGKWLGFKNPATTARLAIRGLTHFPEGHGFGKRFFQFYGDGVRSGFIPCDHNTVYWFLTHTSTDIDEETNSEILKEFVLNKIKDLPENIKNVVETTDLDSMVMSQLKYRPPWELLWSNITKDNVCVAGDALHPMTPDIGQGGCSAMEDGVILARCLGEAIKAKSLKGETEENEEEGYKRIEEGLKKYAGERKWRSIDLITTAYTVGFIQQSRGKWMNMFRDRFLSSYLSRMLLKKSHFDCGSLVP

SEQ ID NO: 98076 - DNA, 1514 bp, Arabidopsis thaliana
  misc_feature (1)..(1514): Ceres Seq. ID no. 13579429
  misc_feature: MA Experiment ID: 108434 Result: Down-regulated in Transcription
  misc_feature: MA Experiment 108434 PARAMETER Experiment Name: At_Root_Tips_cDNA_P Parameter: Tissue Value: Root Tips
  misc_feature: MA Experiment ID: 108435 Result: Down-regulated in Transcription
  misc_feature: MA Experiment 108435 PARAMETER Experiment Name: At_stm_Mutants_cDNA_P Parameter: Plant Line Value: wt Landsburg vs stm
  misc_feature: MA Experiment 108435 PARAMETER Experiment Name: At_stm_Mutants_cDNA_P Parameter: Tissue Value: Shoot Apical Meristem Region
  misc_feature: MA Experiment ID: 108461 Result: Up-regulated in Transcription
  misc_feature: MA Experiment 108461 PARAMETER Experiment Name: At_Germinating_Seeds_cDNA_P Parameter: Age (day) Value: 1 vs. 0
  misc_feature: MA Experiment 108461 PARAMETER Experiment Name: At_Germinating_Seeds_cDNA_P Parameter: Tissue Value: Germinating Seeds
  misc_feature: MA Experiment ID: 108462 Result: Up-regulated in Transcription
  misc_feature: MA Experiment 108462 PARAMETER Experiment Name: At_Germinating_Seeds_cDNA_P Parameter: Age (day) Value: 2 vs. 0
  misc_feature: MA Experiment 108462 PARAMETER Experiment Name: At_Germinating_Seeds_cDNA_P Parameter: Tissue Value: Germinating Seeds
  misc_feature: MA Experiment ID: 108464 Result: Up-regulated in Transcription
  misc_feature: MA Experiment 108464 PARAMETER Experiment Name: At_Germinating_Seeds_cDNA_P Parameter: Age (day) Value: 4 vs. 0
  misc_feature: MA Experiment 108464 PARAMETER Experiment Name: At_Germinating_Seeds_cDNA_P Parameter: Tissue Value: Germinating Seeds
  misc_feature: MA Experiment ID: 108488 Result: Up-regulated in Transcription
  misc_feature: MA Experiment ID: 108595 Result: Down-regulated in Transcription
  misc_feature: MA Experiment 108595 PARAMETER Experiment Name: At_Ler-pi_Ovule_cDNA_P Parameter: Plant Line Value: null
  misc_feature: MA Experiment ID: 20000070 Result: Down-regulated in Transcription
  misc_feature: MA Experiment 20000070 PARAMETER Experiment Name: At_100uM_ABA_Mutants_cDNA_P Parameter: Plant Line Value: CS24
  misc_feature: MA Experiment 20000070 PARAMETER Experiment Name: At_100uM_ABA_Mutants_cDNA_P Parameter: Timepoint (hr) Value: 6
  misc_feature: MA Experiment 20000070 PARAMETER Experiment Name: At_100uM_ABA_Mutants_cDNA_P Parameter: Tissue Value: Aerial
  misc_feature: MA Experiment 20000070 PARAMETER Experiment Name: At_100uM_ABA_Mutants_cDNA_P Parameter: Treatment Value: 100uM ABA vs. No Treatment
  misc_feature: MA Experiment ID: 20000088 Result: Down-regulated in Transcription
  misc_feature: MA Experiment 20000088 PARAMETER Experiment Name: At_100uM_ABA_Mutants_cDNA_P Parameter: Plant Line Value: Landsberg
  misc_feature: MA Experiment 20000088 PARAMETER Experiment Name: At_100uM_ABA_Mutants_cDNA_P Parameter: Timepoint (hr) Value: 6
  misc_feature: MA Experiment 20000088 PARAMETER Experiment Name: At_100uM_ABA_Mutants_cDNA_P Parameter: Tissue Value: Aerial
  misc_feature: MA Experiment 20000088 PARAMETER Experiment Name: At_100uM_ABA_Mutants_cDNA_P Parameter: Treatment Value: 100uM ABA vs. No Treatment
  misc_feature: MA Experiment ID: 20000090 Result: Down-regulated in Transcription
  misc_feature: MA Experiment ID: 20000113 Result: Up-regulated in Transcription
  misc_feature: MA Experiment 20000113 PARAMETER Experiment Name: At_42deg_Heat_cDNA_P Parameter: Temperature (deg C) Value: 42 vs. 22
  misc_feature: MA Experiment 20000113 PARAMETER Experiment Name: At_42deg_Heat_cDNA_P Parameter: Timepoint (hr) Value: 8
  misc_feature: MA Experiment 20000113 PARAMETER Experiment Name: At_42deg_Heat_cDNA_P Parameter: Tissue Value: Aerial
  misc_feature: MA Experiment ID: 20000117 Result: Down-regulated in Transcription
  misc_feature: MA Experiment 20000117 PARAMETER Experiment Name: At_100uM_ABA_Mutants_cDNA_P Parameter: Plant Line Value: Columbia
  misc_feature: MA Experiment 20000117 PARAMETER Experiment Name: At_100uM_ABA_Mutants_cDNA_P Parameter: Timepoint (hr) Value: 6
  misc_feature: MA Experiment 20000117 PARAMETER Experiment Name: At_100uM_ABA_Mutants_cDNA_P Parameter: Tissue Value: Aerial
  misc_feature: MA Experiment 20000117 PARAMETER Experiment Name: At_100uM_ABA_Mutants_cDNA_P Parameter: Treatment Value: 100uM ABA vs. No Treatment
  misc_feature: MA Experiment ID: 20000180 Result: Up-regulated in Transcription
  misc_feature: MA Experiment 20000180 PARAMETER Experiment Name: At_Germinating_Seeds_P Parameter: Age (hr) Value: 24 vs. 0
  misc_feature: MA Experiment 20000180 PARAMETER Experiment Name: At_Germinating_Seeds_P Parameter: Tissue Value: Germinating Seeds
  misc_feature: MA Experiment ID: 20000184 Result: Up-regulated in Transcription
  misc_feature: MA Experiment 20000184 PARAMETER Experiment Name: At_Shoots__P Parameter: Age (day) Value: 7
  misc_feature: MA Experiment 20000184 PARAMETER Experiment Name: At_Shoots__P Parameter: Tissue Value: Shoots vs. Whole Plant
  misc_feature: MA Experiment ID: 20000185 Result: Down-regulated in Transcription
  misc_feature: MA Experiment 20000185 PARAMETER Experiment Name: At_Roots__P Parameter: Age (day) Value: 7 vs. 21
  misc_feature: MA Experiment 20000185 PARAMETER Experiment Name: At_Roots__P Parameter: Organism Value: A. thaliana
  misc_feature: MA Experiment 20000185 PARAMETER Experiment Name: At_Roots__P Parameter: Tissue Value: Roots vs. Whole Plant
  misc_feature: MA Experiment ID: 20000234 Result: Up-regulated in Transcription
  misc_feature: MA Experiment 20000234 PARAMETER Experiment Name: At_Siliques_P Parameter: Age (day) Value: 21
  misc_feature: MA Experiment 20000234 PARAMETER Experiment Name: At_Siliques_P Parameter: Organism Value: A. thaliana
  misc_feature: MA Experiment 20000234 PARAMETER Experiment Name: At_Siliques_P Parameter: Plant Line Value: WS
  misc_feature: MA Experiment 20000234 PARAMETER Experiment Name: At_Siliques_P Parameter: Tissue Value: Less Than 5mm Siliques vs. Whole Plant
  misc_feature: MA Experiment ID: 20000235 Result: Up-regulated in Transcription
  misc_feature: MA Experiment 20000235 PARAMETER Experiment Name: At_Siliques_P Parameter: Age (day) Value: 21
  misc_feature: MA Experiment 20000235 PARAMETER Experiment Name: At_Siliques_P Parameter: Organism Value: A. thaliana
  misc_feature: MA Experiment 20000235 PARAMETER Experiment Name: At_Siliques_P Parameter: Plant Line Value: WS
  misc_feature: MA Experiment 20000235 PARAMETER Experiment Name: At_Siliques_P Parameter: Tissue Value: 5-10mm Siliques vs. Whole Plant
  misc_feature: MA Experiment ID: 20000437 Result: Down-regulated in Transcription
  misc_feature: MA Experiment 20000437 PARAMETER Experiment Name: At_Drought_P Parameter: Age (day) Value: 8
  misc_feature: MA Experiment 20000437 PARAMETER Experiment Name: At_Drought_P Parameter: Organism Value: A. thaliana
  misc_feature: MA Experiment 20000437 PARAMETER Experiment Name: At_Drought_P Parameter: Plant Line Value: WS
  misc_feature: MA Experiment 20000437 PARAMETER Experiment Name: At_Drought_P Parameter: Timepoint (hr) Value: 24
  misc_feature: MA Experiment 20000437 PARAMETER Experiment Name: At_Drought_P Parameter: Tissue Value: Whole Plant
  misc_feature: MA Experiment 20000437 PARAMETER Experiment Name: At_Drought_P Parameter: Treatment Value: Drought vs. No Drought
  misc_feature: MA Experiment ID: 20000438 Result: Up-regulated in Transcription
  misc_feature: MA Experiment 20000438 PARAMETER Experiment Name: At_Shoots__P Parameter: Age (day) Value: 14
  misc_feature: MA Experiment 20000438 PARAMETER Experiment Name: At_Shoots__P Parameter: Tissue Value: Shoots vs. Whole Plant
  misc_feature: MA Experiment ID: 20000439 Result: Down-regulated in Transcription
  misc_feature: MA Experiment 20000439 PARAMETER Experiment Name: At_Roots__P Parameter: Age (day) Value: 14 vs. 21
  misc_feature: MA Experiment 20000439 PARAMETER Experiment Name: At_Roots__P Parameter: Organism Value: A. thaliana
  misc_feature: MA Experiment 20000439 PARAMETER Experiment Name: At_Roots__P Parameter: Tissue Value: Roots vs. Whole Plant
  misc_feature: MA Experiment ID: 20000460 Result: Down-regulated in Transcription
  misc_feature: MA Experiment 20000460 PARAMETER Experiment Name: At_10percent_PEG_P Parameter: Age (day) Value: 12
  misc_feature: MA Experiment 20000460 PARAMETER Experiment Name: At_10percent_PEG_P Parameter: Organism Value: A. thaliana
  misc_feature: MA Experiment 20000460 PARAMETER Experiment Name: At_10percent_PEG_P Parameter: Plant Line Value: WS
  misc_feature: MA Experiment 20000460 PARAMETER Experiment Name: At_10percent_PEG_P Parameter: Timepoint (day) Value: 12
  misc_feature: MA Experiment 20000460 PARAMETER Experiment Name: At_10percent_PEG_P Parameter: Tissue Value: Whole Plant
  misc_feature: MA Experiment 20000460 PARAMETER Experiment Name: At_10percent_PEG_P Parameter: Treatment Value: 10percent PEG vs. No Treatment
  misc_feature: MA Experiment ID: 20000794 Result: Down-regulated in Transcription
  misc_feature: MA Experiment 20000794 PARAMETER Experiment Name: At_Petals_P Parameter: Age (day) Value: 23-25 days
  misc_feature: MA Experiment 20000794 PARAMETER Experiment Name: At_Petals_P Parameter: Plant Line Value: WS
  misc_feature: MA Experiment 20000794 PARAMETER Experiment Name: At_Petals_P Parameter: Tissue Value: Petals vs. Whole plant
  misc_feature: MA Experiment ID: 20001247 Result: Up-regulated in Transcription
  misc_feature: MA Experiment 20001247 PARAMETER Experiment Name: At_Far-red-induction_P Parameter: Age (day) Value: 7
  misc_feature: MA Experiment 20001247 PARAMETER Experiment Name: At_Far-red-induction_P Parameter: Light Value: Far-red vs. White
  misc_feature: MA Experiment 20001247 PARAMETER Experiment Name: At_Far-red-induction_P Parameter: Organism Value: A. thaliana
  misc_feature: MA Experiment 20001247 PARAMETER Experiment Name: At_Far-red-induction_P Parameter: Plant Line Value: Columbia
  misc_feature: MA Experiment 20001247 PARAMETER Experiment Name: At_Far-red-induction_P Parameter: Timepoint (hr) Value: 1
  misc_feature: MA Experiment 20001247 PARAMETER Experiment Name: At_Far-red-induction_P Parameter: Tissue Value: Whole Plant
  misc_feature: MA Experiment ID: 20001248 Result: Down-regulated in Transcription
  misc_feature: MA Experiment 20001248 PARAMETER Experiment Name: At_Far-red-induction_P Parameter: Age (day) Value: 7
  misc_feature: MA Experiment 20001248 PARAMETER Experiment Name: At_Far-red-induction_P Parameter: Light Value: Far-red vs. White
  misc_feature: MA Experiment 20001248 PARAMETER Experiment Name: At_Far-red-induction_P Parameter: Organism Value: A. thaliana
  misc_feature: MA Experiment 20001248 PARAMETER Experiment Name: At_Far-red-induction_P Parameter: Plant Line Value: Columbia
  misc_feature: MA Experiment 20001248 PARAMETER Experiment Name: At_Far-red-induction_P Parameter: Timepoint (hr) Value: 4
  misc_feature: MA Experiment 20001248 PARAMETER Experiment Name: At_Far-red-induction_P Parameter: Tissue Value: Whole Plant
  misc_feature: MA Experiment ID: 20001559 Result: Down-regulated in Transcription
  misc_feature: MA Experiment 20001559 PARAMETER Experiment Name: At_Drought_Soil_Dry_P Parameter: Age (day) Value: 28
  misc_feature: MA Experiment 20001559 PARAMETER Experiment Name: At_Drought_Soil_Dry_P Parameter: Organism Value: A. thaliana
  misc_feature: MA Experiment 20001559 PARAMETER Experiment Name: At_Drought_Soil_Dry_P Parameter: Plant Line Value: WS
  misc_feature: MA Experiment 20001559 PARAMETER Experiment Name: At_Drought_Soil_Dry_P Parameter: Post Timepoint (hr) Value: 29
  misc_feature: MA Experiment 20001559 PARAMETER Experiment Name: At_Drought_Soil_Dry_P Parameter: Post-Treatment Value: Re-Water vs. No Drought
  misc_feature: MA Experiment 20001559 PARAMETER Experiment Name: At_Drought_Soil_Dry_P Parameter: Timepoint (day) Value: 14
  misc_feature: MA Experiment 20001559 PARAMETER Experiment Name: At_Drought_Soil_Dry_P Parameter: Treatment Value: Drought vs. No Drought
  misc_feature: MA Experiment ID: 20001757 Result: Up-regulated in Transcription
  misc_feature: MA Experiment 20001757 PARAMETER Experiment Name: At_50mM_NH4NO3_L-to-H_P Parameter: Timepoint (hr) Value: 6
  misc_feature: MA Experiment 20001757 PARAMETER Experiment Name: At_50mM_NH4NO3_L-to-H_P Parameter: Tissue Value: Leaf
  misc_feature: MA Experiment 20001757 PARAMETER Experiment Name: At_50mM_NH4NO3_L-to-H_P Parameter: Treatment Value: 50mM NH4NO3 vs 100mM Mannitol
gtcgactgaagtgtgaaggtggagattatgtattcacttgttgatttggtatacattctatgtaaggttcaattatttacgttatataattataatggagtaatttacagtaattgggttaaaatggtttgattcggtcaggttgatacggtttggaagttaaacccggcctagatatgatgttacaaccagtccacatcttttatgattttagtggaacaaacgaagagttatttagacgatacaaacaaggtccgaataagtgtgagctgtcccaagtaagaccacgtaatactcacctcaacaagatagtgttcttaaagtgtgtcaaacacaatcacacacacacaaatcataaaacacaaagacgataatccatcgatccacagaatagacgccacgtggtagataggattctcactaaaaagttctcaccttttaatctttctccacgccatttccacaagccataatcctcaaaaatctcaactttatctcccaaaacacaaaacaaaaaaaaatggcttccactgctctctcaagcgccatcgtcggaacttcattcatccgtcgttccccagctccaatcagtctccgttcccttccatcagccaacacacaatccctcttcggtctcaaatcaggcaccgctcgtggtggacgtgtcacagccatggctacatacaaggtcaagttcatcacaccagaaggtgagctagaggttgagtgtgacgacgacgtctacgttcttgatgctgctgaggaagctggaatcgatttgccttactcttgccgtgctggttcttgttcgagctgtgctggtaaagttgtgtctggatctgttgatcagtctgaccagagtttccttgatgatgaacagattggtgaagggtttgttctcacttgtgctgcttaccctacctctgatgttaccattgaaacccacaaagaagaagacattgtttaagcctcacctactcaccagcttttgatggtttaaaaatcatgtctttataaatttcacattttgggttgagtttgttgttactaaaaactattgttatctgttgttattgttcctggtttggctcaccatcaatcgatgacattttaaactatgcaactgcaaattctgcaacactttcgatgagaatctaacattatcgtttaaacattggaaatacattttcttgaagtctagctagctttggtttgtagttcttattctgaactcaacaatcatcaaagtatcaagaaaaatccgatttgcgagcaattgtgaaatcttagattgataaattctctagaaagaactatacatgttatttgtagctatagaagaaactatggaatcttatactctaattaagcccaaatggcaagagaagacatgagtccagctcctaggaacaacattacataagatacaatttgaagcctaaagttacacctcatttttgtactcaagaaatcagcagctatgagatccactaaagccatgtacacaagaattc

SEQ ID NO: 98077 - protein, 148 aa, Arabidopsis thaliana; identical to SEQ ID NO: 35508
  peptide (1)..(148): Ceres Seq. ID no. 13579430
  misc_feature (60)..(135): Pfam Name: 2Fe-2S iron-sulfur cluster binding domain Pfam Description: 2Fe-2S iron-sulfur cluster binding domain
  misc_feature (1)..(148): Homolog of NCBI NO: 15219837 NR Description: ferrodoxin, chloroplast [Arabidopsis thaliana]
  misc_feature (1)..(148): Homolog of NCBI NO: 15220256 NR Description: ferredoxin, chloroplast, putative [Arabidopsis >gi|3023742|sp|O04090|FER2_ARATH Ferredoxin 2, chloroplast
  misc_feature (1)..(118): Homolog of NCBI NO: 16604416 NR Description: At1g10960/T19D16_12 [Arabidopsis thaliana]
  misc_feature (1)..(147): Homolog of NCBI NO: 3023743 NR Description: Ferredoxin I, chloroplast precursor
  misc_feature (1)..(147): Homolog of NCBI NO: 119937 NR Description: Ferredoxin I, chloroplast precursor (Fd I)
  misc_feature (1)..(147): Homolog of NCBI NO: 3023752 NR Description: Ferredoxin I, chloroplast precursor
  misc_feature (1)..(148): Homolog of NCBI NO: 34921349 NR Description: Ferredoxin, chloroplast precursor (PFLP)
  misc_feature (53)..(148): Homolog of NCBI NO: 81707 NR Description: ferredoxin [2Fe-2S] A, leaf - radish
  misc_feature (53)..(148): Homolog of NCBI NO: 947124 NR Description: ferredoxin component a1 [Raphanus sativus var.
  misc_feature (1)..(147): Homolog of NCBI NO: 33520415 NR Description: ferredoxin I [Trifolium pratense]

SEQ ID NO: 98078 - protein, 97 aa, Arabidopsis thaliana; identical to SEQ ID NO: 35509
  peptide (1)..(97): Ceres Seq. ID no. 13579431
  misc_feature (9)..(84): Pfam Name: 2Fe-2S iron-sulfur cluster binding domain Pfam Description: 2Fe-2S iron-sulfur cluster binding domain
  misc_feature (1)..(97): Homolog of NCBI NO: 15219837 NR Description: ferrodoxin, chloroplast [Arabidopsis thaliana]
  misc_feature (1)..(97): Homolog of NCBI NO: 15220256 NR Description: ferredoxin, chloroplast, putative [Arabidopsis >gi|3023742|sp|O04090|FER2_ARATH Ferredoxin 2, chloroplast
  misc_feature (1)..(67): Homolog of NCBI NO: 16604416 NR Description: At1g10960/T19D16_12 [Arabidopsis thaliana]
  misc_feature (1)..(96): Homolog of NCBI NO: 3023743 NR Description: Ferredoxin I, chloroplast precursor
  misc_feature (1)..(96): Homolog of NCBI NO: 119937 NR Description: Ferredoxin I, chloroplast precursor (Fd I)
  misc_feature (1)..(96): Homolog of NCBI NO: 3023752 NR Description: Ferredoxin I, chloroplast precursor
  misc_feature (1)..(97): Homolog of NCBI NO: 34921349 NR Description: Ferredoxin, chloroplast precursor (PFLP)
  misc_feature (2)..(97): Homolog of NCBI NO: 81707 NR Description: ferredoxin [2Fe-2S] A, leaf - radish
  misc_feature (2)..(97): Homolog of NCBI NO: 947124 NR Description: ferredoxin component a1 [Raphanus sativus var.
  misc_feature (1)..(96): Homolog of NCBI NO: 33520415 NR Description: ferredoxin I [Trifolium pratense]

SEQ ID NO: 98079 - protein, 79 aa, Arabidopsis thaliana; identical to SEQ ID NO: 79492
  peptide (1)..(79): Ceres Seq. ID no. 13579432

SEQ ID NO: 98080 - DNA, 505 bp, Arabidopsis thaliana
  misc_feature (1)..(505): Ceres Seq. ID no. 13579433
  misc_feature: MA Experiment ID: 20000180 Result: Up-regulated in Transcription
  misc_feature: MA Experiment 20000180 PARAMETER Experiment Name: At_Germinating_Seeds_P Parameter: Age (hr) Value: 24 vs. 0
  misc_feature: MA Experiment 20000180 PARAMETER Experiment Name: At_Germinating_Seeds_P Parameter: Tissue Value: Germinating Seeds
  misc_feature: MA Experiment ID: 20000185 Result: Down-regulated in Transcription
  misc_feature: MA Experiment 20000185 PARAMETER Experiment Name: At_Roots__P Parameter: Age (day) Value: 7 vs. 21
  misc_feature: MA Experiment 20000185 PARAMETER Experiment Name: At_Roots__P Parameter: Organism Value: A. thaliana
  misc_feature: MA Experiment 20000185 PARAMETER Experiment Name: At_Roots__P Parameter: Tissue Value: Roots vs. Whole Plant
  misc_feature: MA Experiment ID: 20000264 Result: Down-regulated in Transcription
  misc_feature: MA Experiment 20000264 PARAMETER Experiment Name: At_Open_Flower_P Parameter: Age (day) Value: 21
  misc_feature: MA Experiment 20000264 PARAMETER Experiment Name: At_Open_Flower_P Parameter: Plant Line Value: WS
  misc_feature: MA Experiment 20000264 PARAMETER Experiment Name: At_Open_Flower_P Parameter: Tissue Value: Open Flower vs. Whole Plant
  misc_feature: MA Experiment ID: 20000265 Result: Down-regulated in Transcription
  misc_feature: MA Experiment 20000265 PARAMETER Experiment Name: At_Open_Flower_P Parameter: Age (day) Value: 21
  misc_feature: MA Experiment 20000265 PARAMETER Experiment Name: At_Open_Flower_P Parameter: Plant Line Value: WS
  misc_feature: MA Experiment 20000265 PARAMETER Experiment Name: At_Open_Flower_P Parameter: Tissue Value: Closed Flower vs. Whole Plant
  misc_feature: MA Experiment ID: 20000286 Result: Down-regulated in Transcription
  misc_feature: MA Experiment 20000286 PARAMETER Experiment Name: At_Open_Flower_P Parameter: Age (day) Value: 21
  misc_feature: MA Experiment 20000286 PARAMETER Experiment Name: At_Open_Flower_P Parameter: Plant Line Value: WS
  misc_feature: MA Experiment 20000286 PARAMETER Experiment Name: At_Open_Flower_P Parameter: Tissue Value: Half Open vs. Whole Plant
  misc_feature: MA Experiment ID: 20000437 Result: Down-regulated in Transcription
  misc_feature: MA Experiment 20000437 PARAMETER Experiment Name: At_Drought_P Parameter: Age (day) Value: 8
  misc_feature: MA Experiment 20000437 PARAMETER Experiment Name: At_Drought_P Parameter: Organism Value: A. thaliana
  misc_feature: MA Experiment 20000437 PARAMETER Experiment Name: At_Drought_P Parameter: Plant Line Value: WS
  misc_feature: MA Experiment 20000437 PARAMETER Experiment Name: At_Drought_P Parameter: Timepoint (hr) Value: 24
  misc_feature: MA Experiment 20000437 PARAMETER Experiment Name: At_Drought_P Parameter: Tissue Value: Whole Plant
  misc_feature: MA Experiment 20000437 PARAMETER Experiment Name: At_Drought_P Parameter: Treatment Value: Drought vs. No Drought
  misc_feature: MA Experiment ID: 20000438 Result: Up-regulated in Transcription
  misc_feature: MA Experiment 20000438 PARAMETER Experiment Name: At_Shoots__P Parameter: Age (day) Value: 14
  misc_feature: MA Experiment 20000438 PARAMETER Experiment Name: At_Shoots__P Parameter: Tissue Value: Shoots vs. Whole Plant
  misc_feature: MA Experiment ID: 20000439 Result: Down-regulated in Transcription
  misc_feature: MA Experiment 20000439 PARAMETER Experiment Name: At_Roots__P Parameter: Age (day) Value: 14 vs. 21
  misc_feature: MA Experiment 20000439 PARAMETER Experiment Name: At_Roots__P Parameter: Organism Value: A. thaliana
  misc_feature: MA Experiment 20000439 PARAMETER Experiment Name: At_Roots__P Parameter: Tissue Value: Roots vs. Whole Plant
  misc_feature: MA Experiment ID: 20000794 Result: Down-regulated in Transcription
  misc_feature: MA Experiment 20000794 PARAMETER Experiment Name: At_Petals_P Parameter: Age (day) Value: 23-25 days
  misc_feature: MA Experiment 20000794 PARAMETER Experiment Name: At_Petals_P Parameter: Plant Line Value: WS
  misc_feature: MA Experiment 20000794 PARAMETER Experiment Name: At_Petals_P Parameter: Tissue Value: Petals vs. Whole plant
  misc_feature: MA Experiment ID: 20001557 Result: Down-regulated in Transcription
  misc_feature: MA Experiment 20001557 PARAMETER Experiment Name: At_Drought_Soil_Dry_P Parameter: Age (day) Value: 27
  misc_feature: MA Experiment 20001557 PARAMETER Experiment Name: At_Drought_Soil_Dry_P Parameter: Organism Value: A. thaliana
  misc_feature: MA Experiment 20001557 PARAMETER Experiment Name: At_Drought_Soil_Dry_P Parameter: Plant Line Value: WS
  misc_feature: MA Experiment 20001557 PARAMETER Experiment Name: At_Drought_Soil_Dry_P Parameter: Post Timepoint (hr) Value: 3
  misc_feature: MA Experiment 20001557 PARAMETER Experiment Name: At_Drought_Soil_Dry_P Parameter: Post-Treatment Value: Re-Water vs. No Drought
  misc_feature: MA Experiment 20001557 PARAMETER Experiment Name: At_Drought_Soil_Dry_P Parameter: Timepoint (day) Value: 13
  misc_feature: MA Experiment 20001557 PARAMETER Experiment Name: At_Drought_Soil_Dry_P Parameter: Treatment Value: Drought vs. No Drought
  misc_feature: MA Experiment ID: 20001558 Result: Down-regulated in Transcription
  misc_feature: MA Experiment 20001558 PARAMETER Experiment Name: At_Drought_Soil_Dry_P Parameter: Age (day) Value: 27
  misc_feature: MA Experiment 20001558 PARAMETER Experiment Name: At_Drought_Soil_Dry_P Parameter: Organism Value: A. thaliana
  misc_feature: MA Experiment 20001558 PARAMETER Experiment Name: At_Drought_Soil_Dry_P Parameter: Plant Line Value: WS
  misc_feature: MA Experiment 20001558 PARAMETER Experiment Name: At_Drought_Soil_Dry_P Parameter: Post Timepoint (hr) Value: 6
  misc_feature: MA Experiment 20001558 PARAMETER Experiment Name: At_Drought_Soil_Dry_P Parameter: Post-Treatment Value: Re-Water vs. No Drought
  misc_feature: MA Experiment 20001558 PARAMETER Experiment Name: At_Drought_Soil_Dry_P Parameter: Timepoint (day) Value: 13
  misc_feature: MA Experiment 20001558 PARAMETER Experiment Name: At_Drought_Soil_Dry_P Parameter: Treatment Value: Drought vs. No Drought
  misc_feature: MA Experiment ID: 20001757 Result: Up-regulated in Transcription
  misc_feature: MA Experiment 20001757 PARAMETER Experiment Name: At_50mM_NH4NO3_L-to-H_P Parameter: Timepoint (hr) Value: 6
  misc_feature: MA Experiment 20001757 PARAMETER Experiment Name: At_50mM_NH4NO3_L-to-H_P Parameter: Tissue Value: Leaf
  misc_feature: MA Experiment 20001757 PARAMETER Experiment Name: At_50mM_NH4NO3_L-to-H_P Parameter: Treatment Value: 50mM NH4NO3 vs 100mM Mannitol
  misc_feature: MA Experiment ID: 20001904 Result: Down-regulated in Transcription
  misc_feature: MA Experiment 20001904 PARAMETER Experiment Name: At_Drought_Reproduction_P Parameter: Age (day) Value: 37
  misc_feature: MA Experiment 20001904 PARAMETER Experiment Name: At_Drought_Reproduction_P Parameter: Organism Value: A. thaliana
  misc_feature: MA Experiment 20001904 PARAMETER Experiment Name: At_Drought_Reproduction_P Parameter: Plant Line Value: WS
  misc_feature: MA Experiment 20001904 PARAMETER Experiment Name: At_Drought_Reproduction_P Parameter: Timepoint (day) Value: 7
  misc_feature: MA Experiment 20001904 PARAMETER Experiment Name: At_Drought_Reproduction_P Parameter: Tissue Value: Rosettes
  misc_feature: MA Experiment 20001904 PARAMETER Experiment Name: At_Drought_Reproduction_P Parameter: Treatment Value: Drought vs. No Drought
  misc_feature: MA Experiment ID: 20001905 Result: Down-regulated in Transcription
  misc_feature: MA Experiment 20001905 PARAMETER Experiment Name: At_Drought_Reproduction_P Parameter: Age (day) Value: 40
  misc_feature: MA Experiment 20001905 PARAMETER Experiment Name: At_Drought_Reproduction_P Parameter: Organism Value: A. thaliana
  misc_feature: MA Experiment 20001905 PARAMETER Experiment Name: At_Drought_Reproduction_P Parameter: Plant Line Value: WS
  misc_feature: MA Experiment 20001905 PARAMETER Experiment Name: At_Drought_Reproduction_P Parameter: Timepoint (day) Value: 10
  misc_feature: MA Experiment 20001905 PARAMETER Experiment Name: At_Drought_Reproduction_P Parameter: Tissue Value: Rosettes
  misc_feature: MA Experiment 20001905 PARAMETER Experiment Name: At_Drought_Reproduction_P Parameter: Treatment Value: Drought vs. No Drought
  misc_feature: MA Experiment ID: 20001908 Result: Down-regulated in Transcription
  misc_feature: MA Experiment 20001908 PARAMETER Experiment Name: At_Drought_Reproduction_P Parameter: Age (day) Value: 40
  misc_feature: MA Experiment 20001908 PARAMETER Experiment Name: At_Drought_Reproduction_P Parameter: Organism Value: A. thaliana
  misc_feature: MA Experiment 20001908 PARAMETER Experiment Name: At_Drought_Reproduction_P Parameter: Plant Line Value: WS
  misc_feature: MA Experiment 20001908 PARAMETER Experiment Name: At_Drought_Reproduction_P Parameter: Timepoint (day) Value: 10
  misc_feature: MA Experiment 20001908 PARAMETER Experiment Name: At_Drought_Reproduction_P Parameter: Tissue Value: Siliques
  misc_feature: MA Experiment 20001908 PARAMETER Experiment Name: At_Drought_Reproduction_P Parameter: Treatment Value: Drought vs. No Drought
atggcccttatggccgagctccgtgtctttcttgccgatgagaaacgccggttctaggctcgtagtcagggcagccgaagatcctgctccggcttcctcttcttcaaaagattctccggcagctgccgctgctccggatggagctactgccaccaaacccaagccaccaccgattggtcctaagagagggtctaaggtcaagattctaaggagagaatcctattggttcaagaacgttggatcagttgttgccgttgatcaggaccctaagactcgatacccggttgtggtccggttcgcaaaagtcaattacgccaacatatcgaccaacaactatgcattggatgaggtcgaagaagttgcagcttaaatgggagaattcaaaaactctgtgtattctataccggtttatccgtttgtaacttgacccaaaccgtatgtaccgcaaaagtttaccaattatttctcctcatctgaatctcgagggccgatttggccaatcgag

SEQ ID NO: 98081 - protein, 122 aa, Arabidopsis thaliana
  peptide (1)..(122): Ceres Seq. ID no. 13579434
  misc_feature (60)..(121): Pfam Name: Photosystem I reaction centre subunit IV / PsaE Pfam Description: Photosystem I reaction centre subunit IV / PsaE
  misc_feature (6)..(122): Homolog of NCBI NO: 24030202 NR Description: putative photosystem I subunit PSI-E protein
  misc_feature (6)..(122): Homolog of NCBI NO: 30688100 NR Description: photosystem I subunit PSI-E - like protein thaliana] >gi|18203441|sp|Q9S831|PSE1_ARATH Photosystem I
  misc_feature (8)..(122): Homolog of NCBI NO: 22091414 NR Description: putative photosystem I subunit PSI-E [Arabidopsis
  misc_feature (13)..(122): Homolog of NCBI NO: 11692884 NR Description: AT4g28750 [Arabidopsis thaliana]
  misc_feature (8)..(120): Homolog of NCBI NO: 15225331 NR Description: photosystem I reaction center subunit IV -related thaliana] >gi|17433302|sp|Q9S714|PSE2_ARATH Photosystem I
  misc_feature (8)..(120): Homolog of NCBI NO: 21555308 NR Description: Photosystem I reaction center subunit IV B,
  misc_feature (6)..(122): Homolog of NCBI NO: 131176 NR Description: Photosystem I reaction center subunit IV,
  misc_feature (11)..(121): Homolog of NCBI NO: 131178 NR Description: Photosystem I reaction center subunit IV,
  misc_feature (6)..(120): Homolog of NCBI NO: 2499966 NR Description: Photosystem I reaction center subunit IV A,
  misc_feature (18)..(120): Homolog of NCBI NO: 26986114 NR Description: putative photosystem I reaction centre subunit IV
WPLWPSSVSFLPMRNAGSRLVVRAAEDPAPASSSSKDSPAAAAAPDGATATKPKPPPIGPKRGSKVKILRRESYWFKNVGSVVAVDQDPKTRYPVVVRFAKVNYANISTNNYALDEVEEVAA

SEQ ID NO: 98082 - protein, 110 aa, Arabidopsis thaliana
  peptide (1)..(110): Ceres Seq. ID no. 13579435
  misc_feature (48)..(109): Pfam Name: Photosystem I reaction centre subunit IV / PsaE Pfam Description: Photosystem I reaction centre subunit IV / PsaE
  misc_feature (1)..(110): Homolog of NCBI NO: 24030202 NR Description: putative photosystem I subunit PSI-E protein
  misc_feature (1)..(110): Homolog of NCBI NO: 30688100 NR Description: photosystem I subunit PSI-E - like protein thaliana] >gi|18203441|sp|Q9S831|PSE1_ARATH Photosystem I
  misc_feature (1)..(110): Homolog of NCBI NO: 22091414 NR Description: putative photosystem I subunit PSI-E [Arabidopsis
  misc_feature (1)..(110): Homolog of NCBI NO: 11692884 NR Description: AT4g28750 [Arabidopsis thaliana]
  misc_feature (1)..(108): Homolog of NCBI NO: 15225331 NR Description: photosystem I reaction center subunit IV -related thaliana] >gi|17433302|sp|Q9S714|PSE2_ARATH Photosystem I
  misc_feature (1)..(108): Homolog of NCBI NO: 21555308 NR Description: Photosystem I reaction center subunit IV B,
  misc_feature (1)..(110): Homolog of NCBI NO: 131176 NR Description: Photosystem I reaction center subunit IV,
  misc_feature (1)..(109): Homolog of NCBI NO: 131178 NR Description: Photosystem I reaction center subunit IV,
  misc_feature (1)..(108): Homolog of NCBI NO: 2499966 NR Description: Photosystem I reaction center subunit IV A,
  misc_feature (6)..(108): Homolog of NCBI NO: 26986114 NR Description: putative photosystem I reaction centre subunit IV
MRNAGSRLVVRAAEDPAPASSSSKDSPAAAAAPDGATATKPKPPPIGPKRGSKVKILRRESYWFKNVGSVVAVDQDPKTRYPVVVRFAKVNYANISTNNYALDEVEEVAA

SEQ ID NO: 98083 - DNA, 877 bp, Arabidopsis thaliana
  misc_feature (1)..(877): Ceres Seq. ID no. 13579436
  misc_feature: MA Experiment ID: 108434 Result: Up-regulated in Transcription
  misc_feature: MA Experiment 108434 PARAMETER Experiment Name: At_Root_Tips_cDNA_P Parameter: Tissue Value: Root Tips
  misc_feature: MA Experiment ID: 108462 Result: Down-regulated in Transcription
  misc_feature: MA Experiment 108462 PARAMETER Experiment Name: At_Germinating_Seeds_cDNA_P Parameter: Age (day) Value: 2 vs. 0
  misc_feature: MA Experiment 108462 PARAMETER Experiment Name: At_Germinating_Seeds_cDNA_P Parameter: Tissue Value: Germinating Seeds
  misc_feature: MA Experiment ID: 108463 Result: Down-regulated in Transcription
  misc_feature: MA Experiment 108463 PARAMETER Experiment Name: At_Germinating_Seeds_cDNA_P Parameter: Age (day) Value: 3 vs. 0
  misc_feature: MA Experiment 108463 PARAMETER Experiment Name: At_Germinating_Seeds_cDNA_P Parameter: Tissue Value: Germinating Seeds
  misc_feature: MA Experiment ID: 108561 Result: Down-regulated in Transcription
  misc_feature: MA Experiment 108561 PARAMETER Experiment Name: At_100uM_ABA_cDNA_P Parameter: Timepoint (hr) Value: 6
  misc_feature: MA Experiment 108561 PARAMETER Experiment Name: At_100uM_ABA_cDNA_P Parameter: Tissue Value: Aerial
  misc_feature: MA Experiment 108561 PARAMETER Experiment Name: At_100uM_ABA_cDNA_P Parameter: Treatment Value: 100uM ABA vs. No Treatment
  misc_feature: MA Experiment ID: 108585 Result: Down-regulated in Transcription
  misc_feature: MA Experiment 108585 PARAMETER Experiment Name: At_5mM_NaNP_cDNA_P Parameter: Timepoint (hr) Value: 6
  misc_feature: MA Experiment 108585 PARAMETER Experiment Name: At_5mM_NaNP_cDNA_P Parameter: Tissue Value: Aerial
  misc_feature: MA Experiment 108585 PARAMETER Experiment Name: At_5mM_NaNP_cDNA_P Parameter: Treatment Value: null
  misc_feature: MA Experiment ID: 108595 Result: Down-regulated in Transcription
  misc_feature: MA Experiment 108595 PARAMETER Experiment Name: At_Ler-pi_Ovule_cDNA_P Parameter: Plant Line Value: null
  misc_feature: MA Experiment ID: 20000265 Result: Up-regulated in Transcription
  misc_feature: MA Experiment 20000265 PARAMETER Experiment Name: At_Open_Flower_P Parameter: Age (day) Value: 21
  misc_feature: MA Experiment 20000265 PARAMETER Experiment Name: At_Open_Flower_P Parameter: Plant Line Value: WS
  misc_feature: MA Experiment 20000265 PARAMETER Experiment Name: At_Open_Flower_P Parameter: Tissue Value: Closed Flower vs. Whole Plant
  misc_feature: MA Experiment ID: 20000286 Result: Up-regulated in Transcription
  misc_feature: MA Experiment 20000286 PARAMETER Experiment Name: At_Open_Flower_P Parameter: Age (day) Value: 21
  misc_feature: MA Experiment 20000286 PARAMETER Experiment Name: At_Open_Flower_P Parameter: Plant Line Value: WS
  misc_feature: MA Experiment 20000286 PARAMETER Experiment Name: At_Open_Flower_P Parameter: Tissue Value: Half Open vs. Whole Plant
  misc_feature: MA Experiment ID: 20000573 Result: Up-regulated in Transcription
  misc_feature: MA Experiment 20000573 PARAMETER Experiment Name: At_100uM_ABA_Mutants__P Parameter: Organism Value: A. thaliana
  misc_feature: MA Experiment 20000573 PARAMETER Experiment Name: At_100uM_ABA_Mutants__P Parameter: Plant Line Value: CS22 vs. Ler wt
  misc_feature: MA Experiment 20000573 PARAMETER Experiment Name: At_100uM_ABA_Mutants__P Parameter: Timepoint (hr) Value: N/A
  misc_feature: MA Experiment 20000573 PARAMETER Experiment Name: At_100uM_ABA_Mutants__P Parameter: Tissue Value: Whole Plant
  misc_feature: MA Experiment 20000573 PARAMETER Experiment Name: At_100uM_ABA_Mutants__P Parameter: Treatment Value: None
  misc_feature: MA Experiment ID: 20000574 Result: Up-regulated in Transcription
  misc_feature: MA Experiment 20000574 PARAMETER Experiment Name: At_100uM_ABA_Mutants__P Parameter: Organism Value: A. thaliana
  misc_feature: MA Experiment 20000574 PARAMETER Experiment Name: At_100uM_ABA_Mutants__P Parameter: Plant Line Value: CS23 vs. Ler wt
  misc_feature: MA Experiment 20000574 PARAMETER Experiment Name: At_100uM_ABA_Mutants__P Parameter: Timepoint (hr) Value: N/A
  misc_feature: MA Experiment 20000574 PARAMETER Experiment Name: At_100uM_ABA_Mutants__P Parameter: Tissue Value: Whole Plant
  misc_feature: MA Experiment 20000574 PARAMETER Experiment Name: At_100uM_ABA_Mutants__P Parameter: Treatment Value: None
  misc_feature: MA Experiment ID: 20000794 Result: Up-regulated in Transcription
  misc_feature: MA Experiment 20000794 PARAMETER Experiment Name: At_Petals_P Parameter: Age (day) Value: 23-25 days
  misc_feature: MA Experiment 20000794 PARAMETER Experiment Name: At_Petals_P Parameter: Plant Line Value: WS
  misc_feature: MA Experiment 20000794 PARAMETER Experiment Name: At_Petals_P Parameter: Tissue Value: Petals vs. Whole plant
  misc_feature: MA Experiment ID: 20001556 Result: Up-regulated in Transcription
  misc_feature: MA Experiment 20001556 PARAMETER Experiment Name: At_Drought_Soil_Dry_P Parameter: Age (day) Value: 26
  misc_feature: MA Experiment 20001556 PARAMETER Experiment Name: At_Drought_Soil_Dry_P Parameter: Organism Value: A. thaliana
  misc_feature: MA Experiment 20001556 PARAMETER Experiment Name: At_Drought_Soil_Dry_P Parameter: Plant Line Value: WS
  misc_feature: MA Experiment 20001556 PARAMETER Experiment Name: At_Drought_Soil_Dry_P Parameter: Post Timepoint (hr) Value: None
  misc_feature: MA Experiment 20001556 PARAMETER Experiment Name: At_Drought_Soil_Dry_P Parameter: Post-Treatment Value: None
  misc_feature: MA Experiment 20001556 PARAMETER Experiment Name: At_Drought_Soil_Dry_P Parameter: Timepoint (day) Value: 12
  misc_feature: MA Experiment 20001556 PARAMETER Experiment Name: At_Drought_Soil_Dry_P Parameter: Treatment Value: Drought vs. No Drought
  misc_feature: MA Experiment ID: 20001558 Result: Up-regulated in Transcription
  misc_feature: MA Experiment 20001558 PARAMETER Experiment Name: At_Drought_Soil_Dry_P Parameter: Age (day) Value: 27
  misc_feature: MA Experiment 20001558 PARAMETER Experiment Name: At_Drought_Soil_Dry_P Parameter: Organism Value: A. thaliana
  misc_feature: MA Experiment 20001558 PARAMETER Experiment Name: At_Drought_Soil_Dry_P Parameter: Plant Line Value: WS
  misc_feature: MA Experiment 20001558 PARAMETER Experiment Name: At_Drought_Soil_Dry_P Parameter: Post Timepoint (hr) Value: 6
  misc_feature: MA Experiment 20001558 PARAMETER Experiment Name: At_Drought_Soil_Dry_P Parameter: Post-Treatment Value: Re-Water vs. No Drought
  misc_feature: MA Experiment 20001558 PARAMETER Experiment Name: At_Drought_Soil_Dry_P Parameter: Timepoint (day) Value: 13
  misc_feature: MA Experiment 20001558 PARAMETER Experiment Name: At_Drought_Soil_Dry_P Parameter: Treatment Value: Drought vs. No Drought
  misc_feature: MA Experiment ID: 20001757 Result: Up-regulated in Transcription
  misc_feature: MA Experiment 20001757 PARAMETER Experiment Name: At_50mM_NH4NO3_L-to-H_P Parameter: Timepoint (hr) Value: 6
  misc_feature: MA Experiment 20001757 PARAMETER Experiment Name: At_50mM_NH4NO3_L-to-H_P Parameter: Tissue Value: Leaf
  misc_feature: MA Experiment 20001757 PARAMETER Experiment Name: At_50mM_NH4NO3_L-to-H_P Parameter: Treatment Value: 50mM NH4NO3 vs 100mM Mannitol
aatcattttgaagcagaaatcgatttccaaaatggctcttgttcaatccagaacttttccacacctcaacactccgttatcgccgattctatcctccctccatgctccgtcttctctctttatccggagggaaatccgaccggtagccgcgccgttctcctcctccaccgccggaaacttgcccttctcgccgttgacgcgtccgcgaaagcttctctgtcctccgcctcgcggcaagtttgtcagagaagattatcttgtgaagaaattgtcagctcaagaacttcaggaactggtgaaaggagataggaaggtgccgttgattgttgatttttatgcgacatggtgtggaccttgtatcttgatggcccaggaactagaaatgcttgcagtagagtatgagagcaatgcaataatcgtgaaagttgatacagatgatgagtacgagtttgcacgcgacatgcaggttcgagggttacctacattattcttcatcagtcctgacccaagcaaagatgcaatcaggacagaagggctaattccgttacagatgatgcacgatatcattgacaacgagatgtgaagtttttactgagaaaacacttttgtactctttatgatttgattagaatcgccgtaatttaggattggtaccgtgttgtttgcatttgagatgtggtaagaatgtcttctagtttcatagatgaagaatgtagtcttaagacatttgtttgtatgcagtgttcgtttcaatacctaagtgaaaaggttagagctgttgatctggtcggatccaagttatgtggcacatcaaattcacgatccggtccatgtaataacactgtagcttaaacttggaagagagagatatgacgtc

SEQ ID NO: 98084 - protein, 193 aa, Arabidopsis thaliana; identical to SEQ ID NO: 28903
  peptide (1)..(193): Ceres Seq. ID no. 13579437
  misc_feature (11)..(193): Homolog of NCBI NO: 15230779 NR Description: thioredoxin family [Arabidopsis thaliana] thioredoxin, putative [Arabidopsis thaliana] putative thioredoxin [Arabidopsis thaliana]
  misc_feature (11)..(193): Homolog of NCBI NO: 21537179 NR Description: thioredoxin, putative [Arabidopsis thaliana]
  misc_feature (69)..(193): Homolog of NCBI NO: 8489792 NR Description: putative thioredoxin [Lycopersicon esculentum]
  misc_feature (75)..(193): Homolog of NCBI NO: 34904898 NR Description: similar to thioredoxin [Oryza sativa (japonica group)] >gi|24417213|dbj|BAC22569.1| similar to thioredoxin
  misc_feature (92)..(185): Homolog of NCBI NO: 21673615 NR Description: thioredoxin [Chlorobium tepidum TLS]
  misc_feature (100)..(190): Homolog of NCBI NO: 29346866 NR Description: thioredoxin (TRX) [Bacteroides thetaiotaomicron
  misc_feature (83)..(168): Homolog of NCBI NO: 15594407 NR Description: thioredoxin (trxA) [Borrelia burgdorferi]
  misc_feature (31)..(190): Homolog of NCBI NO: 21354 NR Description: thioredoxin M precursor (AA -67 to 114) [Spinacia
  misc_feature (104)..(190): Homolog of NCBI NO: 628902 NR Description: thioredoxin - Chloroflexus aurantiacus
  misc_feature (104)..(190): Homolog of NCBI NO: 1093914 NR Description: thioredoxin

SEQ ID NO: 98085 - protein, 183 aa, Arabidopsis thaliana; identical to SEQ ID NO: 28904
  peptide (1)..(183): Ceres Seq. ID no. 13579438
  misc_feature (1)..(183): Homolog of NCBI NO: 15230779 NR Description: thioredoxin family [Arabidopsis thaliana] thioredoxin, putative [Arabidopsis thaliana] putative thioredoxin [Arabidopsis thaliana]
  misc_feature (1)..(183): Homolog of NCBI NO: 21537179 NR Description: thioredoxin, putative [Arabidopsis thaliana]
  misc_feature (59)..(183): Homolog of NCBI NO: 8489792 NR Description: putative thioredoxin [Lycopersicon esculentum]
  misc_feature (65)..(183): Homolog of NCBI NO: 34904898 NR Description: similar to thioredoxin [Oryza sativa (japonica group)] >gi|24417213|dbj|BAC22569.1| similar to thioredoxin
  misc_feature (82)..(175): Homolog of NCBI NO: 21673615 NR Description: thioredoxin [Chlorobium tepidum TLS]
  misc_feature (90)..(180): Homolog of NCBI NO: 29346866 NR Description: thioredoxin (TRX) [Bacteroides thetaiotaomicron
  misc_feature (73)..(158): Homolog of NCBI NO: 15594407 NR Description: thioredoxin (trxA) [Borrelia burgdorferi]
  misc_feature (21)..(180): Homolog of NCBI NO: 21354 NR Description: thioredoxin M precursor (AA -67 to 114) [Spinacia
  misc_feature (94)..(180): Homolog of NCBI NO: 628902 NR Description: thioredoxin - Chloroflexus aurantiacus
  misc_feature (94)..(180): Homolog of NCBI NO: 1093914 NR Description: thioredoxin

SEQ ID NO: 98086 - protein, 102 aa, Arabidopsis thaliana; identical to SEQ ID NO: 28905
  peptide (1)..(102): Ceres Seq. ID no. 13579439

SEQ ID NO: 98087 - DNA, 1205 bp, Arabidopsis thaliana
  misc_feature (1)..(1205): Ceres Seq. ID no. 13579447
  misc_feature: MA Experiment ID: 108569 Result: Down-regulated in Transcription
  misc_feature: MA Experiment 108569 PARAMETER Experiment Name: At_0.001%_MeJA__cDNA_P Parameter: Timepoint (hr) Value: 6
  misc_feature: MA Experiment 108569 PARAMETER Experiment Name: At_0.001%_MeJA__cDNA_P Parameter: Tissue Value: Aerial
  misc_feature: MA Experiment 108569 PARAMETER Experiment Name: At_0.001%_MeJA__cDNA_P Parameter: Treatment Value: 0.001% MeJA vs. No Treatment
  misc_feature: MA Experiment ID: 108595 Result: Up-regulated in Transcription
  misc_feature: MA Experiment 108595 PARAMETER Experiment Name: At_Ler-pi_Ovule_cDNA_P Parameter: Plant Line Value: null
  misc_feature: MA Experiment ID: 20000184 Result: Down-regulated in Transcription
  misc_feature: MA Experiment 20000184 PARAMETER Experiment Name: At_Shoots__P Parameter: Age (day) Value: 7
  misc_feature: MA Experiment 20000184 PARAMETER Experiment Name: At_Shoots__P Parameter: Tissue Value: Shoots vs. Whole Plant
  misc_feature: MA Experiment ID: 20000227 Result: Down-regulated in Transcription
  misc_feature: MA Experiment 20000227 PARAMETER Experiment Name: At_Root-Tips-vs-Tops_P Parameter: Tissue Value: Root Tips vs. Root Tops
  misc_feature: MA Experiment ID: 20000234 Result: Down-regulated in Transcription
  misc_feature: MA Experiment 20000234 PARAMETER Experiment Name: At_Siliques_P Parameter: Age (day) Value: 21
  misc_feature: MA Experiment 20000234 PARAMETER Experiment Name: At_Siliques_P Parameter: Organism Value: A. thaliana
  misc_feature: MA Experiment 20000234 PARAMETER Experiment Name: At_Siliques_P Parameter: Plant Line Value: WS
  misc_feature: MA Experiment 20000234 PARAMETER Experiment Name: At_Siliques_P Parameter: Tissue Value: Less Than 5mm Siliques vs. Whole Plant
  misc_feature: MA Experiment ID: 20000235 Result: Down-regulated in Transcription
  misc_feature: MA Experiment 20000235 PARAMETER Experiment Name: At_Siliques_P Parameter: Age (day) Value: 21
  misc_feature: MA Experiment 20000235 PARAMETER Experiment Name: At_Siliques_P Parameter: Organism Value: A. thaliana
  misc_feature: MA Experiment 20000235 PARAMETER Experiment Name: At_Siliques_P Parameter: Plant Line Value: WS
  misc_feature: MA Experiment 20000235 PARAMETER Experiment Name: At_Siliques_P Parameter: Tissue Value: 5-10mm Siliques vs. Whole Plant
  misc_feature: MA Experiment ID: 20000264 Result: Down-regulated in Transcription
  misc_feature: MA Experiment 20000264 PARAMETER Experiment Name: At_Open_Flower_P Parameter: Age (day) Value: 21
  misc_feature: MA Experiment 20000264 PARAMETER Experiment Name: At_Open_Flower_P Parameter: Plant Line Value: WS
  misc_feature: MA Experiment 20000264 PARAMETER Experiment Name: At_Open_Flower_P Parameter: Tissue Value: Open Flower vs. Whole Plant
  misc_feature: MA Experiment ID: 20000265 Result: Down-regulated in Transcription
  misc_feature: MA Experiment 20000265 PARAMETER Experiment Name: At_Open_Flower_P Parameter: Age (day) Value: 21
  misc_feature: MA Experiment 20000265 PARAMETER Experiment Name: At_Open_Flower_P Parameter: Plant Line Value: WS
  misc_feature: MA Experiment 20000265 PARAMETER Experiment Name: At_Open_Flower_P Parameter: Tissue Value: Closed Flower vs. Whole Plant
  misc_feature: MA Experiment ID: 20000286 Result: Down-regulated in Transcription
  misc_feature: MA Experiment 20000286 PARAMETER Experiment Name: At_Open_Flower_P Parameter: Age (day) Value: 21
  misc_feature: MA Experiment 20000286 PARAMETER Experiment Name: At_Open_Flower_P Parameter: Plant Line Value: WS
  misc_feature: MA Experiment 20000286 PARAMETER Experiment Name: At_Open_Flower_P Parameter: Tissue Value: Half Open vs. Whole Plant
  misc_feature: MA Experiment ID: 20000437 Result: Up-regulated in Transcription
  misc_feature: MA Experiment 20000437 PARAMETER Experiment Name: At_Drought_P Parameter: Age (day) Value: 8
  misc_feature: MA Experiment 20000437 PARAMETER Experiment Name: At_Drought_P Parameter: Organism Value: A. thaliana
  misc_feature: MA Experiment 20000437 PARAMETER Experiment Name: At_Drought_P Parameter: Plant Line Value: WS
  misc_feature: MA Experiment 20000437 PARAMETER Experiment Name: At_Drought_P Parameter: Timepoint (hr) Value: 24
  misc_feature: MA Experiment 20000437 PARAMETER Experiment Name: At_Drought_P Parameter: Tissue Value: Whole Plant
  misc_feature: MA Experiment 20000437 PARAMETER Experiment Name: At_Drought_P Parameter: Treatment Value: Drought vs. No Drought
  misc_feature: MA Experiment ID: 20000438 Result: Down-regulated in Transcription
  misc_feature: MA Experiment 20000438 PARAMETER Experiment Name: At_Shoots__P Parameter: Age (day) Value: 14
  misc_feature: MA Experiment 20000438 PARAMETER Experiment Name: At_Shoots__P Parameter: Tissue Value: Shoots vs. Whole Plant
  misc_feature: MA Experiment ID: 20001248 Result: Up-regulated in Transcription
  misc_feature: MA Experiment 20001248 PARAMETER Experiment Name: At_Far-red-induction_P Parameter: Age (day) Value: 7
  misc_feature: MA Experiment 20001248 PARAMETER Experiment Name: At_Far-red-induction_P Parameter: Light Value: Far-red vs. White
  misc_feature: MA Experiment 20001248 PARAMETER Experiment Name: At_Far-red-induction_P Parameter: Organism Value: A. thaliana
  misc_feature: MA Experiment 20001248 PARAMETER Experiment Name: At_Far-red-induction_P Parameter: Plant Line Value: Columbia
  misc_feature: MA Experiment 20001248 PARAMETER Experiment Name: At_Far-red-induction_P Parameter: Timepoint (hr) Value: 4
  misc_feature: MA Experiment 20001248 PARAMETER Experiment Name: At_Far-red-induction_P Parameter: Tissue Value: Whole Plant
ctcttatttactttagtcctctcgaatcccataaagtccacaactctctccttgtagagagagagattttatggcggtggagctcatgactcggaattacatctccggcgtcggagctgatagcttcgccgttcaagaagcagctgcttcaggactcaaaagtatcgaaaatttcatcggtttaatgtctcgtgatagctttaactctgatcagccatcttcttcttccgcctccgcctccgcctccgccgccgcagatcttgaatcagctcgtaacacaacggcggacgcggctgtttcaaagtttaaaagagtcatatctctcttagatcgaactcgaaccggacacgcccggtttagacgtgctccggttcatgttatttctccggttcttttacaagaagaaccaaaaacgacgccgtttcagtctcctcttcctcctccgccgcaaatgatccgaaaaggttcgttttcttcatcgatgaaaacgattgatttctcatctctctcctctgtaacaacggaatcagacaaccagaagaagattcatcatcatcaacgtccctctgaaacggcgccgtttgcgtctcaaactcaaagcctctccacgacggtctcgtctttctcaaaatcaacaaagagaaaatgtaactctgagaatcttctcaccggaaaatgcgcttccgcttcttcctccggtcgttgtcattgctcgaagaaaagaaagataaaacagaggagaataattagggttccggcgataagtgcaaaaatgtccgatgtaccaccggacgattattcatggaggaaatacggacaaaaaccaattaaaggatctccacatccaagaggatattataagtgtagtagcgtaagaggttgtccagcacgtaaacatgttgagagagcagctgatgattcgtccatgttgattgttacttatgaaggagatcataatcattctctctccgccgctgatctcgccggagccgccgttgctgatcttattttggaatcgtcttgaaaagaacaaatctttatttaaggcttttataatataaatttagatccttacttagtgaagtactcaaactatgaatgaaatcaatgtaatcaaaatcaaaaagcttttgctaaatttcgatttgttagttttttggattgttaaattataaattgtgatatattcatcatgtttacttgtt

SEQ ID NO: 98088 - protein, 317 aa, Arabidopsis thaliana; identical to SEQ ID NO: 24612
  peptide (1)..(317): Ceres Seq. ID no. 13579448
  misc_feature (239)..(299): Pfam Name: WRKY DNA -binding domain Pfam Description: WRKY DNA -binding domain
  misc_feature (1)..(317): Homolog of NCBI NO: 15227812 NR Description: WRKY family transcription factor [Arabidopsis >gi|20978770|sp|O22176|WR15_ARATH Probable WRKY transcription
  misc_feature (126)..(299): Homolog of NCBI NO: 15233752 NR Description: WRKY family transcription factor [Arabidopsis >gi|20978794|sp|Q9STX0|WRK7_ARATH Probable WRKY transcription
  misc_feature (1)..(106): Homolog of NCBI NO: 15233752 NR Description: WRKY family transcription factor [Arabidopsis >gi|20978794|sp|Q9STX0|WRK7_ARATH Probable WRKY transcription
  misc_feature (1)..(307): Homolog of NCBI NO: 4894963 NR Description: DNA-binding protein WRKY3 [Avena sativa]
  misc_feature (37)..(310): Homolog of NCBI NO: 38346908 NR Description: OSJNBb0015N08.8 [Oryza sativa (japonica
  misc_feature (1)..(298): Homolog of NCBI NO: 38175580 NR Description: putative DNA-binding protein NtWRKY3 [Oryza
  misc_feature (116)..(317): Homolog of NCBI NO: 10798760 NR Description: WRKY transcription factor Nt-SubD48 [Nicotiana
  misc_feature (100)..(301): Homolog of NCBI NO: 7488950 NR Description: DNA-binding protein WRKY3 - parsley
  misc_feature (17)..(302): Homolog of NCBI NO: 38568048 NR Description: OSJNBa0065J03.18 [Oryza sativa (japonica
  misc_feature (1)..(317): Homolog of NCBI NO: 22329054 NR Description: WRKY family transcription factor [Arabidopsis >gi|29839685|sp|Q9SV15|WR11_ARATH Probable WRKY transcription

SEQ ID NO: 98089 - protein, 312 aa, Arabidopsis thaliana; identical to SEQ ID NO: 24613
  peptide (1)..(312): Ceres Seq. ID no. 13579449
  misc_feature (234)..(294): Pfam Name: WRKY DNA -binding domain Pfam Description: WRKY DNA -binding domain
  misc_feature (1)..(312): Homolog of NCBI NO: 15227812 NR Description: WRKY family transcription factor [Arabidopsis >gi|20978770|sp|O22176|WR15_ARATH Probable WRKY transcription
  misc_feature (121)..(294): Homolog of NCBI NO: 15233752 NR Description: WRKY family transcription factor [Arabidopsis >gi|20978794|sp|Q9STX0|WRK7_ARATH Probable WRKY transcription
  misc_feature (1)..(101): Homolog of NCBI NO: 15233752 NR Description: WRKY family transcription factor [Arabidopsis >gi|20978794|sp|Q9STX0|WRK7_ARATH Probable WRKY transcription
  misc_feature (1)..(302): Homolog of NCBI NO: 4894963 NR Description: DNA-binding protein WRKY3 [Avena sativa]
  misc_feature (32)..(305): Homolog of NCBI NO: 38346908 NR Description: OSJNBb0015N08.8 [Oryza sativa (japonica
  misc_feature (1)..(293): Homolog of NCBI NO: 38175580 NR Description: putative DNA-binding protein NtWRKY3 [Oryza
  misc_feature (111)..(312): Homolog of NCBI NO: 10798760 NR Description: WRKY transcription factor Nt-SubD48 [Nicotiana
  misc_feature (95)..(296): Homolog of NCBI NO: 7488950 NR Description: DNA-binding protein WRKY3 - parsley
  misc_feature (12)..(297): Homolog of NCBI NO: 38568048 NR Description: OSJNBa0065J03.18 [Oryza sativa (japonica
  misc_feature (1)..(312): Homolog of NCBI NO: 22329054 NR Description: WRKY family transcription factor [Arabidopsis >gi|29839685|sp|Q9SV15|WR11_ARATH Probable WRKY transcription

SEQ ID NO: 98090 - protein, 279 aa, Arabidopsis thaliana; identical to SEQ ID NO: 24614
  peptide (1)..(279): Ceres Seq. ID no. 13579450
  misc_feature (201)..(261): Pfam Name: WRKY DNA -binding domain Pfam Description: WRKY DNA -binding domain
  misc_feature (1)..(279): Homolog of NCBI NO: 15227812 NR Description: WRKY family transcription factor [Arabidopsis >gi|20978770|sp|O22176|WR15_ARATH Probable WRKY transcription
  misc_feature (88)..(261): Homolog of NCBI NO: 15233752 NR Description: WRKY family transcription factor [Arabidopsis >gi|20978794|sp|Q9STX0|WRK7_ARATH Probable WRKY transcription
  misc_feature (1)..(68): Homolog of NCBI NO: 15233752 NR Description: WRKY family transcription factor [Arabidopsis >gi|20978794|sp|Q9STX0|WRK7_ARATH Probable WRKY transcription
  misc_feature (1)..(269): Homolog of NCBI NO: 4894963 NR Description: DNA-binding protein WRKY3 [Avena sativa]
  misc_feature (1)..(272): Homolog of NCBI NO: 38346908 NR Description: OSJNBb0015N08.8 [Oryza sativa (japonica
  misc_feature (1)..(260): Homolog of NCBI NO: 38175580 NR Description: putative DNA-binding protein NtWRKY3 [Oryza
  misc_feature (78)..(279): Homolog of NCBI NO: 10798760 NR Description: WRKY transcription factor Nt-SubD48 [Nicotiana
  misc_feature (62)..(263): Homolog of NCBI NO: 7488950 NR Description: DNA-binding protein WRKY3 - parsley
  misc_feature (1)..(264): Homolog of NCBI NO: 38568048 NR Description: OSJNBa0065J03.18 [Oryza sativa (japonica
  misc_feature (1)..(279): Homolog of NCBI NO: 22329054 NR Description: WRKY family transcription factor [Arabidopsis >gi|29839685|sp|Q9SV15|WR11_ARATH Probable WRKY transcription

SEQ ID NO: 98091 - DNA, 1618 bp, Arabidopsis thaliana
  misc_feature (1)..(1618): Ceres Seq. ID no. 13579470
  misc_feature: MA Experiment ID: 20000355 Result: Down-regulated in Transcription
  misc_feature: MA Experiment 20000355 PARAMETER Experiment Name: At_Siliques_Sub_P Parameter: Age (day) Value: 21
  misc_feature: MA Experiment 20000355 PARAMETER Experiment Name: At_Siliques_Sub_P Parameter: Organism Value: A. thaliana
  misc_feature: MA Experiment 20000355 PARAMETER Experiment Name: At_Siliques_Sub_P Parameter: Plant Line Value: WS
  misc_feature: MA Experiment 20000355 PARAMETER Experiment Name: At_Siliques_Sub_P Parameter: Tissue Value: Less Than 5mm Siliques vs. Whole Plant
gtgtttcttctcagcaggactaaaaggaaaaaaggaaatcgattgctaatgtcgggtgagaaacaagcggaggagtcaatagtagtctccggggaggatgaggtggccggtagaaaagtggaagattcagcggcggaggaggatattgacggcaacgggggcaatggatttagtatgaagagcttcctctggcatggcgggtccgcttgggacgcctggtttagctgtgcatcaaatcaagtggcacaagtgctgttgacgctgccgtattcgttctcgcagttgggaatgttatcaggaatattgcttcaaatattctatgggttaatgggatcttggactgcttatctcatcagtgttctttacgtcgagtatcgtgcccgtatggagaaacaagaagccaaatccttcaaaaaccacgttattcaatggtttgaagtgcttgatgggctgctgggtccgtactggaaagcagcggggctcgcatttaattgcaccttcttgttattcggatcagtcatccagctcattgcttgtgctagcaatatatattacataaacgataggttagacaagaggacatggacttatatatttggggcttgctgtgccacgaccgttttcataccatctttccacaattaccgtatttggtctttcctcggccttggcatgaccacctacaccgcttggtacctcaccatcgcctcttttctccatggtcaggcggagggtgtgacacattccggtccaaccaagcttgtgttgtactttaccggagccaccaacatcctctataccttcggtggacacgctgtgaccgtggaaataatgcatgcgatgtggaaaccaaggaagtttaagagcatctacttgatggcaactctgtacgtcttcacattaacgcttccgtcagcctccgccgtctactgggctttcggcgaccaacttctcaaccactcaaacgctttctctctcctccctaaaacgcgtttccgtgacaccgccgttatcctcatgctcatccatcagtttataacgttcgggtttgcgtgtacaccattgtacttcgtatgggaaaaagcgatcggaatgcaccacacaaagagcttatgtctaagagcgctggtgaggctaccggtggtggttccgatatggtttttggcaatcatctttccctttttcgggccaataaactcggcagttggagccttacttgttaccttcaccgtctatatcatccctgccttagcccacatgctcacgtaccgcaccgcctctgcccaacgcggcggagaaaccaccgttttttatccctagctgggctggagtttacgtgataaacgctttcatagtggtttgggtcctagttctcgggttcgggtttggcggatgggccagtatgaccaacttcatcaggcaaattgatacttttggcctctttgccaaatgctaccaatgcaaaccacctccagctccgatcgccgccggagctcaccaccgccgttagttaacgtaagcgacgtgtgatagtgtgattgaacccttttttctttaattctgtatgaaagaaaatatctgtaattcagtgatttagtgaatctatgctataaaattt

SEQ ID NO: 98092 - protein, 439 aa, Arabidopsis thaliana
  peptide (1)..(439): Ceres Seq. ID no. 13579471
  misc_feature (17)..(438): Homolog of NCBI NO: 15240927 NR Description: amino acid permease, putative [Arabidopsis
  misc_feature (17)..(438): Homolog of NCBI NO: 5881784 NR Description: putative AUX1-like permease [Arabidopsis thaliana]
  misc_feature (17)..(438): Homolog of NCBI NO: 37651177 NR Description: AUX1-like auxin influx carrier protein [Pisum
  misc_feature (25)..(438): Homolog of NCBI NO: 18404642 NR Description: amino acid permease, putative (AUX1) [Arabidopsis
  misc_feature (17)..(438): Homolog of NCBI NO: 10800920 NR Description: putative AUX1-like permease [Medicago truncatula]
  misc_feature (17)..(430): Homolog of NCBI NO: 21586468 NR Description: auxin influx carrier protein [Medicago truncatula]
  misc_feature (17)..(438): Homolog of NCBI NO: 6650716 NR Description: AUX1-like protein [Populus tremula x Populus
  misc_feature (17)..(438): Homolog of NCBI NO: 25956260 NR Description: AUX1-like auxin transport protein [Cucumis
  misc_feature (17)..(439): Homolog of NCBI NO: 10441742 NR Description: putative AUX1-like permease [Populus tremula x
  misc_feature (17)..(430): Homolog of NCBI NO: 10800918 NR Description: putative AUX1-like permease [Medicago truncatula]
VFLLSRTKRKKGNRLLMSGEKQAEESIVVSGEDEVAGRKVEDSAAEEDIDGNGGNGFSMKSFLWHGGSAWDAWFSCASNQVAQVLLTLPYSFSQLGMLSGILLQIFYGLMGSWTAYLISVLYVEYRARMEKQEAKSFKNHVIQWFEVLDGLLGPYWKAAGLAFNCTFLLFGSVIQLIACASNIYYINDRLDKRTWTYIFGACCATTVFIPSFHNYRIWSFLGLGMTTYTAWYLTIASFLHGQAEGVTHSGPTKLVLYFTGATNILYTFGGHAVTVEIMHAMWKPRKFKSIYLMATLYVFTLTLPSASAVYWAFGDQLLNHSNAFSLLPKTRFRDTAVILMLIHQFITFGFACTPLYFVWEKAIGMHHTKSLCLRALVRLPVVVPIWFLAIIFPFFGPINSAVGALLVTFTVYIIPALAHMLTYRTASAQRGGETTVFYP

SEQ ID NO: 98093 - protein, 423 aa, Arabidopsis thaliana
  peptide (1)..(423): Ceres Seq. ID no. 13579472
  misc_feature (1)..(422): Homolog of NCBI NO: 15240927 NR Description: amino acid permease, putative [Arabidopsis
  misc_feature (1)..(422): Homolog of NCBI NO: 5881784 NR Description: putative AUX1-like permease [Arabidopsis thaliana]
  misc_feature (1)..(422): Homolog of NCBI NO: 37651177 NR Description: AUX1-like auxin influx carrier protein [Pisum
  misc_feature (9)..(422): Homolog of NCBI NO: 18404642 NR Description: amino acid permease, putative (AUX1) [Arabidopsis
  misc_feature (1)..(422): Homolog of NCBI NO: 10800920 NR Description: putative AUX1-like permease [Medicago truncatula]
  misc_feature (1)..(414): Homolog of NCBI NO: 21586468 NR Description: auxin influx carrier protein [Medicago truncatula]
  misc_feature (1)..(422): Homolog of NCBI NO: 6650716 NR Description: AUX1-like protein [Populus tremula x Populus
  misc_feature (1)..(422): Homolog of NCBI NO: 25956260 NR Description: AUX1-like auxin transport protein [Cucumis
  misc_feature (1)..(423): Homolog of NCBI NO: 10441742 NR Description: putative AUX1-like permease [Populus tremula x
  misc_feature (1)..(414): Homolog of NCBI NO: 10800918 NR Description: putative AUX1-like permease [Medicago truncatula]
MSGEKQAEESIVVSGEDEVAGRKVEDSAAEEDIDGNGGNGFSMKSFLWHGGSAWDAWFSCASNQVAQVLLTLPYSFSQLGMLSGILLQIFYGLMGSWTAYLISVLYVEYRARMEKQEAKSFKNHVIQWFEVLDGLLGPYWKAAGLAFNCTFLLFGSVIQLIACASNIYYINDRLDKRTWTYIFGACCATTVFIPSFHNYRIWSFLGLGMTTYTAWYLTIASFLHGQAEGVTHSGPTKLVLYFTGATNILYTFGGHAVTVEIMHAMWKPRKFKSIYLMATLYVFTLTLPSASAVYWAFGDQLLNHSNAFSLLPKTRFRDTAVILMLIHQFITFGFACTPLYFVWEKAIGMHHTKSLCLRALVRLPVVVPIWFLAIIFPFFGPINSAVGALLVTFTVYIIPALAHMLTYRTASAQRGGETTVFYP

SEQ ID NO: 98094 - protein, 381 aa, Arabidopsis thaliana
  peptide (1)..(381): Ceres Seq. ID no. 13579473
  misc_feature (1)..(380): Homolog of NCBI NO: 15240927 NR Description: amino acid permease, putative [Arabidopsis
  misc_feature (1)..(380): Homolog of NCBI NO: 5881784 NR Description: putative AUX1-like permease [Arabidopsis thaliana]
  misc_feature (1)..(380): Homolog of NCBI NO: 37651177 NR Description: AUX1-like auxin influx carrier protein [Pisum
  misc_feature (1)..(380): Homolog of NCBI NO: 18404642 NR Description: amino acid permease, putative (AUX1) [Arabidopsis
  misc_feature (1)..(380): Homolog of NCBI NO: 10800920 NR Description: putative AUX1-like permease [Medicago truncatula]
  misc_feature (1)..(372): Homolog of NCBI NO: 21586468 NR Description: auxin influx carrier protein [Medicago truncatula]
  misc_feature (1)..(380): Homolog of NCBI NO: 6650716 NR Description: AUX1-like protein [Populus tremula x Populus
  misc_feature (1)..(380): Homolog of NCBI NO: 25956260 NR Description: AUX1-like auxin transport protein [Cucumis
  misc_feature (1)..(381): Homolog of NCBI NO: 10441742 NR Description: putative AUX1-like permease [Populus tremula x
  misc_feature (1)..(372): Homolog of NCBI NO: 10800918 NR Description: putative AUX1-like permease [Medicago truncatula]
MKSFLWHGGSAWDAWFSCASNQVAQVLLTLPYSFSQLGMLSGILLQIFYGLMGSWTAYLISVLYVEYRARMEKQEAKSFKNHVIQWFEVLDGLLGPYWKAAGLAFNCTFLLFGSVIQLIACASNIYYINDRLDKRTWTYIFGACCATTVFIPSFHNYRIWSFLGLGMTTYTAWYLTIASFLHGQAEGVTHSGPTKLVLYFTGATNILYTFGGHAVTVEIMHAMWKPRKFKSIYLMATLYVFTLTLPSASAVYWAFGDQLLNHSNAFSLLPKTRFRDTAVILMLIHQFITFGFACTPLYFVWEKAIGMHHTKSLCLRALVRLPVVVPIWFLAIIFPFFGPINSAVGALLVTFTVYIIPALAHMLTYRTASAQRGGETTVFYP

SEQ ID NO: 98095 - DNA, 2044 bp, Arabidopsis thaliana
  misc_feature (1)..(2044): Ceres Seq. ID no. 13579477
  misc_feature: MA Experiment ID: 108434 Result: Up-regulated in Transcription
  misc_feature: MA Experiment 108434 PARAMETER Experiment Name: At_Root_Tips_cDNA_P Parameter: Tissue Value: Root Tips
  misc_feature: MA Experiment ID: 108461 Result: Up-regulated in Transcription
  misc_feature: MA Experiment 108461 PARAMETER Experiment Name: At_Germinating_Seeds_cDNA_P Parameter: Age (day) Value: 1 vs. 0
  misc_feature: MA Experiment 108461 PARAMETER Experiment Name: At_Germinating_Seeds_cDNA_P Parameter: Tissue Value: Germinating Seeds
  misc_feature: MA Experiment ID: 20000111 Result: Down-regulated in Transcription
  misc_feature: MA Experiment 20000111 PARAMETER Experiment Name: At_42deg_Heat_cDNA_P Parameter: Temperature (deg C) Value: 42 vs. 22
  misc_feature: MA Experiment 20000111 PARAMETER Experiment Name: At_42deg_Heat_cDNA_P Parameter: Timepoint (hr) Value: 6
  misc_feature: MA Experiment 20000111 PARAMETER Experiment Name: At_42deg_Heat_cDNA_P Parameter: Tissue Value: Aerial
  misc_feature: MA Experiment ID: 20000112 Result: Down-regulated in Transcription
  misc_feature: MA Experiment 20000112 PARAMETER Experiment Name: At_42deg_Heat_cDNA_P Parameter: Temperature (deg C) Value: 42 vs. 22
  misc_feature: MA Experiment 20000112 PARAMETER Experiment Name: At_42deg_Heat_cDNA_P Parameter: Timepoint (hr) Value: 2
  misc_feature: MA Experiment 20000112 PARAMETER Experiment Name: At_42deg_Heat_cDNA_P Parameter: Tissue Value: Aerial
  misc_feature: MA Experiment ID: 20000180 Result: Up-regulated in Transcription
  misc_feature: MA Experiment 20000180 PARAMETER Experiment Name: At_Germinating_Seeds_P Parameter: Age (hr) Value: 24 vs. 0
  misc_feature: MA Experiment 20000180 PARAMETER Experiment Name: At_Germinating_Seeds_P Parameter: Tissue Value: Germinating Seeds
  misc_feature: MA Experiment ID: 20000184 Result: Down-regulated in Transcription
  misc_feature: MA Experiment 20000184 PARAMETER Experiment Name: At_Shoots__P Parameter: Age (day) Value: 7
  misc_feature: MA Experiment 20000184 PARAMETER Experiment Name: At_Shoots__P Parameter: Tissue Value: Shoots vs. Whole Plant
  misc_feature: MA Experiment ID: 20000224 Result: Up-regulated in Transcription
gaattcggcacgagcaaaaacaaaaactctaccaagtgaagaagaaagagaagtgtcacatctctctctctatctctttgatccaaacaaattccctcatatatctctgctctctcttcccaatattcttcctttttcttcaatcgagattttatcgctttttgattcgagaatttcgaaatcggaacccaccaccaccaccctccatcgtcgccaacagatccaacggttctctgattatttttatttgaaaattgtcttctttgttctccctctcgctgggtttgattctgagattgattaatctaaatgggtcgcatcgagatttagaagaaaagggaaatgttggcaatggagaaagaatttgattcaaagcttgttcttcaagggaactcatccaacggtgctaatgtttctagaagcaaaagcttctcctttaaagctcctcaagaaaatttcaccagccatgatttcgaatttggcaagatctatggtgttggttcttactctaaggttgttagggcaaagaagaaggaaactggaactgtgtatgctttaaagattatggacaaaaagtttatcaccaaggagaataaaactgcttatgtgaaattggaaaggattgttcttgatcaacttgaacatcctgggatcattaaactttacttcacgtttcaagacacatcctcactatatatggcacttgaatcttgtgagggtggcgagcttttcgaccaaataaccagaaaaggtcggctatcggaggatgaagctcggttctacactgcagaagttgtggatgctcttgagtatatacatagtatgggactgattcatcgagatattaagccggagaatctgttgctgacttcagatggacacattaagattgcggattttggaagtgtaaagccgatgcaggatagccagatcacagttctacctaatgcagcttctgacgataaggcgtgcacttttgtcgggactgctgcatatgttcctccagaagttctcaactcctctcccgcaactttcgggaatgatctttgggctctcggctgcactctctatcagatgctttcggggacttccccatttaaagatgcaagtgaatggctgattttccaaagaattatagccagagatataaagttcccaaatcatttttcagaagcagcaagagacctcatcgaccggttgctggataccgagccaagcagaaggccaggtgctggctcagaaggttatgttgctcttaagagacatcctttctttaatggagttgactggaagaatctaaggtcccagactcctccaaaactagctccagatcctgcgtctcagacagcatctcccgagagggatgacacacatggttctccatggaacctgacacatattggagattctttagccacacagaacgaggggcacagtgctcctcctacatcttctgaatcatcgggttccataactcgacttgcttcaatagactcttttgattcaagatggcaacagtttttagagccaggagaatcggttctgatgatatcagcggtgaagaagcttcagaaaataacgagcaagaaggtgcagctaatactcaccaacaaacccaagctgatctatgtcgacccgtcaaaactagttgtgaaaggaaacattatatggtctgataactcgaatgacctcaacgttgtagtcactagcccttcacatttcaagatttgcacgccaaagaaggttttatcatttgaagacgcaaaacagagagcttcagtgtggaaaaaggcaatcgagactcttcagaaccgctgagacaaactccactgaagaatggttctgttaatttcctcgttggtgttttgtctttccttcaagattttaaactgaccaaactccattcttcatatgttttttctatttcacgcatccttgaaaagaccagttggacacaaaactgaaaaactgctttttgaatcctttgtataagtcaaacaaatgtattacaaggttaaagttacatgagatactgaattcaagc

SEQ ID NO: 98096 - protein, 491 aa, Arabidopsis thaliana; identical to SEQ ID NO: 27923
  peptide (1)..(491): Ceres Seq. ID no. 13579478
  misc_feature (44)..(311): Pfam Name: Protein kinase domain Pfam Description: Protein kinase domain
  misc_feature (1)..(491): Homolog of NCBI NO: 18414583 NR Description: 3-phosphoinositide-dependent protein kinase,
  misc_feature (4)..(491): Homolog of NCBI NO: 11357147 NR Description: 3-phosphoinositide-dependent protein kinase-1
  misc_feature (1)..(491): Homolog of NCBI NO: 30681369 NR Description: 3-phosphoinositide-dependent protein kinase,
  misc_feature (4)..(491): Homolog of NCBI NO: 8567784 NR Description: 3-phosphoinositide-dependent protein kinase-1,
  misc_feature (4)..(489): Homolog of NCBI NO: 34908708 NR Description: putative 3-phosphoinositide-dependent protein
  misc_feature (144)..(489): Homolog of NCBI NO: 5001830 NR Description: 3-phosphoinositide-dependent protein kinase-1
  misc_feature (34)..(486): Homolog of NCBI NO: 38524443 NR Description: phosphoinositide dependent kinase-1 [Asterina
  misc_feature (43)..(376): Homolog of NCBI NO: 4505695 NR Description: 3-phosphoinositide dependent protein kinase-1;
  misc_feature (390)..(486): Homolog of NCBI NO: 4505695 NR Description: 3-phosphoinositide dependent protein kinase-1;
  misc_feature (43)..(365): Homolog of NCBI NO: 13592023 NR Description: 3-phosphoinositide dependent protein kinase-1

SEQ ID NO: 98097 - protein, 488 aa, Arabidopsis thaliana; identical to SEQ ID NO: 27924
  peptide (1)..(488): Ceres Seq. ID no. 13579479
  misc_feature (41)..(308): Pfam Name: Protein kinase domain Pfam Description: Protein kinase domain
  misc_feature (1)..(488): Homolog of NCBI NO: 18414583 NR Description: 3-phosphoinositide-dependent protein kinase,
  misc_feature (1)..(488): Homolog of NCBI NO: 11357147 NR Description: 3-phosphoinositide-dependent protein kinase-1
  misc_feature (1)..(488): Homolog of NCBI NO: 30681369 NR Description: 3-phosphoinositide-dependent protein kinase,
  misc_feature (1)..(488): Homolog of NCBI NO: 8567784 NR Description: 3-phosphoinositide-dependent protein kinase-1,
  misc_feature (1)..(486): Homolog of NCBI NO: 34908708 NR Description: putative 3-phosphoinositide-dependent protein
  misc_feature (141)..(486): Homolog of NCBI NO: 5001830 NR Description: 3-phosphoinositide-dependent protein kinase-1
  misc_feature (31)..(483): Homolog of NCBI NO: 38524443 NR Description: phosphoinositide dependent kinase-1 [Asterina
  misc_feature (40)..(373): Homolog of NCBI NO: 4505695 NR Description: 3-phosphoinositide dependent protein kinase-1;
  misc_feature (387)..(483): Homolog of NCBI NO: 4505695 NR Description: 3-phosphoinositide dependent protein kinase-1;
  misc_feature (40)..(362): Homolog of NCBI NO: 13592023 NR Description: 3-phosphoinositide dependent protein kinase-1

SEQ ID NO: 98098 - protein, 417 aa, Arabidopsis thaliana; identical to SEQ ID NO: 27925
  peptide (1)..(417): Ceres Seq. ID no. 13579480
  misc_feature (1)..(237): Pfam Name: Protein kinase domain Pfam Description: Protein kinase domain
  misc_feature (1)..(417): Homolog of NCBI NO: 18414583 NR Description: 3-phosphoinositide-dependent protein kinase,
  misc_feature (1)..(417): Homolog of NCBI NO: 11357147 NR Description: 3-phosphoinositide-dependent protein kinase-1
  misc_feature (1)..(417): Homolog of NCBI NO: 30681369 NR Description: 3-phosphoinositide-dependent protein kinase,
  misc_feature (1)..(417): Homolog of NCBI NO: 8567784 NR Description: 3-phosphoinositide-dependent protein kinase-1,
  misc_feature (1)..(415): Homolog of NCBI NO: 34908708 NR Description: putative 3-phosphoinositide-dependent protein
  misc_feature (70)..(415): Homolog of NCBI NO: 5001830 NR Description: 3-phosphoinositide-dependent protein kinase-1
  misc_feature (1)..(412): Homolog of NCBI NO: 38524443 NR Description: phosphoinositide dependent kinase-1 [Asterina
  misc_feature (1)..(302): Homolog of NCBI NO: 4505695 NR Description: 3-phosphoinositide dependent protein kinase-1;
  misc_feature (316)..(412): Homolog of NCBI NO: 4505695 NR Description: 3-phosphoinositide dependent protein kinase-1;
  misc_feature (1)..(291): Homolog of NCBI NO: 13592023 NR Description: 3-phosphoinositide dependent protein kinase-1

SEQ ID NO: 98099 - DNA, 1131 bp, Arabidopsis thaliana
  misc_feature (1)..(1131): Ceres Seq. ID no. 13579481
  misc_feature: MA Experiment ID: 108434 Result: Up-regulated in Transcription
  misc_feature: MA Experiment 108434 PARAMETER Experiment Name: At_Root_Tips_cDNA_P Parameter: Tissue Value: Root Tips
  misc_feature: MA Experiment ID: 108462 Result: Down-regulated in Transcription
  misc_feature: MA Experiment 108462 PARAMETER Experiment Name: At_Germinating_Seeds_cDNA_P Parameter: Age (day) Value: 2 vs. 0
  misc_feature: MA Experiment 108462 PARAMETER Experiment Name: At_Germinating_Seeds_cDNA_P Parameter: Tissue Value: Germinating Seeds
  misc_feature: MA Experiment ID: 108463 Result: Down-regulated in Transcription
  misc_feature: MA Experiment 108463 PARAMETER Experiment Name: At_Germinating_Seeds_cDNA_P Parameter: Age (day) Value: 3 vs. 0
  misc_feature: MA Experiment 108463 PARAMETER Experiment Name: At_Germinating_Seeds_cDNA_P Parameter: Tissue Value: Germinating Seeds
  misc_feature: MA Experiment ID: 108464 Result: Down-regulated in Transcription
  misc_feature: MA Experiment 108464 PARAMETER Experiment Name: At_Germinating_Seeds_cDNA_P Parameter: Age (day) Value: 4 vs. 0
  misc_feature: MA Experiment 108464 PARAMETER Experiment Name: At_Germinating_Seeds_cDNA_P Parameter: Tissue Value: Germinating Seeds
  misc_feature: MA Experiment ID: 108489 Result: Up-regulated in Transcription
  misc_feature: MA Experiment ID: 20000111 Result: Down-regulated in Transcription
  misc_feature: MA Experiment 20000111 PARAMETER Experiment Name: At_42deg_Heat_cDNA_P Parameter: Temperature (deg C) Value: 42 vs. 22
  misc_feature: MA Experiment 20000111 PARAMETER Experiment Name: At_42deg_Heat_cDNA_P Parameter: Timepoint (hr) Value: 6
  misc_feature: MA Experiment 20000111 PARAMETER Experiment Name: At_42deg_Heat_cDNA_P Parameter: Tissue Value: Aerial
  misc_feature: MA Experiment ID: 20000113 Result: Down-regulated in Transcription
  misc_feature: MA Experiment 20000113 PARAMETER Experiment Name: At_42deg_Heat_cDNA_P Parameter: Temperature (deg C) Value: 42 vs. 22
  misc_feature: MA Experiment 20000113 PARAMETER Experiment Name: At_42deg_Heat_cDNA_P Parameter: Timepoint (hr) Value: 8
  misc_feature: MA Experiment 20000113 PARAMETER Experiment Name: At_42deg_Heat_cDNA_P Parameter: Tissue Value: Aerial
  misc_feature: MA Experiment ID: 20000173 Result: Down-regulated in Transcription
  misc_feature: MA Experiment 20000173 PARAMETER Experiment Name: At_42deg_Heat_P Parameter: Age (day) Value: 14
  misc_feature: MA Experiment 20000173 PARAMETER Experiment Name: At_42deg_Heat_P Parameter: Organism Value: A. thaliana
  misc_feature: MA Experiment 20000173 PARAMETER Experiment Name: At_42deg_Heat_P Parameter: Plant Line Value: WS
  misc_feature: MA Experiment 20000173 PARAMETER Experiment Name: At_42deg_Heat_P Parameter: Temperature (deg C) Value: 42 vs. 22
  misc_feature: MA Experiment 20000173 PARAMETER Experiment Name: At_42deg_Heat_P Parameter: Timepoint (hr) Value: 6
  misc_feature: MA Experiment 20000173 PARAMETER Experiment Name: At_42deg_Heat_P Parameter: Tissue Value: Aerial
  misc_feature: MA Experiment ID: 20000180 Result: Down-regulated in Transcription
  misc_feature: MA Experiment 20000180 PARAMETER Experiment Name: At_Germinating_Seeds_P Parameter: Age (hr) Value: 24 vs. 0
  misc_feature: MA Experiment 20000180 PARAMETER Experiment Name: At_Germinating_Seeds_P Parameter: Tissue Value: Germinating Seeds
  misc_feature: MA Experiment ID: 20001451 Result: Up-regulated in Transcription
  misc_feature: MA Experiment 20001451 PARAMETER Experiment Name: At_Far-red-induction_P Parameter: Age (day) Value: 7
  misc_feature: MA Experiment 20001451 PARAMETER Experiment Name: At_Far-red-induction_P Parameter: Light Value: Far-red vs. White
  misc_feature: MA Experiment 20001451 PARAMETER Experiment Name: At_Far-red-induction_P Parameter: Organism Value: A. thaliana
  misc_feature: MA Experiment 20001451 PARAMETER Experiment Name: At_Far-red-induction_P Parameter: Plant Line Value: Columbia
  misc_feature: MA Experiment 20001451 PARAMETER Experiment Name: At_Far-red-induction_P Parameter: Timepoint (hr) Value: 24
  misc_feature: MA Experiment 20001451 PARAMETER Experiment Name: At_Far-red-induction_P Parameter: Tissue Value: Whole Plant
  misc_feature: MA Experiment ID: 20001557 Result: Up-regulated in Transcription
  misc_feature: MA Experiment 20001557 PARAMETER Experiment Name: At_Drought_Soil_Dry_P Parameter: Age (day) Value: 27
  misc_feature: MA Experiment 20001557 PARAMETER Experiment Name: At_Drought_Soil_Dry_P Parameter: Organism Value: A. thaliana
  misc_feature: MA Experiment 20001557 PARAMETER Experiment Name: At_Drought_Soil_Dry_P Parameter: Plant Line Value: WS
  misc_feature: MA Experiment 20001557 PARAMETER Experiment Name: At_Drought_Soil_Dry_P Parameter: Post Timepoint (hr) Value: 3
  misc_feature: MA Experiment 20001557 PARAMETER Experiment Name: At_Drought_Soil_Dry_P Parameter: Post-Treatment Value: Re-Water vs. No Drought
  misc_feature: MA Experiment 20001557 PARAMETER Experiment Name: At_Drought_Soil_Dry_P Parameter: Timepoint (day) Value: 13
  misc_feature: MA Experiment 20001557 PARAMETER Experiment Name: At_Drought_Soil_Dry_P Parameter: Treatment Value: Drought vs. No Drought
  misc_feature: MA Experiment ID: 20001560 Result: Up-regulated in Transcription
  misc_feature: MA Experiment 20001560 PARAMETER Experiment Name: At_Drought_Soil_Dry_P Parameter: Age (day) Value: 28
  misc_feature: MA Experiment 20001560 PARAMETER Experiment Name: At_Drought_Soil_Dry_P Parameter: Organism Value: A. thaliana
  misc_feature: MA Experiment 20001560 PARAMETER Experiment Name: At_Drought_Soil_Dry_P Parameter: Plant Line Value: WS
  misc_feature: MA Experiment 20001560 PARAMETER Experiment Name: At_Drought_Soil_Dry_P Parameter: Post Timepoint (hr) Value: None
  misc_feature: MA Experiment 20001560 PARAMETER Experiment Name: At_Drought_Soil_Dry_P Parameter: Post-Treatment Value: None
  misc_feature: MA Experiment 20001560 PARAMETER Experiment Name: At_Drought_Soil_Dry_P Parameter: Timepoint (day) Value: 14
  misc_feature: MA Experiment 20001560 PARAMETER Experiment Name: At_Drought_Soil_Dry_P Parameter: Treatment Value: Drought vs. No Drought
tggatttaagggtttttgttcttagtaaaaaaaagtaaggatttgtgtccatggcagctttgcaaacgcttcgtgaatggatcggtatccagcagttcccacctgctactcaatctaaattgctcgagatccttgggaagtataaagaagaggatgtgagctcgctaacggtccttgtaatggggaaaggtggtgttggaaagtcatcaactgtgaattcagttataggcgagaaagctgctgcagttagtactttccagtctgaaggactgaggcctaccttggtctctcgcacaagatcgggatttacattgaatatcatcgacactcctggtcttattgagggaggatatgtgaatgatcaagccatcaacattataaaacgatttctcctcaacatgactatagatgtgctactatacgtagaccgtttggatgtgtaccgggtggatgaccttgataggcaagttgtcggtgctataactgatgcatttggtaaagagatatggaagaagtctgctcttgttctcacccatgctcagttctctccaccagacgggttaaattataaccactttgtctccaaaagatctaatgctcttctaaaagttatccagacaggcgctcaactgaagaaacaggatttgcagggtttttctattcctgtcattcttgttgagaacagcggaagatgccataagaacgaaagcgatgaaaagattcttccatgcgggactagttggattcccaatctgttcaacaaaatcacagagatctcttttaatggcaacaaggcgattcatgttgacaagaaactggtcgaagggccaaacccaaacgaaagaggaaaaaaactgattcctttaatgtttgcattccaatacttgctggtgatgaagccattggttcgagcaatcaagtccgatgtttcgagagagagtaaaccggcgtgggagctgcgagactccggtttagcaagtcgaaggtcttgagttgtggacacgagttttgtttggtttgtttgtctatctgagagattgttctgtagttgaaattgtgatacaactcgagaaatgtggttcacagataattactgtcgcaaagttctctcatcttaattacatcttcttt

SEQ ID NO: 98100 - protein, 313 aa, Arabidopsis thaliana
  peptide (1)..(313): Ceres Seq. ID no. 13579482
  misc_feature (39)..(236): Pfam Name: AIG1 family Pfam Description: AIG1 family
  misc_feature (1)..(313): Homolog of NCBI NO: 15238381 NR Description: GTP-binding protein (gb|AAD09203.1) [Arabidopsis
  misc_feature (1)..(313): Homolog of NCBI NO: 21594231 NR Description: GTP-binding protein [Arabidopsis thaliana]
  misc_feature (1)..(313): Homolog of NCBI NO: 25091410 NR Description: Translocase of chloroplast 34 (34 kDa chloroplast
  misc_feature (5)..(307): Homolog of NCBI NO: 25091388 NR Description: Translocase of chloroplast 34 (34 kDa chloroplast
  misc_feature (5)..(307): Homolog of NCBI NO: 1076522 NR Description: chloroplast import-associated protein IAP36,
  misc_feature (8)..(312): Homolog of NCBI NO: 6689637 NR Description: Toc34-1 protein [Zea mays]
  misc_feature (8)..(312): Homolog of NCBI NO: 7259224 NR Description: Toc34-2 protein [Zea mays]
  misc_feature (7)..(299): Homolog of NCBI NO: 15217705 NR Description: GTP-binding protein -related [Arabidopsis
  misc_feature (7)..(299): Homolog of NCBI NO: 14596163 NR Description: similar to GTP-binding protein [Arabidopsis
  misc_feature (7)..(299): Homolog of NCBI NO: 32765535 NR Description: TOC33 [Brassica napus]
MAALQTLREWIGIQQFPPATQSKLLEILGKYKEEDVSSLTVLVMGKGGVGKSSTVNSVIGEKAAAVSTFQSEGLRPTLVSRTRSGFTLNIIDTPGLIEGGYVNDQAINIIKRFLLNMTIDVLLYVDRLDVYRVDDLDRQVVGAITDAFGKEIWKKSALVLTHAQFSPPDGLNYNHFVSKRSNALLKVIQTGAQLKKQDLQGFSIPVILVENSGRCHKNESDEKILPCGTSWIPNLFNKITEISFNGNKAIHVDKKLVEGPNPNERGKKLIPLMFAFQYLLVMKPLVRAIKSDVSRESKPAWELRDSGLASRRS

SEQ ID NO: 98101 - protein, 270 aa, Arabidopsis thaliana
  peptide (1)..(270): Ceres Seq. ID no. 13579483
  misc_feature (1)..(193): Pfam Name: AIG1 family Pfam Description: AIG1 family
  misc_feature (1)..(270): Homolog of NCBI NO: 15238381 NR Description: GTP-binding protein (gb|AAD09203.1) [Arabidopsis
  misc_feature (1)..(270): Homolog of NCBI NO: 21594231 NR Description: GTP-binding protein [Arabidopsis thaliana]
  misc_feature (1)..(270): Homolog of NCBI NO: 25091410 NR Description: Translocase of chloroplast 34 (34 kDa chloroplast
  misc_feature (1)..(264): Homolog of NCBI NO: 25091388 NR Description: Translocase of chloroplast 34 (34 kDa chloroplast
  misc_feature (1)..(264): Homolog of NCBI NO: 1076522 NR Description: chloroplast import-associated protein IAP36,
  misc_feature (1)..(269): Homolog of NCBI NO: 6689637 NR Description: Toc34-1 protein [Zea mays]
  misc_feature (1)..(269): Homolog of NCBI NO: 7259224 NR Description: Toc34-2 protein [Zea mays]
  misc_feature (1)..(256): Homolog of NCBI NO: 15217705 NR Description: GTP-binding protein -related [Arabidopsis
  misc_feature (1)..(256): Homolog of NCBI NO: 14596163 NR Description: similar to GTP-binding protein [Arabidopsis
  misc_feature (1)..(256): Homolog of NCBI NO: 32765535 NR Description: TOC33 [Brassica napus]
MGKGGVGKSSTVNSVIGEKAAAVSTFQSEGLRPTLVSRTRSGFTLNIIDTPGLIEGGYVNDQAINIIKRFLLNMTIDVLLYVDRLDVYRVDDLDRQVVGAITDAFGKEIWKKSALVLTHAQFSPPDGLNYNHFVSKRSNALLKVIQTGAQLKKQDLQGFSIPVILVENSGRCHKNESDEKILPCGTSWIPNLFNKITEISFNGNKAIHVDKKLVEGPNPNERGKKLIPLMFAFQYLLVMKPLVRAIKSDVSRESKPAWELRDSGLASRRS

SEQ ID NO: 98102 - protein, 197 aa, Arabidopsis thaliana; identical to SEQ ID NO: 27602
  peptide (1)..(197): Ceres Seq. ID no. 13579484
  misc_feature (1)..(120): Pfam Name: AIG1 family Pfam Description: AIG1 family
  misc_feature (1)..(197): Homolog of NCBI NO: 15238381 NR Description: GTP-binding protein (gb|AAD09203.1) [Arabidopsis
  misc_feature (1)..(197): Homolog of NCBI NO: 21594231 NR Description: GTP-binding protein [Arabidopsis thaliana]
  misc_feature (1)..(197): Homolog of NCBI NO: 25091410 NR Description: Translocase of chloroplast 34 (34 kDa chloroplast
  misc_feature (1)..(191): Homolog of NCBI NO: 25091388 NR Description: Translocase of chloroplast 34 (34 kDa chloroplast
  misc_feature (1)..(191): Homolog of NCBI NO: 1076522 NR Description: chloroplast import-associated protein IAP36,
  misc_feature (1)..(196): Homolog of NCBI NO: 6689637 NR Description: Toc34-1 protein [Zea mays]
  misc_feature (1)..(196): Homolog of NCBI NO: 7259224 NR Description: Toc34-2 protein [Zea mays]
  misc_feature (1)..(183): Homolog of NCBI NO: 15217705 NR Description: GTP-binding protein -related [Arabidopsis
  misc_feature (1)..(183): Homolog of NCBI NO: 14596163 NR Description: similar to GTP-binding protein [Arabidopsis
  misc_feature (1)..(183): Homolog of NCBI NO: 32765535 NR Description: TOC33 [Brassica napus]

SEQ ID NO: 98103 - DNA, 935 bp, Arabidopsis thaliana
  misc_feature (1)..(935): Ceres Seq. ID no. 13579485
  misc_feature: MA Experiment ID: 108434 Result: Up-regulated in Transcription
  misc_feature: MA Experiment 108434 PARAMETER Experiment Name: At_Root_Tips_cDNA_P Parameter: Tissue Value: Root Tips
  misc_feature: MA Experiment ID: 108461 Result: Up-regulated in Transcription
  misc_feature: MA Experiment 108461 PARAMETER Experiment Name: At_Germinating_Seeds_cDNA_P Parameter: Age (day) Value: 1 vs. 0
  misc_feature: MA Experiment 108461 PARAMETER Experiment Name: At_Germinating_Seeds_cDNA_P Parameter: Tissue Value: Germinating Seeds
  misc_feature: MA Experiment ID: 108488 Result: Up-regulated in Transcription
  misc_feature: MA Experiment ID: 20000069 Result: Up-regulated in Transcription
  misc_feature: MA Experiment 20000069 PARAMETER Experiment Name: At_100uM_ABA_Mutants_cDNA_P Parameter: Plant Line Value: CS23
  misc_feature: MA Experiment 20000069 PARAMETER Experiment Name: At_100uM_ABA_Mutants_cDNA_P Parameter: Timepoint (hr) Value: 6
  misc_feature: MA Experiment 20000069 PARAMETER Experiment Name: At_100uM_ABA_Mutants_cDNA_P Parameter: Tissue Value: Aerial
  misc_feature: MA Experiment 20000069 PARAMETER Experiment Name: At_100uM_ABA_Mutants_cDNA_P Parameter: Treatment Value: 100uM ABA vs. No Treatment
  misc_feature: MA Experiment ID: 20000072 Result: Up-regulated in Transcription
  misc_feature: MA Experiment 20000072 PARAMETER Experiment Name: At_100uM_ABA_Mutants_cDNA_P Parameter: Plant Line Value: CS8105
  misc_feature: MA Experiment 20000072 PARAMETER Experiment Name: At_100uM_ABA_Mutants_cDNA_P Parameter: Timepoint (hr) Value: 6
  misc_feature: MA Experiment 20000072 PARAMETER Experiment Name: At_100uM_ABA_Mutants_cDNA_P Parameter: Tissue Value: Aerial
  misc_feature: MA Experiment 20000072 PARAMETER Experiment Name: At_100uM_ABA_Mutants_cDNA_P Parameter: Treatment Value: 100uM ABA vs. No Treatment
  misc_feature: MA Experiment ID: 20000086 Result: Up-regulated in Transcription
  misc_feature: MA Experiment 20000086 PARAMETER Experiment Name: At_100uM_ABA_Mutants_cDNA_P Parameter: Plant Line Value: CS22
  misc_feature: MA Experiment 20000086 PARAMETER Experiment Name: At_100uM_ABA_Mutants_cDNA_P Parameter: Timepoint (hr) Value: 6
  misc_feature: MA Experiment 20000086 PARAMETER Experiment Name: At_100uM_ABA_Mutants_cDNA_P Parameter: Tissue Value: Aerial
  misc_feature: MA Experiment 20000086 PARAMETER Experiment Name: At_100uM_ABA_Mutants_cDNA_P Parameter: Treatment Value: 100uM ABA vs. No Treatment
  misc_feature: MA Experiment ID: 20000087 Result: Up-regulated in Transcription
  misc_feature: MA Experiment 20000087 PARAMETER Experiment Name: At_100uM_ABA_Mutants_cDNA_P Parameter: Plant Line Value: WS
  misc_feature: MA Experiment 20000087 PARAMETER Experiment Name: At_100uM_ABA_Mutants_cDNA_P Parameter: Timepoint (hr) Value: 6
  misc_feature: MA Experiment 20000087 PARAMETER Experiment Name: At_100uM_ABA_Mutants_cDNA_P Parameter: Tissue Value: Aerial
  misc_feature: MA Experiment 20000087 PARAMETER Experiment Name: At_100uM_ABA_Mutants_cDNA_P Parameter: Treatment Value: 100uM ABA vs. No Treatment
  misc_feature: MA Experiment ID: 20000089 Result: Up-regulated in Transcription
  misc_feature: MA Experiment ID: 20000090 Result: Up-regulated in Transcription
  misc_feature: MA Experiment ID: 20000117 Result: Up-regulated in Transcription
  misc_feature: MA Experiment 20000117 PARAMETER Experiment Name: At_100uM_ABA_Mutants_cDNA_P Parameter: Plant Line Value: Columbia
  misc_feature: MA Experiment 20000117 PARAMETER Experiment Name: At_100uM_ABA_Mutants_cDNA_P Parameter: Timepoint (hr) Value: 6
  misc_feature: MA Experiment 20000117 PARAMETER Experiment Name: At_100uM_ABA_Mutants_cDNA_P Parameter: Tissue Value: Aerial
  misc_feature: MA Experiment 20000117 PARAMETER Experiment Name: At_100uM_ABA_Mutants_cDNA_P Parameter: Treatment Value: 100uM ABA vs. No Treatment
  misc_feature: MA Experiment ID: 20000173 Result: Down-regulated in Transcription
  misc_feature: MA Experiment 20000173 PARAMETER Experiment Name: At_42deg_Heat_P Parameter: Age (day) Value: 14
  misc_feature: MA Experiment 20000173 PARAMETER Experiment Name: At_42deg_Heat_P Parameter: Organism Value: A. thaliana
  misc_feature: MA Experiment 20000173 PARAMETER Experiment Name: At_42deg_Heat_P Parameter: Plant Line Value: WS
  misc_feature: MA Experiment 20000173 PARAMETER Experiment Name: At_42deg_Heat_P Parameter: Temperature (deg C) Value: 42 vs. 22
  misc_feature: MA Experiment 20000173 PARAMETER Experiment Name: At_42deg_Heat_P Parameter: Timepoint (hr) Value: 6
  misc_feature: MA Experiment 20000173 PARAMETER Experiment Name: At_42deg_Heat_P Parameter: Tissue Value: Aerial
  misc_feature: MA Experiment ID: 20000439 Result: Up-regulated in Transcription
  misc_feature: MA Experiment 20000439 PARAMETER Experiment Name: At_Roots__P Parameter: Age (day) Value: 14 vs. 21
  misc_feature: MA Experiment 20000439 PARAMETER Experiment Name: At_Roots__P Parameter: Organism Value: A. thaliana
  misc_feature: MA Experiment 20000439 PARAMETER Experiment Name: At_Roots__P Parameter: Tissue Value: Roots vs. Whole Plant
  misc_feature: MA Experiment ID: 20000794 Result: Down-regulated in Transcription
  misc_feature: MA Experiment 20000794 PARAMETER Experiment Name: At_Petals_P Parameter: Age (day) Value: 23-25 days
  misc_feature: MA Experiment 20000794 PARAMETER Experiment Name: At_Petals_P Parameter: Plant Line Value: WS
  misc_feature: MA Experiment 20000794 PARAMETER Experiment Name: At_Petals_P Parameter: Tissue Value: Petals vs. Whole plant
  misc_feature: MA Experiment ID: 20001905 Result: Down-regulated in Transcription
  misc_feature: MA Experiment 20001905 PARAMETER Experiment Name: At_Drought_Reproduction_P Parameter: Age (day) Value: 40
  misc_feature: MA Experiment 20001905 PARAMETER Experiment Name: At_Drought_Reproduction_P Parameter: Organism Value: A. thaliana
  misc_feature: MA Experiment 20001905 PARAMETER Experiment Name: At_Drought_Reproduction_P Parameter: Plant Line Value: WS
  misc_feature: MA Experiment 20001905 PARAMETER Experiment Name: At_Drought_Reproduction_P Parameter: Timepoint (day) Value: 10
  misc_feature: MA Experiment 20001905 PARAMETER Experiment Name: At_Drought_Reproduction_P Parameter: Tissue Value: Rosettes
  misc_feature: MA Experiment 20001905 PARAMETER Experiment Name: At_Drought_Reproduction_P Parameter: Treatment Value: Drought vs. No Drought
  misc_feature: MA Experiment ID: 20001911 Result: Down-regulated in Transcription
  misc_feature: MA Experiment 20001911 PARAMETER Experiment Name: At_Drought_Reproduction_P Parameter: Age (day) Value: 40
  misc_feature: MA Experiment 20001911 PARAMETER Experiment Name: At_Drought_Reproduction_P Parameter: Organism Value: A. thaliana
  misc_feature: MA Experiment 20001911 PARAMETER Experiment Name: At_Drought_Reproduction_P Parameter: Plant Line Value: WS
  misc_feature: MA Experiment 20001911 PARAMETER Experiment Name: At_Drought_Reproduction_P Parameter: Timepoint (day) Value: 10
  misc_feature: MA Experiment 20001911 PARAMETER Experiment Name: At_Drought_Reproduction_P Parameter: Tissue Value: Flowers
  misc_feature: MA Experiment 20001911 PARAMETER Experiment Name: At_Drought_Reproduction_P Parameter: Treatment Value: Drought vs. No Drought
tcatcatcactcagatctagtagttccacaaactcacattgggtcgttgaccagaaaaacacacagagaaaggagaaaaacatggaggagttggcgcatccgtacgttccgagagatctgaacctacccggatacgtaccaatctcaatgtcaatgtcctccatcgtctctatctacctcggttcttccctccttgttgtctccctcgtctggcttctcttcgggaggaagaaagctaaacttgataagttgcttatgtgttggtggacattcactggtctcactcatgttattctcgagggctatttcgttttctcccctgagtttttcaaggacaacacttctgcttatcttgctgaagtttggaaagaatatagcaaaggtgattcgagatacgtaggtagagattctgcagttgtatctgttgaagggatcactgctgttatcgttggcccagcttctctcctagctatttatgccattgctaaggagaagtcgtatagctacgtgcttcagcttgcgatttcggtttgccagctctacggatgtttggtttatttcattactgctatcttggaaggagacaactttgccacaaactctttctactattactcctactacatcggggctaactgttggtgggtcttgataccttcactcatttctttccgttgctggaaaaagatttgtgcagctgctgccattgccaacaacaacgtcgagacaaagacgaagaagaaaacccgttgaaccaaggatcaaagactcttttatctcttcaggttactgctgttatagcaaatgaacatgagtctccttttgcggataatttatccattttaaaaactttagctatgttgtctgtctctcttacagcaataaacttgtgaggataatttatccatttttcatatgatatttgcacttttgtt

SEQ ID NO: 98104 - protein, 250 aa, Arabidopsis thaliana
  peptide (1)..(250): Ceres Seq. ID no. 13579486
  misc_feature (47)..(241): Pfam Name: Emopamil binding protein Pfam Description: Emopamil binding protein
  misc_feature (28)..(250): Homolog of NCBI NO: 15223758 NR Description: C-8,7 sterol isomerase [Arabidopsis thaliana]
  misc_feature (28)..(250): Homolog of NCBI NO: 4098989 NR Description: phenylalkylamine binding protein homolog
  misc_feature (28)..(250): Homolog of NCBI NO: 21554213 NR Description: C-8,7 sterol isomerase [Arabidopsis thaliana]
  misc_feature (33)..(244): Homolog of NCBI NO: 34894044 NR Description: putative C-8,7 sterol isomerase [Oryza sativa
  misc_feature (33)..(248): Homolog of NCBI NO: 33417065 NR Description: Unknown (protein for MGC:68833) [Xenopus laevis]
  misc_feature (27)..(248): Homolog of NCBI NO: 16923992 NR Description: phenylalkylamine Ca2+ antagonist (emopamil)
  misc_feature (33)..(248): Homolog of NCBI NO: 6681255 NR Description: phenylalkylamine Ca2+ antagonist (emopamil)
  misc_feature (33)..(247): Homolog of NCBI NO: 18202586 NR Description: 3-beta-hydroxysteroid-delta(8),delta(7)-isomerase
  misc_feature (33)..(222): Homolog of NCBI NO: 12848900 NR Description: unnamed protein product [Mus musculus]
  misc_feature (33)..(248): Homolog of NCBI NO: 5729810 NR Description: emopamil binding protein (sterol isomerase);
SSSLRSSSSTNSHWVVDQKNTQRKEKNMEELAHPYVPRDLNLPGYVPISMSMSSIVSIYLGSSLLVVSLVWLLFGRKKAKLDKLLMCWWTFTGLTHVILEGYFVFSPEFFKDNTSAYLAEVWKEYSKGDSRYVGRDSAVVSVEGITAVIVGPASLLAIYAIAKEKSYSYVLQLAISVCQLYGCLVYFITAILEGDNFATNSFYYYSYYIGANCWWVLIPSLISFRCWKKICAAAAIANNNVETKTKKKTR

SEQ ID NO: 98105 - protein, 223 aa, Arabidopsis thaliana; identical to SEQ ID NO: 76370
  peptide (1)..(223): Ceres Seq. ID no. 13579487
  misc_feature (20)..(214): Pfam Name: Emopamil binding protein Pfam Description: Emopamil binding protein
  misc_feature (1)..(223): Homolog of NCBI NO: 15223758 NR Description: C-8,7 sterol isomerase [Arabidopsis thaliana]
  misc_feature (1)..(223): Homolog of NCBI NO: 4098989 NR Description: phenylalkylamine binding protein homolog
  misc_feature (1)..(223): Homolog of NCBI NO: 21554213 NR Description: C-8,7 sterol isomerase [Arabidopsis thaliana]
  misc_feature (6)..(217): Homolog of NCBI NO: 34894044 NR Description: putative C-8,7 sterol isomerase [Oryza sativa
  misc_feature (6)..(221): Homolog of NCBI NO: 33417065 NR Description: Unknown (protein for MGC:68833) [Xenopus laevis]
  misc_feature (1)..(221): Homolog of NCBI NO: 16923992 NR Description: phenylalkylamine Ca2+ antagonist (emopamil)
  misc_feature (6)..(221): Homolog of NCBI NO: 6681255 NR Description: phenylalkylamine Ca2+ antagonist (emopamil)
  misc_feature (6)..(220): Homolog of NCBI NO: 18202586 NR Description: 3-beta-hydroxysteroid-delta(8),delta(7)-isomerase
  misc_feature (6)..(195): Homolog of NCBI NO: 12848900 NR Description: unnamed protein product [Mus musculus]
  misc_feature (6)..(221): Homolog of NCBI NO: 5729810 NR Description: emopamil binding protein (sterol isomerase);

SEQ ID NO: 98106 - protein, 201 aa, Arabidopsis thaliana; identical to SEQ ID NO: 26204
  peptide (1)..(201): Ceres Seq. ID no. 13579488
  misc_feature (1)..(192): Pfam Name: Emopamil binding protein Pfam Description: Emopamil binding protein
  misc_feature (1)..(201): Homolog of NCBI NO: 15223758 NR Description: C-8,7 sterol isomerase [Arabidopsis thaliana]
  misc_feature (1)..(201): Homolog of NCBI NO: 4098989 NR Description: phenylalkylamine binding protein homolog
  misc_feature (1)..(201): Homolog of NCBI NO: 21554213 NR Description: C-8,7 sterol isomerase [Arabidopsis thaliana]
  misc_feature (1)..(195): Homolog of NCBI NO: 34894044 NR Description: putative C-8,7 sterol isomerase [Oryza sativa
  misc_feature (1)..(199): Homolog of NCBI NO: 33417065 NR Description: Unknown (protein for MGC:68833) [Xenopus laevis]
  misc_feature (1)..(199): Homolog of NCBI NO: 16923992 NR Description: phenylalkylamine Ca2+ antagonist (emopamil)
  misc_feature (1)..(199): Homolog of NCBI NO: 6681255 NR Description: phenylalkylamine Ca2+ antagonist (emopamil)
  misc_feature (1)..(198): Homolog of NCBI NO: 18202586 NR Description: 3-beta-hydroxysteroid-delta(8),delta(7)-isomerase
  misc_feature (1)..(173): Homolog of NCBI NO: 12848900 NR Description: unnamed protein product [Mus musculus]
  misc_feature (1)..(199): Homolog of NCBI NO: 5729810 NR Description: emopamil binding protein (sterol isomerase);

SEQ ID NO: 98107 - DNA, 1512 bp, Arabidopsis thaliana
  misc_feature (1)..(1512): Ceres Seq. ID no. 13579489
  misc_feature: MA Experiment ID: 108434 Result: Down-regulated in Transcription
  misc_feature: MA Experiment 108434 PARAMETER Experiment Name: At_Root_Tips_cDNA_P Parameter: Tissue Value: Root Tips
  misc_feature: MA Experiment ID: 108577 Result: Down-regulated in Transcription
  misc_feature: MA Experiment 108577 PARAMETER Experiment Name: At_42deg_Heat_cDNA_P Parameter: Temperature (deg C) Value: 42 vs. 22
  misc_feature: MA Experiment 108577 PARAMETER Experiment Name: At_42deg_Heat_cDNA_P Parameter: Timepoint (hr) Value: 6
  misc_feature: MA Experiment 108577 PARAMETER Experiment Name: At_42deg_Heat_cDNA_P Parameter: Tissue Value: Aerial
  misc_feature: MA Experiment ID: 108585 Result: Up-regulated in Transcription
  misc_feature: MA Experiment 108585 PARAMETER Experiment Name: At_5mM_NaNP_cDNA_P Parameter: Timepoint (hr) Value: 6
  misc_feature: MA Experiment 108585 PARAMETER Experiment Name: At_5mM_NaNP_cDNA_P Parameter: Tissue Value: Aerial
  misc_feature: MA Experiment 108585 PARAMETER Experiment Name: At_5mM_NaNP_cDNA_P Parameter: Treatment Value: null
  misc_feature: MA Experiment ID: 108667 Result: Up-regulated in Transcription
  misc_feature: MA Experiment 108667 PARAMETER Experiment Name: At_2mM_SA_cDNA_P Parameter: Plant Line Value: WS
  misc_feature: MA Experiment 108667 PARAMETER Experiment Name: At_2mM_SA_cDNA_P Parameter: Timepoint (hr) Value: 1
  misc_feature: MA Experiment 108667 PARAMETER Experiment Name: At_2mM_SA_cDNA_P Parameter: Treatment Value: 2mM SA vs. No Treatment
  misc_feature: MA Experiment ID: 108668 Result: Up-regulated in Transcription
  misc_feature: MA Experiment 108668 PARAMETER Experiment Name: At_2mM_SA_cDNA_P Parameter: Plant Line Value: WS
  misc_feature: MA Experiment 108668 PARAMETER Experiment Name: At_2mM_SA_cDNA_P Parameter: Timepoint (hr) Value: 6
  misc_feature: MA Experiment 108668 PARAMETER Experiment Name: At_2mM_SA_cDNA_P Parameter: Treatment Value: 2mM SA vs. No Treatment
  misc_feature: MA Experiment ID: 20000088 Result: Up-regulated in Transcription
  misc_feature: MA Experiment 20000088 PARAMETER Experiment Name: At_100uM_ABA_Mutants_cDNA_P Parameter: Plant Line Value: Landsberg
  misc_feature: MA Experiment 20000088 PARAMETER Experiment Name: At_100uM_ABA_Mutants_cDNA_P Parameter: Timepoint (hr) Value: 6
  misc_feature: MA Experiment 20000088 PARAMETER Experiment Name: At_100uM_ABA_Mutants_cDNA_P Parameter: Tissue Value: Aerial
  misc_feature: MA Experiment 20000088 PARAMETER Experiment Name: At_100uM_ABA_Mutants_cDNA_P Parameter: Treatment Value: 100uM ABA vs. No Treatment
  misc_feature: MA Experiment ID: 20000090 Result: Up-regulated in Transcription
  misc_feature: MA Experiment ID: 20000113 Result: Down-regulated in Transcription
  misc_feature: MA Experiment 20000113 PARAMETER Experiment Name: At_42deg_Heat_cDNA_P Parameter: Temperature (deg C) Value: 42 vs. 22
  misc_feature: MA Experiment 20000113 PARAMETER Experiment Name: At_42deg_Heat_cDNA_P Parameter: Timepoint (hr) Value: 8
  misc_feature: MA Experiment 20000113 PARAMETER Experiment Name: At_42deg_Heat_cDNA_P Parameter: Tissue Value: Aerial
  misc_feature: MA Experiment ID: 20000179 Result: Up-regulated in Transcription
  misc_feature: MA Experiment 20000179 PARAMETER Experiment Name: At_Germinating_Seeds_P Parameter: Age (hr) Value: 6 vs. 0
  misc_feature: MA Experiment 20000179 PARAMETER Experiment Name: At_Germinating_Seeds_P Parameter: Tissue Value: Germinating Seeds
  misc_feature: MA Experiment ID: 20000182 Result: Up-regulated in Transcription
  misc_feature: MA Experiment 20000182 PARAMETER Experiment Name: At_2mM_SA_P Parameter: Age (day) Value: 14
  misc_feature: MA Experiment 20000182 PARAMETER Experiment Name: At_2mM_SA_P Parameter: Organism Value: A. thaliana
  misc_feature: MA Experiment 20000182 PARAMETER Experiment Name: At_2mM_SA_P Parameter: Plant Line Value: WS
  misc_feature: MA Experiment 20000182 PARAMETER Experiment Name: At_2mM_SA_P Parameter: Timepoint (hr) Value: 6
  misc_feature: MA Experiment 20000182 PARAMETER Experiment Name: At_2mM_SA_P Parameter: Tissue Value: Aerial
  misc_feature: MA Experiment 20000182 PARAMETER Experiment Name: At_2mM_SA_P Parameter: Treatment Value: 2mM SA vs. No Treatment
  misc_feature: MA Experiment ID: 20000185 Result: Down-regulated in Transcription
  misc_feature: MA Experiment 20000185 PARAMETER Experiment Name: At_Roots__P Parameter: Age (day) Value: 7 vs. 21
  misc_feature: MA Experiment 20000185 PARAMETER Experiment Name: At_Roots__P Parameter: Organism Value: A. thaliana
  misc_feature: MA Experiment 20000185 PARAMETER Experiment Name: At_Roots__P Parameter: Tissue Value: Roots vs. Whole Plant
  misc_feature: MA Experiment ID: 20000234 Result: Down-regulated in Transcription
  misc_feature: MA Experiment 20000234 PARAMETER Experiment Name: At_Siliques_P Parameter: Age (day) Value: 21
  misc_feature: MA Experiment 20000234 PARAMETER Experiment Name: At_Siliques_P Parameter: Organism Value: A. thaliana
  misc_feature: MA Experiment 20000234 PARAMETER Experiment Name: At_Siliques_P Parameter: Plant Line Value: WS
  misc_feature: MA Experiment 20000234 PARAMETER Experiment Name: At_Siliques_P Parameter: Tissue Value: Less Than 5mm Siliques vs. Whole Plant
  misc_feature: MA Experiment ID: 20000264 Result: Down-regulated in Transcription
  misc_feature: MA Experiment 20000264 PARAMETER Experiment Name: At_Open_Flower_P Parameter: Age (day) Value: 21
  misc_feature: MA Experiment 20000264 PARAMETER Experiment Name: At_Open_Flower_P Parameter: Plant Line Value: WS
  misc_feature: MA Experiment 20000264 PARAMETER Experiment Name: At_Open_Flower_P Parameter: Tissue Value: Open Flower vs. Whole Plant
  misc_feature: MA Experiment ID: 20000265 Result: Down-regulated in Transcription
  misc_feature: MA Experiment 20000265 PARAMETER Experiment Name: At_Open_Flower_P Parameter: Age (day) Value: 21
  misc_feature: MA Experiment 20000265 PARAMETER Experiment Name: At_Open_Flower_P Parameter: Plant Line Value: WS
  misc_feature: MA Experiment 20000265 PARAMETER Experiment Name: At_Open_Flower_P Parameter: Tissue Value: Closed Flower vs. Whole Plant
  misc_feature: MA Experiment ID: 20000286 Result: Down-regulated in Transcription
  misc_feature: MA Experiment 20000286 PARAMETER Experiment Name: At_Open_Flower_P Parameter: Age (day) Value: 21
  misc_feature: MA Experiment 20000286 PARAMETER Experiment Name: At_Open_Flower_P Parameter: Plant Line Value: WS
  misc_feature: MA Experiment 20000286 PARAMETER Experiment Name: At_Open_Flower_P Parameter: Tissue Value: Half Open vs. Whole Plant
  misc_feature: MA Experiment ID: 20000438 Result: Down-regulated in Transcription
  misc_feature: MA Experiment 20000438 PARAMETER Experiment Name: At_Shoots__P Parameter: Age (day) Value: 14
  misc_feature: MA Experiment 20000438 PARAMETER Experiment Name: At_Shoots__P Parameter: Tissue Value: Shoots vs. Whole Plant
  misc_feature: MA Experiment ID: 20000439 Result: Down-regulated in Transcription
  misc_feature: MA Experiment 20000439 PARAMETER Experiment Name: At_Roots__P Parameter: Age (day) Value: 14 vs. 21
  misc_feature: MA Experiment 20000439 PARAMETER Experiment Name: At_Roots__P Parameter: Organism Value: A. thaliana
  misc_feature: MA Experiment 20000439 PARAMETER Experiment Name: At_Roots__P Parameter: Tissue Value: Roots vs. Whole Plant
  misc_feature: MA Experiment ID: 20000794 Result: Down-regulated in Transcription
  misc_feature: MA Experiment 20000794 PARAMETER Experiment Name: At_Petals_P Parameter: Age (day) Value: 23-25 days
  misc_feature: MA Experiment 20000794 PARAMETER Experiment Name: At_Petals_P Parameter: Plant Line Value: WS
  misc_feature: MA Experiment 20000794 PARAMETER Experiment Name: At_Petals_P Parameter: Tissue Value: Petals vs. Whole plant
  misc_feature: MA Experiment ID: 20001556 Result: Down-regulated in Transcription
  misc_feature: MA Experiment 20001556 PARAMETER Experiment Name: At_Drought_Soil_Dry_P Parameter: Age (day) Value: 26
  misc_feature: MA Experiment 20001556 PARAMETER Experiment Name: At_Drought_Soil_Dry_P Parameter: Organism Value: A. thaliana
  misc_feature: MA Experiment 20001556 PARAMETER Experiment Name: At_Drought_Soil_Dry_P Parameter: Plant Line Value: WS
  misc_feature: MA Experiment 20001556 PARAMETER Experiment Name: At_Drought_Soil_Dry_P Parameter: Post Timepoint (hr) Value: None
  misc_feature: MA Experiment 20001556 PARAMETER Experiment Name: At_Drought_Soil_Dry_P Parameter: Post-Treatment Value: None
  misc_feature: MA Experiment 20001556 PARAMETER Experiment Name: At_Drought_Soil_Dry_P Parameter: Timepoint (day) Value: 12
  misc_feature: MA Experiment 20001556 PARAMETER Experiment Name: At_Drought_Soil_Dry_P Parameter: Treatment Value: Drought vs. No Drought
  misc_feature: MA Experiment ID: 20001559 Result: Down-regulated in Transcription
  misc_feature: MA Experiment 20001559 PARAMETER Experiment Name: At_Drought_Soil_Dry_P Parameter: Age (day) Value: 28
  misc_feature: MA Experiment 20001559 PARAMETER Experiment Name: At_Drought_Soil_Dry_P Parameter: Organism Value: A. thaliana
  misc_feature: MA Experiment 20001559 PARAMETER Experiment Name: At_Drought_Soil_Dry_P Parameter: Plant Line Value: WS
  misc_feature: MA Experiment 20001559 PARAMETER Experiment Name: At_Drought_Soil_Dry_P Parameter: Post Timepoint (hr) Value: 29
  misc_feature: MA Experiment 20001559 PARAMETER Experiment Name: At_Drought_Soil_Dry_P Parameter: Post-Treatment Value: Re-Water vs. No Drought
  misc_feature: MA Experiment 20001559 PARAMETER Experiment Name: At_Drought_Soil_Dry_P Parameter: Timepoint (day) Value: 14
  misc_feature: MA Experiment 20001559 PARAMETER Experiment Name: At_Drought_Soil_Dry_P Parameter: Treatment Value: Drought vs. No Drought
  misc_feature: MA Experiment ID: 20001907 Result: Down-regulated in Transcription
  misc_feature: MA Experiment 20001907 PARAMETER Experiment Name: At_Drought_Reproduction_P Parameter: Age (day) Value: 37
  misc_feature: MA Experiment 20001907 PARAMETER Experiment Name: At_Drought_Reproduction_P Parameter: Organism Value: A. thaliana
  misc_feature: MA Experiment 20001907 PARAMETER Experiment Name: At_Drought_Reproduction_P Parameter: Plant Line Value: WS
  misc_feature: MA Experiment 20001907 PARAMETER Experiment Name: At_Drought_Reproduction_P Parameter: Timepoint (day) Value: 7
  misc_feature: MA Experiment 20001907 PARAMETER Experiment Name: At_Drought_Reproduction_P Parameter: Tissue Value: Siliques
  misc_feature: MA Experiment 20001907 PARAMETER Experiment Name: At_Drought_Reproduction_P Parameter: Treatment Value: Drought vs. No Drought
ttcgctttcaacttcaccttcccttctccgccattgttactttctcagaagcttccaagtcaaccaatagagacttacttgtttgacttcttcctctcttacctcataatcctccttttggacttttcaataaaaccgcctacttgaatctgtacgacttcttctcatttttccattctttaagtcttcccgttgattcattccgatctgaaatctctctctagatttctctatttttcgaattttaaatgaacgatttgttttccagctcattctctcgcttccgcagcggagaaccatcccctcgccgagacgttgccggcggtggcgacggagttcagatggcgaatcccgcgggatcaaccggtggtgtgaacctcgacaagttcttcgaagatgttgaatctgtgaaagaagagctaaaggagctagatcggctcaacgaaacactctcttcatgtcacgagcagagcaagacgcttcacaatgctaaagccgttaaagatctccggtctaaaatggacggtgacgttggagtcgcgttgaagaaggcgaagatgattaaagttaaactcgaggcgctagatcgtgccaatgctgctaatcggagtctccctggctgtggacctggttcttcctccgatcgaaccaggacctctgtcctcaatggtctcaggaagaaattgatggactctatggatagtttcaaccgattgagggagcttatctcgtccgagtatagagaaactgtacagaggaggtacttcaccgtcaccggcgagaatccggatgaacgaaccctagatcgactgatttccactggagagagtgagagattcttgcagaaagcaatacaagaacaaggaagaggaagggtgttagacaccattaacgagattcaagaaaggcatgatgcggttaaagacattgagaagaatctcagggagcttcaccaggtgtttctagacatggccgtgctggtagagcaccagggagctcagcttgatgacatcgagagtcatgtgggtcgagctagctcctttatcagaggcggaactgaccagctacaaaccgctcgggtttaccagaagaacacgcgaaaatggacatgtattgccattattattctcatcatcatcataactgttgtggttcttgctgttttaaaaccgtggaacaacagcagtggcggcggcggcggtggtggtggtgggggtaccactggaggaagtcaaccaaattcagggacaccaccaaatcctcctcaggcaaggcgtctattgcgttgaagttgaagttgaagttgagtttcgttatttgcatatatattctttctttgaaaaaccttattatcaaaccagctttgtgttactactttctactgctggtttgttgttaatctcccgtttatttggtttttgtgaaagaatttaaaatgtgggttagatgagaaaattagtacaacattctcttgtatctatgtttgctatatgggttatatttacttgatgt

SEQ ID NO: 98108 - protein, 346 aa, Arabidopsis thaliana; identical to SEQ ID NO: 24734
  peptide (1)..(346): Ceres Seq. ID no. 13579490
  misc_feature (219)..(281): Pfam Name: SNARE domain Pfam Description: SNARE domain
  misc_feature (1)..(346): Homolog of NCBI NO: 15229865 NR Description: syntaxin of plants SYP121 [Arabidopsis thaliana]
  misc_feature (1)..(309): Homolog of NCBI NO: 4206787 NR Description: syntaxin-related protein Nt-syr1 [Nicotiana
  misc_feature (1)..(346): Homolog of NCBI NO: 15231205 NR Description: syntaxin of plants SYP122 [Arabidopsis thaliana]
  misc_feature (1)..(346): Homolog of NCBI NO: 11358871 NR Description: syntaxin synt4 [imported] - Arabidopsis thaliana
  misc_feature (1)..(306): Homolog of NCBI NO: 15219900 NR Description: syntaxin of plants SYP124 [Arabidopsis thaliana]
  misc_feature (1)..(306): Homolog of NCBI NO: 15220328 NR Description: syntaxin of plants SYP125 [Arabidopsis thaliana]
  misc_feature (1)..(306): Homolog of NCBI NO: 15236285 NR Description: syntaxin of plants SYP123 [Arabidopsis thaliana]
  misc_feature (1)..(313): Homolog of NCBI NO: 18415701 NR Description: syntaxin of plants SYP132 [Arabidopsis thaliana] Syntaxin 132 (AtSYP132) >gi|17380724|gb|AAL36192.1| putative [Arabidopsis thaliana] >gi|21436145|gb|AAM51319.1| putative
  misc_feature (1)..(312): Homolog of NCBI NO: 28974542 NR Description: knolle [Antirrhinum majus]
  misc_feature (1)..(312): Homolog of NCBI NO: 5912543 NR Description: Knolle [Capsicum annuum]

SEQ ID NO: 98109 - protein, 315 aa, Arabidopsis thaliana; identical to SEQ ID NO: 24735
  peptide (1)..(315): Ceres Seq. ID no. 13579491
  misc_feature (188)..(250): Pfam Name: SNARE domain Pfam Description: SNARE domain
  misc_feature (1)..(315): Homolog of NCBI NO: 15229865 NR Description: syntaxin of plants SYP121 [Arabidopsis thaliana]
  misc_feature (1)..(278): Homolog of NCBI NO: 4206787 NR Description: syntaxin-related protein Nt-syr1 [Nicotiana
  misc_feature (1)..(315): Homolog of NCBI NO: 15231205 NR Description: syntaxin of plants SYP122 [Arabidopsis thaliana]
  misc_feature (1)..(315): Homolog of NCBI NO: 11358871 NR Description: syntaxin synt4 [imported] - Arabidopsis thaliana
  misc_feature (1)..(275): Homolog of NCBI NO: 15219900 NR Description: syntaxin of plants SYP124 [Arabidopsis thaliana]
  misc_feature (1)..(275): Homolog of NCBI NO: 15220328 NR Description: syntaxin of plants SYP125 [Arabidopsis thaliana]
  misc_feature (1)..(275): Homolog of NCBI NO: 15236285 NR Description: syntaxin of plants SYP123 [Arabidopsis thaliana]
  misc_feature (1)..(282): Homolog of NCBI NO: 18415701 NR Description: syntaxin of plants SYP132 [Arabidopsis thaliana] Syntaxin 132 (AtSYP132) >gi|17380724|gb|AAL36192.1| putative [Arabidopsis thaliana] >gi|21436145|gb|AAM51319.1| putative
  misc_feature (1)..(281): Homolog of NCBI NO: 28974542 NR Description: knolle [Antirrhinum majus]
  misc_feature (1)..(281): Homolog of NCBI NO: 5912543 NR Description: Knolle [Capsicum annuum]

SEQ ID NO: 98110 - protein, 256 aa, Arabidopsis thaliana; identical to SEQ ID NO: 24736
  peptide (1)..(256): Ceres Seq. ID no. 13579492
  misc_feature (129)..(191): Pfam Name: SNARE domain Pfam Description: SNARE domain
  misc_feature (1)..(256): Homolog of NCBI NO: 15229865 NR Description: syntaxin of plants SYP121 [Arabidopsis thaliana]
  misc_feature (1)..(219): Homolog of NCBI NO: 4206787 NR Description: syntaxin-related protein Nt-syr1 [Nicotiana
  misc_feature (1)..(256): Homolog of NCBI NO: 15231205 NR Description: syntaxin of plants SYP122 [Arabidopsis thaliana]
  misc_feature (1)..(256): Homolog of NCBI NO: 11358871 NR Description: syntaxin synt4 [imported] - Arabidopsis thaliana
  misc_feature (1)..(216): Homolog of NCBI NO: 15219900 NR Description: syntaxin of plants SYP124 [Arabidopsis thaliana]
  misc_feature (1)..(216): Homolog of NCBI NO: 15220328 NR Description: syntaxin of plants SYP125 [Arabidopsis thaliana]
  misc_feature (1)..(216): Homolog of NCBI NO: 15236285 NR Description: syntaxin of plants SYP123 [Arabidopsis thaliana]
  misc_feature (1)..(223): Homolog of NCBI NO: 18415701 NR Description: syntaxin of plants SYP132 [Arabidopsis thaliana] Syntaxin 132 (AtSYP132) >gi|17380724|gb|AAL36192.1| putative [Arabidopsis thaliana] >gi|21436145|gb|AAM51319.1| putative
  misc_feature (1)..(222): Homolog of NCBI NO: 28974542 NR Description: knolle [Antirrhinum majus]
  misc_feature (1)..(222): Homolog of NCBI NO: 5912543 NR Description: Knolle [Capsicum annuum]

SEQ ID NO: 98111 - DNA, 1506 bp, Arabidopsis thaliana
  misc_feature (1)..(1506): Ceres Seq. ID no. 13579493
  misc_feature: MA Experiment ID: 20000182 Result: Up-regulated in Transcription
  misc_feature: MA Experiment 20000182 PARAMETER Experiment Name: At_2mM_SA_P Parameter: Age (day) Value: 14
  misc_feature: MA Experiment 20000182 PARAMETER Experiment Name: At_2mM_SA_P Parameter: Organism Value: A. thaliana
  misc_feature: MA Experiment 20000182 PARAMETER Experiment Name: At_2mM_SA_P Parameter: Plant Line Value: WS
  misc_feature: MA Experiment 20000182 PARAMETER Experiment Name: At_2mM_SA_P Parameter: Timepoint (hr) Value: 6
  misc_feature: MA Experiment 20000182 PARAMETER Experiment Name: At_2mM_SA_P Parameter: Tissue Value: Aerial
  misc_feature: MA Experiment 20000182 PARAMETER Experiment Name: At_2mM_SA_P Parameter: Treatment Value: 2mM SA vs. No Treatment
  misc_feature: MA Experiment ID: 20000437 Result: Up-regulated in Transcription
  misc_feature: MA Experiment 20000437 PARAMETER Experiment Name: At_Drought_P Parameter: Age (day) Value: 8
  misc_feature: MA Experiment 20000437 PARAMETER Experiment Name: At_Drought_P Parameter: Organism Value: A. thaliana
  misc_feature: MA Experiment 20000437 PARAMETER Experiment Name: At_Drought_P Parameter: Plant Line Value: WS
  misc_feature: MA Experiment 20000437 PARAMETER Experiment Name: At_Drought_P Parameter: Timepoint (hr) Value: 24
  misc_feature: MA Experiment 20000437 PARAMETER Experiment Name: At_Drought_P Parameter: Tissue Value: Whole Plant
  misc_feature: MA Experiment 20000437 PARAMETER Experiment Name: At_Drought_P Parameter: Treatment Value: Drought vs. No Drought
  misc_feature: MA Experiment ID: 20000452 Result: Up-regulated in Transcription
  misc_feature: MA Experiment 20000452 PARAMETER Experiment Name: At_CS6879_Shoots-Roots_P Parameter: Age (day) Value: 14
  misc_feature: MA Experiment 20000452 PARAMETER Experiment Name: At_CS6879_Shoots-Roots_P Parameter: Organism Value: A. thaliana
  misc_feature: MA Experiment 20000452 PARAMETER Experiment Name: At_CS6879_Shoots-Roots_P Parameter: Plant Line Value: CS6879 vs. WS
  misc_feature: MA Experiment 20000452 PARAMETER Experiment Name: At_CS6879_Shoots-Roots_P Parameter: Tissue Value: Shoots
acacctcttcttcttcttcttcttcttcttcttcttcaacctcttaaatctcaaaatctcaatcatcaagcttctccttcttcttcttctttccatcttcgcttcaacaacaatgtctaatttcacttatacatctgctttcaacttatccgacaactccccttttaatcccgccattggttcttcgtcttcttcttcctccgcgctcgtcgtagcttccgatgatgataataataccgatgatgcttgtagcatctgtctcgagcctttcaccctccaggatccttccactgtcaccagctgcaaacatgaatatcaccttcagtgcatcattgaatggtcacagagaagcaaagagtgtcctatttgctggcaattgtttgttttgagagaccctgctagccaagagcttttagctgctgtggaaaaggaaagacttttgaaaaccaggaatatatcttcatcctctccaatctctattcatcactctcatgacgattttcactctgaggaggaggaatcacagtttagcagctttgatgaacaattcttgaggcatcttactgaagctgcacatagacgttgtttgcttcgcagaagggatggtcaaatatcctctagtcttgtttcgtccagcgatcccactacgattcatcctactgatttggtcaatctttatcgtctctctgctatttcccatgttgaacatcaaaactcaaacccttgtccaagtcctggctcaatgactccatctcccgtctctggtcattcttccattcctgcagatagcaataacggatccagaatctctcctggcccttctccatctcgttcatctcaaagtccaaaatcacctgaagcatcctcgcttccggaagccattaaatcgaaactagctgctgcttctgcaaagtacaaggaatcgatctctaaaagtaaacaaggtcttaaagagaagctacttgctcgcaataactcagtgaaagaattgagcaaaggagtgcaacgtgagatgaatgcaggaatagctggtgttgcacgaatgatcgaacgcatggatttttcttcaaaacgttttggagggtctgctcatgtatcaacctccactgctactgcttctggattcaatttctcattcaaagggaaacgtgtagaagccaattctaagtctaacaacaatggagacaaaaccgaaccccaaaagctgcagggaggagaaacgtgctgaggcaatcagaaaaatggagagaggcctttaatgcaagcgatgtacgtttccattgaatcaacttacccgttggtcttcgcatcctgcattgttcagagctcacggtctcgtctctcgtctctctgttacctttgcgatgcgtacttttagatggctaaaataagcaactgagtaataattttattactcgattttgacggagccaaaactataatatttattaatttcaaaggataatgttttatgttttttcactaagaattggatcagtcctaacg

SEQ ID NO: 98112 - protein, 408 aa, Arabidopsis thaliana
  peptide (1)..(408): Ceres Seq. ID no. 13579494
  misc_feature (83)..(123): Pfam Name: Zinc finger, C3HC4 type (RING finger) Pfam Description: Zinc finger, C3HC4 type (RING finger)
  misc_feature (38)..(408): Homolog of NCBI NO: 30682750 NR Description: zinc finger (C3HC4-type RING finger) protein
  misc_feature (38)..(408): Homolog of NCBI NO: 26450997 NR Description: putative RING-H2 finger protein RHF1a
  misc_feature (38)..(403): Homolog of NCBI NO: 25360953 NR Description: RING-H2 finger protein RHF1a [imported] -
  misc_feature (80)..(408): Homolog of NCBI NO: 11358783 NR Description: RING-H2 finger protein RHF1a [imported] -
  misc_feature (172)..(403): Homolog of NCBI NO: 7485164 NR Description: hypothetical protein - Arabidopsis thaliana
  misc_feature (38)..(100): Homolog of NCBI NO: 7485164 NR Description: hypothetical protein - Arabidopsis thaliana
  misc_feature (248)..(408): Homolog of NCBI NO: 16226716 NR Description: AT4g14220/dl3150w [Arabidopsis thaliana]
  misc_feature (62)..(376): Homolog of NCBI NO: 27819501 NR Description: putative zinc finger protein [Oryza sativa
  misc_feature (65)..(335): Homolog of NCBI NO: 18420424 NR Description: zinc finger (C3HC4-type RING finger) protein
  misc_feature (65)..(335): Homolog of NCBI NO: 30688252 NR Description: zinc finger (C3HC4-type RING finger) protein
HLFFFFFFFFFFNLLNLKISIIKLLLLLLLSIFASTTMSNFTYTSAFNLSDNSPFNPAIGSSSSSSSALVVASDDDNNTDDACSICLEPFTLQDPSTVTSCKHEYHLQCIIEWSQRSKECPICWQLFVLRDPASQELLAAVEKERLLKTRNISSSSPISIHHSHDDFHSEEEESQFSSFDEQFLRHLTEAAHRRCLLRRRDGQISSSLVSSSDPTTIHPTDLVNLYRLSAISHVEHQNSNPCPSPGSMTPSPVSGHSSIPADSNNGSRISPGPSPSRSSQSPKSPEASSLPEAIKSKLAAASAKYKESISKSKQGLKEKLLARNNSVKELSKGVQREMNAGIAGVARMIERMDFSSKRFGGSAHVSTSTATASGFNFSFKGKRVEANSKSNNNGDKTEPQKLQGGETC

SEQ ID NO: 98113 - protein, 371 aa, Arabidopsis thaliana
  peptide (1)..(371): Ceres Seq. ID no. 13579495
  misc_feature (46)..(86): Pfam Name: Zinc finger, C3HC4 type (RING finger) Pfam Description: Zinc finger, C3HC4 type (RING finger)
  misc_feature (1)..(371): Homolog of NCBI NO: 30682750 NR Description: zinc finger (C3HC4-type RING finger) protein
  misc_feature (1)..(371): Homolog of NCBI NO: 26450997 NR Description: putative RING-H2 finger protein RHF1a
  misc_feature (1)..(366): Homolog of NCBI NO: 25360953 NR Description: RING-H2 finger protein RHF1a [imported] -
  misc_feature (43)..(371): Homolog of NCBI NO: 11358783 NR Description: RING-H2 finger protein RHF1a [imported] -
  misc_feature (135)..(366): Homolog of NCBI NO: 7485164 NR Description: hypothetical protein - Arabidopsis thaliana
  misc_feature (1)..(63): Homolog of NCBI NO: 7485164 NR Description: hypothetical protein - Arabidopsis thaliana
  misc_feature (211)..(371): Homolog of NCBI NO: 16226716 NR Description: AT4g14220/dl3150w [Arabidopsis thaliana]
  misc_feature (25)..(339): Homolog of NCBI NO: 27819501 NR Description: putative zinc finger protein [Oryza sativa
  misc_feature (28)..(298): Homolog of NCBI NO: 18420424 NR Description: zinc finger (C3HC4-type RING finger) protein
  misc_feature (28)..(298): Homolog of NCBI NO: 30688252 NR Description: zinc finger (C3HC4-type RING finger) protein
MSNFTYTSAFNLSDNSPFNPAIGSSSSSSSALVVASDDDNNTDDACSICLEPFTLQDPSTVTSCKHEYHLQCIIEWSQRSKECPICWQLFVLRDPASQELLAAVEKERLLKTRNISSSSPISIHHSHDDFHSEEEESQFSSFDEQFLRHLTEAAHRRCLLRRRDGQISSSLVSSSDPTTIHPTDLVNLYRLSAISHVEHQNSNPCPSPGSMTPSPVSGHSSIPADSNNGSRISPGPSPSRSSQSPKSPEASSLPEAIKSKLAAASAKYKESISKSKQGLKEKLLARNNSVKELSKGVQREMNAGIAGVARMIERMDFSSKRFGGSAHVSTSTATASGFNFSFKGKRVEANSKSNNNGDKTEPQKLQGGETC

SEQ ID NO: 98114 - DNA, 1128 bp, Arabidopsis thaliana
  misc_feature (1)..(1128): Ceres Seq. ID no. 13579496
  misc_feature: MA Experiment ID: 20000166 Result: Up-regulated in Transcription
  misc_feature: MA Experiment 20000166 PARAMETER Experiment Name: At_100uM_ABA_P Parameter: Age (day) Value: 14
  misc_feature: MA Experiment 20000166 PARAMETER Experiment Name: At_100uM_ABA_P Parameter: Organism Value: A. thaliana
  misc_feature: MA Experiment 20000166 PARAMETER Experiment Name: At_100uM_ABA_P Parameter: Plant Line Value: WS
  misc_feature: MA Experiment 20000166 PARAMETER Experiment Name: At_100uM_ABA_P Parameter: Timepoint (hr) Value: 1
  misc_feature: MA Experiment 20000166 PARAMETER Experiment Name: At_100uM_ABA_P Parameter: Tissue Value: Aerial
  misc_feature: MA Experiment 20000166 PARAMETER Experiment Name: At_100uM_ABA_P Parameter: Treatment Value: 100uM ABA vs. No Treatment
  misc_feature: MA Experiment ID: 20000173 Result: Up-regulated in Transcription
  misc_feature: MA Experiment 20000173 PARAMETER Experiment Name: At_42deg_Heat_P Parameter: Age (day) Value: 14
  misc_feature: MA Experiment 20000173 PARAMETER Experiment Name: At_42deg_Heat_P Parameter: Organism Value: A. thaliana
  misc_feature: MA Experiment 20000173 PARAMETER Experiment Name: At_42deg_Heat_P Parameter: Plant Line Value: WS
  misc_feature: MA Experiment 20000173 PARAMETER Experiment Name: At_42deg_Heat_P Parameter: Temperature (deg C) Value: 42 vs. 22
  misc_feature: MA Experiment 20000173 PARAMETER Experiment Name: At_42deg_Heat_P Parameter: Timepoint (hr) Value: 6
  misc_feature: MA Experiment 20000173 PARAMETER Experiment Name: At_42deg_Heat_P Parameter: Tissue Value: Aerial
  misc_feature: MA Experiment ID: 20000180 Result: Down-regulated in Transcription
  misc_feature: MA Experiment 20000180 PARAMETER Experiment Name: At_Germinating_Seeds_P Parameter: Age (hr) Value: 24 vs. 0
  misc_feature: MA Experiment 20000180 PARAMETER Experiment Name: At_Germinating_Seeds_P Parameter: Tissue Value: Germinating Seeds
  misc_feature: MA Experiment ID: 20000184 Result: Down-regulated in Transcription
  misc_feature: MA Experiment 20000184 PARAMETER Experiment Name: At_Shoots__P Parameter: Age (day) Value: 7
  misc_feature: MA Experiment 20000184 PARAMETER Experiment Name: At_Shoots__P Parameter: Tissue Value: Shoots vs. Whole Plant
  misc_feature: MA Experiment ID: 20000185 Result: Down-regulated in Transcription
  misc_feature: MA Experiment 20000185 PARAMETER Experiment Name: At_Roots__P Parameter: Age (day) Value: 7 vs. 21
  misc_feature: MA Experiment 20000185 PARAMETER Experiment Name: At_Roots__P Parameter: Organism Value: A. thaliana
  misc_feature: MA Experiment 20000185 PARAMETER Experiment Name: At_Roots__P Parameter: Tissue Value: Roots vs. Whole Plant
  misc_feature: MA Experiment ID: 20000227 Result: Up-regulated in Transcription
  misc_feature: MA Experiment 20000227 PARAMETER Experiment Name: At_Root-Tips-vs-Tops_P Parameter: Tissue Value: Root Tips vs. Root Tops
  misc_feature: MA Experiment ID: 20000234 Result: Down-regulated in Transcription
  misc_feature: MA Experiment 20000234 PARAMETER Experiment Name: At_Siliques_P Parameter: Age (day) Value: 21
  misc_feature: MA Experiment 20000234 PARAMETER Experiment Name: At_Siliques_P Parameter: Organism Value: A. thaliana
  misc_feature: MA Experiment 20000234 PARAMETER Experiment Name: At_Siliques_P Parameter: Plant Line Value: WS
  misc_feature: MA Experiment 20000234 PARAMETER Experiment Name: At_Siliques_P Parameter: Tissue Value: Less Than 5mm Siliques vs. Whole Plant
  misc_feature: MA Experiment ID: 20000265 Result: Down-regulated in Transcription
  misc_feature: MA Experiment 20000265 PARAMETER Experiment Name: At_Open_Flower_P Parameter: Age (day) Value: 21
  misc_feature: MA Experiment 20000265 PARAMETER Experiment Name: At_Open_Flower_P Parameter: Plant Line Value: WS
  misc_feature: MA Experiment 20000265 PARAMETER Experiment Name: At_Open_Flower_P Parameter: Tissue Value: Closed Flower vs. Whole Plant
  misc_feature: MA Experiment ID: 20000268 Result: Down-regulated in Transcription
  misc_feature: MA Experiment 20000268 PARAMETER Experiment Name: At_100mM_NaCl__P Parameter: Age (day) Value: 14
  misc_feature: MA Experiment 20000268 PARAMETER Experiment Name: At_100mM_NaCl__P Parameter: Organism Value: A. thaliana
  misc_feature: MA Experiment 20000268 PARAMETER Experiment Name: At_100mM_NaCl__P Parameter: Plant Line Value: WS
  misc_feature: MA Experiment 20000268 PARAMETER Experiment Name: At_100mM_NaCl__P Parameter: Timepoint (hr) Value: 6
  misc_feature: MA Experiment 20000268 PARAMETER Experiment Name: At_100mM_NaCl__P Parameter: Tissue Value: Whole Plant
  misc_feature: MA Experiment 20000268 PARAMETER Experiment Name: At_100mM_NaCl__P Parameter: Treatment Value: 100mM NaCl vs. No Treatment
  misc_feature: MA Experiment ID: 20000286 Result: Down-regulated in Transcription
  misc_feature: MA Experiment 20000286 PARAMETER Experiment Name: At_Open_Flower_P Parameter: Age (day) Value: 21
  misc_feature: MA Experiment 20000286 PARAMETER Experiment Name: At_Open_Flower_P Parameter: Plant Line Value: WS
  misc_feature: MA Experiment 20000286 PARAMETER Experiment Name: At_Open_Flower_P Parameter: Tissue Value: Half Open vs. Whole Plant
  misc_feature: MA Experiment ID: 20000288 Result: Down-regulated in Transcription
  misc_feature: MA Experiment 20000288 PARAMETER Experiment Name: At_Drought_P Parameter: Age (day) Value: 7
  misc_feature: MA Experiment 20000288 PARAMETER Experiment Name: At_Drought_P Parameter: Organism Value: A. thaliana
  misc_feature: MA Experiment 20000288 PARAMETER Experiment Name: At_Drought_P Parameter: Plant Line Value: WS
  misc_feature: MA Experiment 20000288 PARAMETER Experiment Name: At_Drought_P Parameter: Timepoint (hr) Value: 1
  misc_feature: MA Experiment 20000288 PARAMETER Experiment Name: At_Drought_P Parameter: Tissue Value: Whole Plant
  misc_feature: MA Experiment 20000288 PARAMETER Experiment Name: At_Drought_P Parameter: Treatment Value: Drought vs. No Drought
  misc_feature: MA Experiment ID: 20000308 Result: Down-regulated in Transcription
  misc_feature: MA Experiment 20000308 PARAMETER Experiment Name: At_100mM_NaCl__P Parameter: Age (day) Value: 17
  misc_feature: MA Experiment 20000308 PARAMETER Experiment Name: At_100mM_NaCl__P Parameter: Organism Value: A. thaliana
  misc_feature: MA Experiment 20000308 PARAMETER Experiment Name: At_100mM_NaCl__P Parameter: Plant Line Value: WS
  misc_feature: MA Experiment 20000308 PARAMETER Experiment Name: At_100mM_NaCl__P Parameter: Timepoint (hr) Value: 72
  misc_feature: MA Experiment 20000308 PARAMETER Experiment Name: At_100mM_NaCl__P Parameter: Tissue Value: Whole Plant
  misc_feature: MA Experiment 20000308 PARAMETER Experiment Name: At_100mM_NaCl__P Parameter: Treatment Value: 100mM NaCl vs. No Treatment
  misc_feature: MA Experiment ID: 20000437 Result: Down-regulated in Transcription
  misc_feature: MA Experiment 20000437 PARAMETER Experiment Name: At_Drought_P Parameter: Age (day) Value: 8
  misc_feature: MA Experiment 20000437 PARAMETER Experiment Name: At_Drought_P Parameter: Organism Value: A. thaliana
  misc_feature: MA Experiment 20000437 PARAMETER Experiment Name: At_Drought_P Parameter: Plant Line Value: WS
  misc_feature: MA Experiment 20000437 PARAMETER Experiment Name: At_Drought_P Parameter: Timepoint (hr) Value: 24
  misc_feature: MA Experiment 20000437 PARAMETER Experiment Name: At_Drought_P Parameter: Tissue Value: Whole Plant
  misc_feature: MA Experiment 20000437 PARAMETER Experiment Name: At_Drought_P Parameter: Treatment Value: Drought vs. No Drought
  misc_feature: MA Experiment ID: 20000438 Result: Down-regulated in Transcription
  misc_feature: MA Experiment 20000438 PARAMETER Experiment Name: At_Shoots__P Parameter: Age (day) Value: 14
  misc_feature: MA Experiment 20000438 PARAMETER Experiment Name: At_Shoots__P Parameter: Tissue Value: Shoots vs. Whole Plant
  misc_feature: MA Experiment ID: 20000439 Result: Down-regulated in Transcription
  misc_feature: MA Experiment 20000439 PARAMETER Experiment Name: At_Roots__P Parameter: Age (day) Value: 14 vs. 21
  misc_feature: MA Experiment 20000439 PARAMETER Experiment Name: At_Roots__P Parameter: Organism Value: A. thaliana
  misc_feature: MA Experiment 20000439 PARAMETER Experiment Name: At_Roots__P Parameter: Tissue Value: Roots vs. Whole Plant
  misc_feature: MA Experiment ID: 20000441 Result: Up-regulated in Transcription
  misc_feature: MA Experiment 20000441 PARAMETER Experiment Name: At_1uM_BR-BRZ__P Parameter: Tissue Value: Shoot Apices
  misc_feature: MA Experiment 20000441 PARAMETER Experiment Name: At_1uM_BR-BRZ__P Parameter: Treatment Value: 1uM BR vs. No Treatment
  misc_feature: MA Experiment ID: 20000460 Result: Up-regulated in Transcription
  misc_feature: MA Experiment 20000460 PARAMETER Experiment Name: At_10percent_PEG_P Parameter: Age (day) Value: 12
  misc_feature: MA Experiment 20000460 PARAMETER Experiment Name: At_10percent_PEG_P Parameter: Organism Value: A. thaliana
  misc_feature: MA Experiment 20000460 PARAMETER Experiment Name: At_10percent_PEG_P Parameter: Plant Line Value: WS
  misc_feature: MA Experiment 20000460 PARAMETER Experiment Name: At_10percent_PEG_P Parameter: Timepoint (day) Value: 12
  misc_feature: MA Experiment 20000460 PARAMETER Experiment Name: At_10percent_PEG_P Parameter: Tissue Value: Whole Plant
  misc_feature: MA Experiment 20000460 PARAMETER Experiment Name: At_10percent_PEG_P Parameter: Treatment Value: 10percent PEG vs. No Treatment
  misc_feature: MA Experiment ID: 20000527 Result: Up-regulated in Transcription
  misc_feature: MA Experiment 20000527 PARAMETER Experiment Name: At_10percent_PEG_P Parameter: Age (day) Value: 20
  misc_feature: MA Experiment 20000527 PARAMETER Experiment Name: At_10percent_PEG_P Parameter: Organism Value: A. thaliana
  misc_feature: MA Experiment 20000527 PARAMETER Experiment Name: At_10percent_PEG_P Parameter: Plant Line Value: WS
  misc_feature: MA Experiment 20000527 PARAMETER Experiment Name: At_10percent_PEG_P Parameter: Timepoint (day) Value: 20
  misc_feature: MA Experiment 20000527 PARAMETER Experiment Name: At_10percent_PEG_P Parameter: Tissue Value: Whole Plant
  misc_feature: MA Experiment 20000527 PARAMETER Experiment Name: At_10percent_PEG_P Parameter: Treatment Value: 10percent PEG vs. No Treatment
  misc_feature: MA Experiment ID: 20000573 Result: Down-regulated in Transcription
  misc_feature: MA Experiment 20000573 PARAMETER Experiment Name: At_100uM_ABA_Mutants__P Parameter: Organism Value: A. thaliana
  misc_feature: MA Experiment 20000573 PARAMETER Experiment Name: At_100uM_ABA_Mutants__P Parameter: Plant Line Value: CS22 vs. Ler wt
  misc_feature: MA Experiment 20000573 PARAMETER Experiment Name: At_100uM_ABA_Mutants__P Parameter: Timepoint (hr) Value: N/A
  misc_feature: MA Experiment 20000573 PARAMETER Experiment Name: At_100uM_ABA_Mutants__P Parameter: Tissue Value: Whole Plant
  misc_feature: MA Experiment 20000573 PARAMETER Experiment Name: At_100uM_ABA_Mutants__P Parameter: Treatment Value: None
  misc_feature: MA Experiment ID: 20000574 Result: Down-regulated in Transcription
  misc_feature: MA Experiment 20000574 PARAMETER Experiment Name: At_100uM_ABA_Mutants__P Parameter: Organism Value: A. thaliana
  misc_feature: MA Experiment 20000574 PARAMETER Experiment Name: At_100uM_ABA_Mutants__P Parameter: Plant Line Value: CS23 vs. Ler wt
  misc_feature: MA Experiment 20000574 PARAMETER Experiment Name: At_100uM_ABA_Mutants__P Parameter: Timepoint (hr) Value: N/A
  misc_feature: MA Experiment 20000574 PARAMETER Experiment Name: At_100uM_ABA_Mutants__P Parameter: Tissue Value: Whole Plant
  misc_feature: MA Experiment 20000574 PARAMETER Experiment Name: At_100uM_ABA_Mutants__P Parameter: Treatment Value: None
  misc_feature: MA Experiment ID: 20001247 Result: Up-regulated in Transcription
  misc_feature: MA Experiment 20001247 PARAMETER Experiment Name: At_Far-red-induction_P Parameter: Age (day) Value: 7
  misc_feature: MA Experiment 20001247 PARAMETER Experiment Name: At_Far-red-induction_P Parameter: Light Value: Far-red vs. White
  misc_feature: MA Experiment 20001247 PARAMETER Experiment Name: At_Far-red-induction_P Parameter: Organism Value: A. thaliana
  misc_feature: MA Experiment 20001247 PARAMETER Experiment Name: At_Far-red-induction_P Parameter: Plant Line Value: Columbia
  misc_feature: MA Experiment 20001247 PARAMETER Experiment Name: At_Far-red-induction_P Parameter: Timepoint (hr) Value: 1
  misc_feature: MA Experiment 20001247 PARAMETER Experiment Name: At_Far-red-induction_P Parameter: Tissue Value: Whole Plant
  misc_feature: MA Experiment ID: 20001248 Result: Down-regulated in Transcription
  misc_feature: MA Experiment 20001248 PARAMETER Experiment Name: At_Far-red-induction_P Parameter: Age (day) Value: 7
  misc_feature: MA Experiment 20001248 PARAMETER Experiment Name: At_Far-red-induction_P Parameter: Light Value: Far-red vs. White
  misc_feature: MA Experiment 20001248 PARAMETER Experiment Name: At_Far-red-induction_P Parameter: Organism Value: A. thaliana
  misc_feature: MA Experiment 20001248 PARAMETER Experiment Name: At_Far-red-induction_P Parameter: Plant Line Value: Columbia
  misc_feature: MA Experiment 20001248 PARAMETER Experiment Name: At_Far-red-induction_P Parameter: Timepoint (hr) Value: 4
  misc_feature: MA Experiment 20001248 PARAMETER Experiment Name: At_Far-red-induction_P Parameter: Tissue Value: Whole Plant
  misc_feature: MA Experiment ID: 20001451 Result: Up-regulated in Transcription
  misc_feature: MA Experiment 20001451 PARAMETER Experiment Name: At_Far-red-induction_P Parameter: Age (day) Value: 7
  misc_feature: MA Experiment 20001451 PARAMETER Experiment Name: At_Far-red-induction_P Parameter: Light Value: Far-red vs. White
  misc_feature: MA Experiment 20001451 PARAMETER Experiment Name: At_Far-red-induction_P Parameter: Organism Value: A. thaliana
  misc_feature: MA Experiment 20001451 PARAMETER Experiment Name: At_Far-red-induction_P Parameter: Plant Line Value: Columbia
  misc_feature: MA Experiment 20001451 PARAMETER Experiment Name: At_Far-red-induction_P Parameter: Timepoint (hr) Value: 24
  misc_feature: MA Experiment 20001451 PARAMETER Experiment Name: At_Far-red-induction_P Parameter: Tissue Value: Whole Plant
  misc_feature: MA Experiment ID: 20001555 Result: Down-regulated in Transcription
  misc_feature: MA Experiment 20001555 PARAMETER Experiment Name: At_Drought_Soil_Dry_P Parameter: Age (day) Value: 24
  misc_feature: MA Experiment 20001555 PARAMETER Experiment Name: At_Drought_Soil_Dry_P Parameter: Organism Value: A. thaliana
  misc_feature: MA Experiment 20001555 PARAMETER Experiment Name: At_Drought_Soil_Dry_P Parameter: Plant Line Value: WS
  misc_feature: MA Experiment 20001555 PARAMETER Experiment Name: At_Drought_Soil_Dry_P Parameter: Post Timepoint (hr) Value: None
  misc_feature: MA Experiment 20001555 PARAMETER Experiment Name: At_Drought_Soil_Dry_P Parameter: Post-Treatment Value: None
  misc_feature: MA Experiment 20001555 PARAMETER Experiment Name: At_Drought_Soil_Dry_P Parameter: Timepoint (day) Value: 10
  misc_feature: MA Experiment 20001555 PARAMETER Experiment Name: At_Drought_Soil_Dry_P Parameter: Treatment Value: Drought vs. No Drought
  misc_feature: MA Experiment ID: 20001556 Result: Down-regulated in Transcription
  misc_feature: MA Experiment 20001556 PARAMETER Experiment Name: At_Drought_Soil_Dry_P Parameter: Age (day) Value: 26
  misc_feature: MA Experiment 20001556 PARAMETER Experiment Name: At_Drought_Soil_Dry_P Parameter: Organism Value: A. thaliana
  misc_feature: MA Experiment 20001556 PARAMETER Experiment Name: At_Drought_Soil_Dry_P Parameter: Plant Line Value: WS
  misc_feature: MA Experiment 20001556 PARAMETER Experiment Name: At_Drought_Soil_Dry_P Parameter: Post Timepoint (hr) Value: None
  misc_feature: MA Experiment 20001556 PARAMETER Experiment Name: At_Drought_Soil_Dry_P Parameter: Post-Treatment Value: None
  misc_feature: MA Experiment 20001556 PARAMETER Experiment Name: At_Drought_Soil_Dry_P Parameter: Timepoint (day) Value: 12
  misc_feature: MA Experiment 20001556 PARAMETER Experiment Name: At_Drought_Soil_Dry_P Parameter: Treatment Value: Drought vs. No Drought
  misc_feature: MA Experiment ID: 20001558 Result: Up-regulated in Transcription
  misc_feature: MA Experiment 20001558 PARAMETER Experiment Name: At_Drought_Soil_Dry_P Parameter: Age (day) Value: 27
  misc_feature: MA Experiment 20001558 PARAMETER Experiment Name: At_Drought_Soil_Dry_P Parameter: Organism Value: A. thaliana
  misc_feature: MA Experiment 20001558 PARAMETER Experiment Name: At_Drought_Soil_Dry_P Parameter: Plant Line Value: WS
  misc_feature: MA Experiment 20001558 PARAMETER Experiment Name: At_Drought_Soil_Dry_P Parameter: Post Timepoint (hr) Value: 6
  misc_feature: MA Experiment 20001558 PARAMETER Experiment Name: At_Drought_Soil_Dry_P Parameter: Post-Treatment Value: Re-Water vs. No Drought
  misc_feature: MA Experiment 20001558 PARAMETER Experiment Name: At_Drought_Soil_Dry_P Parameter: Timepoint (day) Value: 13
  misc_feature: MA Experiment 20001558 PARAMETER Experiment Name: At_Drought_Soil_Dry_P Parameter: Treatment Value: Drought vs. No Drought
  misc_feature: MA Experiment ID: 20001559 Result: Down-regulated in Transcription
  misc_feature: MA Experiment 20001559 PARAMETER Experiment Name: At_Drought_Soil_Dry_P Parameter: Age (day) Value: 28
  misc_feature: MA Experiment 20001559 PARAMETER Experiment Name: At_Drought_Soil_Dry_P Parameter: Organism Value: A. thaliana
  misc_feature: MA Experiment 20001559 PARAMETER Experiment Name: At_Drought_Soil_Dry_P Parameter: Plant Line Value: WS
  misc_feature: MA Experiment 20001559 PARAMETER Experiment Name: At_Drought_Soil_Dry_P Parameter: Post Timepoint (hr) Value: 29
  misc_feature: MA Experiment 20001559 PARAMETER Experiment Name: At_Drought_Soil_Dry_P Parameter: Post-Treatment Value: Re-Water vs. No Drought
  misc_feature: MA Experiment 20001559 PARAMETER Experiment Name: At_Drought_Soil_Dry_P Parameter: Timepoint (day) Value: 14
  misc_feature: MA Experiment 20001559 PARAMETER Experiment Name: At_Drought_Soil_Dry_P Parameter: Treatment Value: Drought vs. No Drought
  misc_feature: MA Experiment ID: 20001560 Result: Up-regulated in Transcription
  misc_feature: MA Experiment 20001560 PARAMETER Experiment Name: At_Drought_Soil_Dry_P Parameter: Age (day) Value: 28
  misc_feature: MA Experiment 20001560 PARAMETER Experiment Name: At_Drought_Soil_Dry_P Parameter: Organism Value: A. thaliana
  misc_feature: MA Experiment 20001560 PARAMETER Experiment Name: At_Drought_Soil_Dry_P Parameter: Plant Line Value: WS
  misc_feature: MA Experiment 20001560 PARAMETER Experiment Name: At_Drought_Soil_Dry_P Parameter: Post Timepoint (hr) Value: None
  misc_feature: MA Experiment 20001560 PARAMETER Experiment Name: At_Drought_Soil_Dry_P Parameter: Post-Treatment Value: None
  misc_feature: MA Experiment 20001560 PARAMETER Experiment Name: At_Drought_Soil_Dry_P Parameter: Timepoint (day) Value: 14
  misc_feature: MA Experiment 20001560 PARAMETER Experiment Name: At_Drought_Soil_Dry_P Parameter: Treatment Value: Drought vs. No Drought
  misc_feature: MA Experiment ID: 20001757 Result: Down-regulated in Transcription
  misc_feature: MA Experiment 20001757 PARAMETER Experiment Name: At_50mM_NH4NO3_L-to-H_P Parameter: Timepoint (hr) Value: 6
  misc_feature: MA Experiment 20001757 PARAMETER Experiment Name: At_50mM_NH4NO3_L-to-H_P Parameter: Tissue Value: Leaf
  misc_feature: MA Experiment 20001757 PARAMETER Experiment Name: At_50mM_NH4NO3_L-to-H_P Parameter: Treatment Value: 50mM NH4NO3 vs 100mM Mannitol
  misc_feature: MA Experiment ID: 20001774 Result: Down-regulated in Transcription
  misc_feature: MA Experiment 20001774 PARAMETER Experiment Name: At_Far-red-enriched-adult_P Parameter: Age (day) Value: 31
  misc_feature: MA Experiment 20001774 PARAMETER Experiment Name: At_Far-red-enriched-adult_P Parameter: Light Value: Far-red enriched vs. White
  misc_feature: MA Experiment 20001774 PARAMETER Experiment Name: At_Far-red-enriched-adult_P Parameter: Organism Value: A. thaliana
  misc_feature: MA Experiment 20001774 PARAMETER Experiment Name: At_Far-red-enriched-adult_P Parameter: Plant Line Value: Columbia
  misc_feature: MA Experiment 20001774 PARAMETER Experiment Name: At_Far-red-enriched-adult_P Parameter: Timepoint (hr) Value: 72
  misc_feature: MA Experiment 20001774 PARAMETER Experiment Name: At_Far-red-enriched-adult_P Parameter: Tissue Value: Aerial
tcttcttctctacaacaaacaaacaaaagatctgtttcaatggcggatcgtgttaaaggtccatggagtcaagaagaagatgagcagctacgaaggatggttgagaaatacggaccgaggaattggtctgcgattagcaaatcgattccaggtcgatctggtaaatcgtgtagattacggtggtgtaatcagttatctccggaggttgagcatcgtcctttctcgccggaggaagatgagactattgtaaccgcccgtgctcagtttggtaacaagtgggcgacgattgctcgtcttcttaacggtcgtacggataacgccgttaaaaatcactggaactctacgcttaagaggaaatgcagcggaggtgtggcggttacgacggtgacggagacggaggaagatcaggatcggccgaagaagaggagatctgttagctttgattctgcttttgctccggtggatactggattgtacatgagtcctgagagtcctaacggaatcgatgttagtgattctagcacgattccgtcaccgtcgtctcctgttgctcagctgtttaaaccaatgccgatttccggcggttttacggtggttccgcagccgttaccggttgaaatgtcttcgtcttcggaggatccacctacttcgttgagtttgtcactacctggagctgagaacacgagttcgagccataacaataacaacaacgcgttgatgtttccgagatttgagagtcagatgaagattaatgtagaggagagaggaggaggaggagaaggacgtagaggtgagtttatgacggtggtgcaggagatgataaaagctgaagtgaggagttacatggcggaaatgcagaaaacaagtggtggattcgtcgtcggaggtttatacgaatccggcggcaatggtggttttagggattgtggaataataacacctaaggttgagtagttttggtttagggttaaaacttgaatcgattggggattttcaagagcattcatttttggggtttatggtaaaattaaaaacaaaaaaaaaatgtacagaggaattaaaatttctatggaataatcttaaatctcaaatatttgttacttgttttggtgattcataaccaaaatc

SEQ ID NO: 98115 - protein, 317 aa, Arabidopsis thaliana
  peptide (1)..(317): Ceres Seq. ID no. 13579497
  misc_feature (19)..(65): Pfam Name: Myb-like DNA-binding domain Pfam Description: Myb-like DNA-binding domain
  misc_feature (14)..(317): Homolog of NCBI NO: 2832406 NR Description: R2R3-MYB transcription factor [Arabidopsis
  misc_feature (14)..(317): Homolog of NCBI NO: 2129647 NR Description: myb-related protein, 33.2K - Arabidopsis thaliana
  misc_feature (14)..(317): Homolog of NCBI NO: 15229664 NR Description: myb DNA-binding protein (MYB77) [Arabidopsis
  misc_feature (14)..(301): Homolog of NCBI NO: 15240708 NR Description: myb family transcription factor [Arabidopsis
  misc_feature (14)..(301): Homolog of NCBI NO: 15450393 NR Description: AT5g67300/K8K14_2 [Arabidopsis thaliana]
  misc_feature (14)..(301): Homolog of NCBI NO: 2129648 NR Description: myb-related protein, 33.3K - Arabidopsis thaliana
  misc_feature (14)..(301): Homolog of NCBI NO: 21592897 NR Description: myb-related protein, 33.3K [Arabidopsis thaliana]
  misc_feature (16)..(305): Homolog of NCBI NO: 15235484 NR Description: myb DNA-binding protein (AtMYB73) [Arabidopsis
  misc_feature (16)..(234): Homolog of NCBI NO: 9954112 NR Description: tuber-specific and sucrose-responsive element
  misc_feature (16)..(308): Homolog of NCBI NO: 21593586 NR Description: putative MYB family transcription factor
SSSLQQTNKRSVSMADRVKGPWSQEEDEQLRRMVEKYGPRNWSAISKSIPGRSGKSCRLRWCNQLSPEVEHRPFSPEEDETIVTARAQFGNKWATIARLLNGRTDNAVKNHWNSTLKRKCSGGVAVTTVTETEEDQDRPKKRRSVSFDSAFAPVDTGLYMSPESPNGIDVSDSSTIPSPSSPVAQLFKPMPISGGFTVVPQPLPVEMSSSSEDPPTSLSLSLPGAENTSSSHNNNNNALMFPRFESQMKINVEERGGGGEGRRGEFMTVVQEMIKAEVRSYMAEMQKTSGGFVVGGLYESGGNGGFRDCGIITPKVE

SEQ ID NO: 98116 - protein, 304 aa, Arabidopsis thaliana
  peptide (1)..(304): Ceres Seq. ID no. 13579498
  misc_feature (6)..(52): Pfam Name: Myb-like DNA-binding domain Pfam Description: Myb-like DNA-binding domain
  misc_feature (1)..(304): Homolog of NCBI NO: 2832406 NR Description: R2R3-MYB transcription factor [Arabidopsis
  misc_feature (1)..(304): Homolog of NCBI NO: 2129647 NR Description: myb-related protein, 33.2K - Arabidopsis thaliana
  misc_feature (1)..(304): Homolog of NCBI NO: 15229664 NR Description: myb DNA-binding protein (MYB77) [Arabidopsis
  misc_feature (1)..(288): Homolog of NCBI NO: 15240708 NR Description: myb family transcription factor [Arabidopsis
  misc_feature (1)..(288): Homolog of NCBI NO: 15450393 NR Description: AT5g67300/K8K14_2 [Arabidopsis thaliana]
  misc_feature (1)..(288): Homolog of NCBI NO: 2129648 NR Description: myb-related protein, 33.3K - Arabidopsis thaliana
  misc_feature (1)..(288): Homolog of NCBI NO: 21592897 NR Description: myb-related protein, 33.3K [Arabidopsis thaliana]
  misc_feature (3)..(292): Homolog of NCBI NO: 15235484 NR Description: myb DNA-binding protein (AtMYB73) [Arabidopsis
  misc_feature (3)..(221): Homolog of NCBI NO: 9954112 NR Description: tuber-specific and sucrose-responsive element
  misc_feature (3)..(295): Homolog of NCBI NO: 21593586 NR Description: putative MYB family transcription factor
MADRVKGPWSQEEDEQLRRMVEKYGPRNWSAISKSIPGRSGKSCRLRWCNQLSPEVEHRPFSPEEDETIVTARAQFGNKWATIARLLNGRTDNAVKNHWNSTLKRKCSGGVAVTTVTETEEDQDRPKKRRSVSFDSAFAPVDTGLYMSPESPNGIDVSDSSTIPSPSSPVAQLFKPMPISGGFTVVPQPLPVEMSSSSEDPPTSLSLSLPGAENTSSSHNNNNNALMFPRFESQMKINVEERGGGGEGRRGEFMTVVQEMIKAEVRSYMAEMQKTSGGFVVGGLYESGGNGGFRDCGIITPKVE

SEQ ID NO: 98117 - protein, 285 aa, Arabidopsis thaliana
  peptide (1)..(285): Ceres Seq. ID no. 13579499
  misc_feature (1)..(285): Homolog of NCBI NO: 2832406 NR Description: R2R3-MYB transcription factor [Arabidopsis
  misc_feature (1)..(285): Homolog of NCBI NO: 2129647 NR Description: myb-related protein, 33.2K - Arabidopsis thaliana
  misc_feature (1)..(285): Homolog of NCBI NO: 15229664 NR Description: myb DNA-binding protein (MYB77) [Arabidopsis
  misc_feature (1)..(269): Homolog of NCBI NO: 15240708 NR Description: myb family transcription factor [Arabidopsis
  misc_feature (1)..(269): Homolog of NCBI NO: 15450393 NR Description: AT5g67300/K8K14_2 [Arabidopsis thaliana]
  misc_feature (1)..(269): Homolog of NCBI NO: 2129648 NR Description: myb-related protein, 33.3K - Arabidopsis thaliana
  misc_feature (1)..(269): Homolog of NCBI NO: 21592897 NR Description: myb-related protein, 33.3K [Arabidopsis thaliana]
  misc_feature (1)..(273): Homolog of NCBI NO: 15235484 NR Description: myb DNA-binding protein (AtMYB73) [Arabidopsis
  misc_feature (1)..(202): Homolog of NCBI NO: 9954112 NR Description: tuber-specific and sucrose-responsive element
  misc_feature (1)..(276): Homolog of NCBI NO: 21593586 NR Description: putative MYB family transcription factor
MVEKYGPRNWSAISKSIPGRSGKSCRLRWCNQLSPEVEHRPFSPEEDETIVTARAQFGNKWATIARLLNGRTDNAVKNHWNSTLKRKCSGGVAVTTVTETEEDQDRPKKRRSVSFDSAFAPVDTGLYMSPESPNGIDVSDSSTIPSPSSPVAQLFKPMPISGGFTVVPQPLPVEMSSSSEDPPTSLSLSLPGAENTSSSHNNNNNALMFPRFESQMKINVEERGGGGEGRRGEFMTVVQEMIKAEVRSYMAEMQKTSGGFVVGGLYESGGNGGFRDCGIITPKVE

SEQ ID NO: 98118 - DNA, 1062 bp, Arabidopsis thaliana
  misc_feature (1)..(1062): Ceres Seq. ID no. 13579500
  misc_feature: MA Experiment ID: 20000171 Result: Down-regulated in Transcription
  misc_feature: MA Experiment 20000171 PARAMETER Experiment Name: At_42deg_Heat_P Parameter: Age (day) Value: 14
  misc_feature: MA Experiment 20000171 PARAMETER Experiment Name: At_42deg_Heat_P Parameter: Organism Value: A. thaliana
  misc_feature: MA Experiment 20000171 PARAMETER Experiment Name: At_42deg_Heat_P Parameter: Plant Line Value: WS
  misc_feature: MA Experiment 20000171 PARAMETER Experiment Name: At_42deg_Heat_P Parameter: Temperature (deg C) Value: 42 vs. 22
  misc_feature: MA Experiment 20000171 PARAMETER Experiment Name: At_42deg_Heat_P Parameter: Timepoint (hr) Value: 1
  misc_feature: MA Experiment 20000171 PARAMETER Experiment Name: At_42deg_Heat_P Parameter: Tissue Value: Aerial
  misc_feature: MA Experiment ID: 20000173 Result: Down-regulated in Transcription
  misc_feature: MA Experiment 20000173 PARAMETER Experiment Name: At_42deg_Heat_P Parameter: Age (day) Value: 14
  misc_feature: MA Experiment 20000173 PARAMETER Experiment Name: At_42deg_Heat_P Parameter: Organism Value: A. thaliana
  misc_feature: MA Experiment 20000173 PARAMETER Experiment Name: At_42deg_Heat_P Parameter: Plant Line Value: WS
  misc_feature: MA Experiment 20000173 PARAMETER Experiment Name: At_42deg_Heat_P Parameter: Temperature (deg C) Value: 42 vs. 22
  misc_feature: MA Experiment 20000173 PARAMETER Experiment Name: At_42deg_Heat_P Parameter: Timepoint (hr) Value: 6
  misc_feature: MA Experiment 20000173 PARAMETER Experiment Name: At_42deg_Heat_P Parameter: Tissue Value: Aerial
  misc_feature: MA Experiment ID: 20001248 Result: Down-regulated in Transcription
  misc_feature: MA Experiment 20001248 PARAMETER Experiment Name: At_Far-red-induction_P Parameter: Age (day) Value: 7
  misc_feature: MA Experiment 20001248 PARAMETER Experiment Name: At_Far-red-induction_P Parameter: Light Value: Far-red vs. White
  misc_feature: MA Experiment 20001248 PARAMETER Experiment Name: At_Far-red-induction_P Parameter: Organism Value: A. thaliana
  misc_feature: MA Experiment 20001248 PARAMETER Experiment Name: At_Far-red-induction_P Parameter: Plant Line Value: Columbia
  misc_feature: MA Experiment 20001248 PARAMETER Experiment Name: At_Far-red-induction_P Parameter: Timepoint (hr) Value: 4
  misc_feature: MA Experiment 20001248 PARAMETER Experiment Name: At_Far-red-induction_P Parameter: Tissue Value: Whole Plant
  misc_feature: MA Experiment ID: 20001450 Result: Down-regulated in Transcription
  misc_feature: MA Experiment 20001450 PARAMETER Experiment Name: At_Far-red-induction_P Parameter: Age (day) Value: 7
  misc_feature: MA Experiment 20001450 PARAMETER Experiment Name: At_Far-red-induction_P Parameter: Light Value: Far-red vs. White
  misc_feature: MA Experiment 20001450 PARAMETER Experiment Name: At_Far-red-induction_P Parameter: Organism Value: A. thaliana
  misc_feature: MA Experiment 20001450 PARAMETER Experiment Name: At_Far-red-induction_P Parameter: Plant Line Value: Columbia
  misc_feature: MA Experiment 20001450 PARAMETER Experiment Name: At_Far-red-induction_P Parameter: Timepoint (hr) Value: 8
  misc_feature: MA Experiment 20001450 PARAMETER Experiment Name: At_Far-red-induction_P Parameter: Tissue Value: Whole Plant
  misc_feature: MA Experiment ID: 20001560 Result: Up-regulated in Transcription
  misc_feature: MA Experiment 20001560 PARAMETER Experiment Name: At_Drought_Soil_Dry_P Parameter: Age (day) Value: 28
  misc_feature: MA Experiment 20001560 PARAMETER Experiment Name: At_Drought_Soil_Dry_P Parameter: Organism Value: A. thaliana
  misc_feature: MA Experiment 20001560 PARAMETER Experiment Name: At_Drought_Soil_Dry_P Parameter: Plant Line Value: WS
  misc_feature: MA Experiment 20001560 PARAMETER Experiment Name: At_Drought_Soil_Dry_P Parameter: Post Timepoint (hr) Value: None
  misc_feature: MA Experiment 20001560 PARAMETER Experiment Name: At_Drought_Soil_Dry_P Parameter: Post-Treatment Value: None
  misc_feature: MA Experiment 20001560 PARAMETER Experiment Name: At_Drought_Soil_Dry_P Parameter: Timepoint (day) Value: 14
  misc_feature: MA Experiment 20001560 PARAMETER Experiment Name: At_Drought_Soil_Dry_P Parameter: Treatment Value: Drought vs. No Drought
  misc_feature: MA Experiment ID: 20001905 Result: Down-regulated in Transcription
  misc_feature: MA Experiment 20001905 PARAMETER Experiment Name: At_Drought_Reproduction_P Parameter: Age (day) Value: 40
  misc_feature: MA Experiment 20001905 PARAMETER Experiment Name: At_Drought_Reproduction_P Parameter: Organism Value: A. thaliana
  misc_feature: MA Experiment 20001905 PARAMETER Experiment Name: At_Drought_Reproduction_P Parameter: Plant Line Value: WS
  misc_feature: MA Experiment 20001905 PARAMETER Experiment Name: At_Drought_Reproduction_P Parameter: Timepoint (day) Value: 10
  misc_feature: MA Experiment 20001905 PARAMETER Experiment Name: At_Drought_Reproduction_P Parameter: Tissue Value: Rosettes
  misc_feature: MA Experiment 20001905 PARAMETER Experiment Name: At_Drought_Reproduction_P Parameter: Treatment Value: Drought vs. No Drought
  misc_feature: MA Experiment ID: 20001911 Result: Down-regulated in Transcription
  misc_feature: MA Experiment 20001911 PARAMETER Experiment Name: At_Drought_Reproduction_P Parameter: Age (day) Value: 40
  misc_feature: MA Experiment 20001911 PARAMETER Experiment Name: At_Drought_Reproduction_P Parameter: Organism Value: A. thaliana
  misc_feature: MA Experiment 20001911 PARAMETER Experiment Name: At_Drought_Reproduction_P Parameter: Plant Line Value: WS
  misc_feature: MA Experiment 20001911 PARAMETER Experiment Name: At_Drought_Reproduction_P Parameter: Timepoint (day) Value: 10
  misc_feature: MA Experiment 20001911 PARAMETER Experiment Name: At_Drought_Reproduction_P Parameter: Tissue Value: Flowers
  misc_feature: MA Experiment 20001911 PARAMETER Experiment Name: At_Drought_Reproduction_P Parameter: Treatment Value: Drought vs. No Drought
atggcttacgagaaagagcttgatgctgctaagaaagctgcttcactcgctgctcgtctctgtcagaaagttcaaaaggctttgttgcaatcagatgtgcaatcaaaatctgataaaagtccagtgaccgttgctgattatggttcacaagcagttgttagtttagtcttagaaaaagagctcagttctgaacccttttcattggtggctgaagaggactcaggcgatctacgcaaggatggttctcaggatactctggagcgcatcacaaaactcgtgaacgacactttggctaccgaggaatcgtttaatggctctactttgtctactgatgatctacttagagccattgactgtggaacatctgaaggtggtccaaatggtcgacactgggtcttggatccaattgatggcactaaaggatttctgaggggagatcaatacgcagtagcactaggattgctcgaggaagggaaagtagttttaggtgtgcttgcttgtccaaacttgccgttagcatccatagcaggaaacaacaagaacaaatcttcgtcagacgaaattggatgcctcttctttgctacaattggttcagggacatatatgcagctcctagattcaaaatcttctcctgtaaaagtgcaagtctctagtgttgagaatcctgaagaggcatcgttcttcgagtcattcgaaggagctcactctctacatgacttatccagctccattgccaataaactcggtgtcaaagctccaccagtccgtattgatagccaagcaaagtatggagctttatcaagaggagatggagctatatacttacggtttcctcataaaggataccgcgaaaagatttgggaccatgtcgctggtgctatagttgttacagaggcgggtggaatagtgacagatgcagcaggaaagccactggatttctcgaaagggaagtatcttgatttggacacaggcattatcgttgctaacgagaagctaatgcctctgcttttgaaagcagttcgtgactccatagctgagcaagagaaagcttcagctctctga

SEQ ID NO: 98119 - protein, 353 aa, Arabidopsis thaliana; identical to SEQ ID NO: 78395
  peptide (1)..(353): Ceres Seq. ID no. 13579501
  misc_feature (1)..(353): Homolog of NCBI NO: 15237567 NR Description: 3(2),5-bisphosphate nucleotidase [Arabidopsis
  misc_feature (3)..(353): Homolog of NCBI NO: 14268820 NR Description: diphosphonucleotide phosphatase 1 [Zea mays]
  misc_feature (3)..(352): Homolog of NCBI NO: 3913517 NR Description: 3'(2'),5'-BISPHOSPHATE NUCLEOTIDASE (3'(2'),5-
  misc_feature (1)..(347): Homolog of NCBI NO: 15237589 NR Description: 3(2),5-bisphosphate nucleotidase (emb|CAB05889.1)
  misc_feature (1)..(349): Homolog of NCBI NO: 18424775 NR Description: 3(2),5-bisphosphate nucleotidase [Arabidopsis
  misc_feature (1)..(349): Homolog of NCBI NO: 21618152 NR Description: 3(2),5-bisphosphate nucleotidase [Arabidopsis
  misc_feature (1)..(347): Homolog of NCBI NO: 34395640 NR Description: Probable SAL4 phosphatase (3'(2'),5'-bisphosphate
  misc_feature (1)..(349): Homolog of NCBI NO: 8777312 NR Description: 3'(2'),5'-bisphosphate nucleotidase [Arabidopsis
  misc_feature (1)..(347): Homolog of NCBI NO: 15242383 NR Description: 3'(2'),5'-bisphosphate nucleotidase-related
  misc_feature (133)..(353): Homolog of NCBI NO: 17017951 NR Description: 3'(2'),5'-bisphosphate nucleotidase [Gossypium

SEQ ID NO: 98120 - DNA, 1168 bp, Arabidopsis thaliana
  misc_feature (1)..(1168): Ceres Seq. ID no. 13579510
  misc_feature: MA Experiment ID: 20000173 Result: Up-regulated in Transcription
  misc_feature: MA Experiment 20000173 PARAMETER Experiment Name: At_42deg_Heat_P Parameter: Age (day) Value: 14
  misc_feature: MA Experiment 20000173 PARAMETER Experiment Name: At_42deg_Heat_P Parameter: Organism Value: A. thaliana
  misc_feature: MA Experiment 20000173 PARAMETER Experiment Name: At_42deg_Heat_P Parameter: Plant Line Value: WS
  misc_feature: MA Experiment 20000173 PARAMETER Experiment Name: At_42deg_Heat_P Parameter: Temperature (deg C) Value: 42 vs. 22
  misc_feature: MA Experiment 20000173 PARAMETER Experiment Name: At_42deg_Heat_P Parameter: Timepoint (hr) Value: 6
  misc_feature: MA Experiment 20000173 PARAMETER Experiment Name: At_42deg_Heat_P Parameter: Tissue Value: Aerial
  misc_feature: MA Experiment ID: 20000182 Result: Up-regulated in Transcription
  misc_feature: MA Experiment 20000182 PARAMETER Experiment Name: At_2mM_SA_P Parameter: Age (day) Value: 14
  misc_feature: MA Experiment 20000182 PARAMETER Experiment Name: At_2mM_SA_P Parameter: Organism Value: A. thaliana
  misc_feature: MA Experiment 20000182 PARAMETER Experiment Name: At_2mM_SA_P Parameter: Plant Line Value: WS
  misc_feature: MA Experiment 20000182 PARAMETER Experiment Name: At_2mM_SA_P Parameter: Timepoint (hr) Value: 6
  misc_feature: MA Experiment 20000182 PARAMETER Experiment Name: At_2mM_SA_P Parameter: Tissue Value: Aerial
  misc_feature: MA Experiment 20000182 PARAMETER Experiment Name: At_2mM_SA_P Parameter: Treatment Value: 2mM SA vs. No Treatment
  misc_feature: MA Experiment ID: 20000264 Result: Down-regulated in Transcription
  misc_feature: MA Experiment 20000264 PARAMETER Experiment Name: At_Open_Flower_P Parameter: Age (day) Value: 21
  misc_feature: MA Experiment 20000264 PARAMETER Experiment Name: At_Open_Flower_P Parameter: Plant Line Value: WS
  misc_feature: MA Experiment 20000264 PARAMETER Experiment Name: At_Open_Flower_P Parameter: Tissue Value: Open Flower vs. Whole Plant
  misc_feature: MA Experiment ID: 20000265 Result: Down-regulated in Transcription
  misc_feature: MA Experiment 20000265 PARAMETER Experiment Name: At_Open_Flower_P Parameter: Age (day) Value: 21
  misc_feature: MA Experiment 20000265 PARAMETER Experiment Name: At_Open_Flower_P Parameter: Plant Line Value: WS
  misc_feature: MA Experiment 20000265 PARAMETER Experiment Name: At_Open_Flower_P Parameter: Tissue Value: Closed Flower vs. Whole Plant
  misc_feature: MA Experiment ID: 20000286 Result: Down-regulated in Transcription
  misc_feature: MA Experiment 20000286 PARAMETER Experiment Name: At_Open_Flower_P Parameter: Age (day) Value: 21
  misc_feature: MA Experiment 20000286 PARAMETER Experiment Name: At_Open_Flower_P Parameter: Plant Line Value: WS
  misc_feature: MA Experiment 20000286 PARAMETER Experiment Name: At_Open_Flower_P Parameter: Tissue Value: Half Open vs. Whole Plant
  misc_feature: MA Experiment ID: 20000573 Result: Down-regulated in Transcription
  misc_feature: MA Experiment 20000573 PARAMETER Experiment Name: At_100uM_ABA_Mutants__P Parameter: Organism Value: A. thaliana
  misc_feature: MA Experiment 20000573 PARAMETER Experiment Name: At_100uM_ABA_Mutants__P Parameter: Plant Line Value: CS22 vs. Ler wt
  misc_feature: MA Experiment 20000573 PARAMETER Experiment Name: At_100uM_ABA_Mutants__P Parameter: Timepoint (hr) Value: N/A
  misc_feature: MA Experiment 20000573 PARAMETER Experiment Name: At_100uM_ABA_Mutants__P Parameter: Tissue Value: Whole Plant
  misc_feature: MA Experiment 20000573 PARAMETER Experiment Name: At_100uM_ABA_Mutants__P Parameter: Treatment Value: None
  misc_feature: MA Experiment ID: 20001905 Result: Up-regulated in Transcription
  misc_feature: MA Experiment 20001905 PARAMETER Experiment Name: At_Drought_Reproduction_P Parameter: Age (day) Value: 40
  misc_feature: MA Experiment 20001905 PARAMETER Experiment Name: At_Drought_Reproduction_P Parameter: Organism Value: A. thaliana
  misc_feature: MA Experiment 20001905 PARAMETER Experiment Name: At_Drought_Reproduction_P Parameter: Plant Line Value: WS
  misc_feature: MA Experiment 20001905 PARAMETER Experiment Name: At_Drought_Reproduction_P Parameter: Timepoint (day) Value: 10
  misc_feature: MA Experiment 20001905 PARAMETER Experiment Name: At_Drought_Reproduction_P Parameter: Tissue Value: Rosettes
  misc_feature: MA Experiment 20001905 PARAMETER Experiment Name: At_Drought_Reproduction_P Parameter: Treatment Value: Drought vs. No Drought
  misc_feature: MA Experiment ID: 20001911 Result: Up-regulated in Transcription
  misc_feature: MA Experiment 20001911 PARAMETER Experiment Name: At_Drought_Reproduction_P Parameter: Age (day) Value: 40
  misc_feature: MA Experiment 20001911 PARAMETER Experiment Name: At_Drought_Reproduction_P Parameter: Organism Value: A. thaliana
  misc_feature: MA Experiment 20001911 PARAMETER Experiment Name: At_Drought_Reproduction_P Parameter: Plant Line Value: WS
  misc_feature: MA Experiment 20001911 PARAMETER Experiment Name: At_Drought_Reproduction_P Parameter: Timepoint (day) Value: 10
  misc_feature: MA Experiment 20001911 PARAMETER Experiment Name: At_Drought_Reproduction_P Parameter: Tissue Value: Flowers
  misc_feature: MA Experiment 20001911 PARAMETER Experiment Name: At_Drought_Reproduction_P Parameter: Treatment Value: Drought vs. No Drought
gcacgagatttttttgtcgattcttcgtcgtcctcctttgaaattcacaccaatttgtctctcttcctagagaaacaaaagattattcgaaactcgggaaagtatcatccggtcaccggaaaattgattatttccgatgccaataggtgaccgtcagaatccgagtgtggagaagaagaagaacctcttcaggctatgtccgttttggcagaggagaagcaccacttcttcatcttcaacacagaatccaaaccaaaactaccgtagccgccatggaaatcggaatacagatatttccgccgtctctaagcctccgttgactatgtcttccgtcgccagatcacttcttccagctcgccgtcgtctccgactagatccttctagttatctgtatttcccttatgaacctggaaaacaagttcgcagcgcaataaagcttaagaacactagcaaatctcatactgcatttaagttccaaacaacggcacctaagagttgttatatgcgtcctcccggaggtgttttggctccaggagagagtgtttttgctactgtgttcaagtttgtggaacatccagagaacaatgaaaagcagccgttgaatcagaagagcaaggttaagtttaagattatgagcctgaaagttaaaccaggagtagagtatgtgcctgagttgtttgatgagcaaaaggatcaagtagcagtggagcaggttcttcgggtcatttttattgatgcggaccgcccaagtgctgcattggagaaactgaaacgtcaattggatgaagctgaagctgcagttgaagcaagaaagaagcctcccccagagacagggcctcgagttgtcggggagggtcttgtcatagacgaatggaaggagagaagagagaagtaccttgctcggcaacaagtcgaatccgtagattctttgtcctaaacgcagagagcaatgtggacttgttctgcagatcatgtacataatttattatccctcgattatgtatttatctctagacgattactttgtggttcttgtatgtctctgtttgttgtgtgattcatgccggttttttctccttcatcaaattttgtttcggtcgtttttagttgatctagaatcgaaccagagtttgttcagtatttagttacaaatgaaaaatcctgttat

SEQ ID NO: 98121 - protein, 266 aa, Arabidopsis thaliana
  peptide (1)..(266): Ceres Seq. ID no. 13579511
  misc_feature (1)..(266): Homolog of NCBI NO: 18423592 NR Description: VAMP (vesicle-associated membrane
  misc_feature (1)..(246): Homolog of NCBI NO: 8809582 NR Description: membrane associated protein [Arabidopsis thaliana]
  misc_feature (247)..(266): Homolog of NCBI NO: 8809582 NR Description: membrane associated protein [Arabidopsis thaliana]
  misc_feature (1)..(266): Homolog of NCBI NO: 1800147 NR Description: membrane associated protein [Arabidopsis thaliana]
  misc_feature (36)..(265): Homolog of NCBI NO: 18415696 NR Description: VAMP (vesicle-associated membrane protein family [Arabidopsis thaliana] >gi|17979373|gb|AAL49912.1| membrane associated protein [Arabidopsis thaliana] [Arabidopsis
  misc_feature (17)..(265): Homolog of NCBI NO: 34394013 NR Description: putative 27k vesicle-associated membrane
  misc_feature (36)..(265): Homolog of NCBI NO: 7485721 NR Description: hypothetical protein F18E5.70 - Arabidopsis >gi|3080389|emb|CAA18709.1| putative membrane associated protein thaliana] >gi|7268942|emb|CAB81252.1| putative membrane
  misc_feature (28)..(258): Homolog of NCBI NO: 18412787 NR Description: VAMP (vesicle-associated membrane protein family [Arabidopsis thaliana] >gi|20453193|gb|AAM19836.1| [Arabidopsis thaliana] >gi|23505843|gb|AAN28781.1|
  misc_feature (28)..(258): Homolog of NCBI NO: 21593103 NR Description: membrane associated protein-like protein
  misc_feature (147)..(258): Homolog of NCBI NO: 25365874 NR Description: hypothetical protein AT4g05060 [imported] - thaliana >gi|5732080|gb|AAD48979.1|AF162444_11 contains to Arabidopsis thaliana membrane associated protein (GB:U83655)
MPIGDRQNPSVEKKKNLFRLCPFWQRRSTTSSSSTQNPNQNYRSRHGNRNTDISAVSKPPLTMSSVARSLLPARRRLRLDPSSYLYFPYEPGKQVRSAIKLKNTSKSHTAFKFQTTAPKSCYMRPPGGVLAPGESVFATVFKFVEHPENNEKQPLNQKSKVKFKIMSLKVKPGVEYVPELFDEQKDQVAVEQVLRVIFIDADRPSAALEKLKRQLDEAEAAVEARKKPPPETGPRVVGEGLVIDEWKERREKYLARQQVESVDSLS

SEQ ID NO: 98122 - protein, 204 aa, Arabidopsis thaliana; identical to SEQ ID NO: 23131
  peptide (1)..(204): Ceres Seq. ID no. 13579512
  misc_feature (1)..(204): Homolog of NCBI NO: 18423592 NR Description: VAMP (vesicle-associated membrane
  misc_feature (1)..(184): Homolog of NCBI NO: 8809582 NR Description: membrane associated protein [Arabidopsis thaliana]
  misc_feature (185)..(204): Homolog of NCBI NO: 8809582 NR Description: membrane associated protein [Arabidopsis thaliana]
  misc_feature (1)..(204): Homolog of NCBI NO: 1800147 NR Description: membrane associated protein [Arabidopsis thaliana]
  misc_feature (1)..(203): Homolog of NCBI NO: 18415696 NR Description: VAMP (vesicle-associated membrane protein family [Arabidopsis thaliana] >gi|17979373|gb|AAL49912.1| membrane associated protein [Arabidopsis thaliana] [Arabidopsis
  misc_feature (1)..(203): Homolog of NCBI NO: 34394013 NR Description: putative 27k vesicle-associated membrane
  misc_feature (1)..(203): Homolog of NCBI NO: 7485721 NR Description: hypothetical protein F18E5.70 - Arabidopsis >gi|3080389|emb|CAA18709.1| putative membrane associated protein thaliana] >gi|7268942|emb|CAB81252.1| putative membrane
  misc_feature (1)..(196): Homolog of NCBI NO: 18412787 NR Description: VAMP (vesicle-associated membrane protein family [Arabidopsis thaliana] >gi|20453193|gb|AAM19836.1| [Arabidopsis thaliana] >gi|23505843|gb|AAN28781.1|
  misc_feature (1)..(196): Homolog of NCBI NO: 21593103 NR Description: membrane associated protein-like protein
  misc_feature (85)..(196): Homolog of NCBI NO: 25365874 NR Description: hypothetical protein AT4g05060 [imported] - thaliana >gi|5732080|gb|AAD48979.1|AF162444_11 contains to Arabidopsis thaliana membrane associated protein (GB:U83655)

SEQ ID NO: 98123 - protein, 144 aa, Arabidopsis thaliana; identical to SEQ ID NO: 23132
  peptide (1)..(144): Ceres Seq. ID no. 13579513
  misc_feature (1)..(144): Homolog of NCBI NO: 18423592 NR Description: VAMP (vesicle-associated membrane
  misc_feature (1)..(124): Homolog of NCBI NO: 8809582 NR Description: membrane associated protein [Arabidopsis thaliana]
  misc_feature (125)..(144): Homolog of NCBI NO: 8809582 NR Description: membrane associated protein [Arabidopsis thaliana]
  misc_feature (1)..(144): Homolog of NCBI NO: 1800147 NR Description: membrane associated protein [Arabidopsis thaliana]
  misc_feature (1)..(143): Homolog of NCBI NO: 18415696 NR Description: VAMP (vesicle-associated membrane protein family [Arabidopsis thaliana] >gi|17979373|gb|AAL49912.1| membrane associated protein [Arabidopsis thaliana] [Arabidopsis
  misc_feature (1)..(143): Homolog of NCBI NO: 34394013 NR Description: putative 27k vesicle-associated membrane
  misc_feature (1)..(143): Homolog of NCBI NO: 7485721 NR Description: hypothetical protein F18E5.70 - Arabidopsis >gi|3080389|emb|CAA18709.1| putative membrane associated protein thaliana] >gi|7268942|emb|CAB81252.1| putative membrane
  misc_feature (1)..(136): Homolog of NCBI NO: 18412787 NR Description: VAMP (vesicle-associated membrane protein family [Arabidopsis thaliana] >gi|20453193|gb|AAM19836.1| [Arabidopsis thaliana] >gi|23505843|gb|AAN28781.1|
  misc_feature (1)..(136): Homolog of NCBI NO: 21593103 NR Description: membrane associated protein-like protein
  misc_feature (25)..(136): Homolog of NCBI NO: 25365874 NR Description: hypothetical protein AT4g05060 [imported] - thaliana >gi|5732080|gb|AAD48979.1|AF162444_11 contains to Arabidopsis thaliana membrane associated protein (GB:U83655)

SEQ ID NO: 98124 - DNA, 1638 bp, Arabidopsis thaliana
  misc_feature (1)..(1638): Ceres Seq. ID no. 13579514
  misc_feature: MA Experiment ID: 108434 Result: Up-regulated in Transcription
  misc_feature: MA Experiment 108434 PARAMETER Experiment Name: At_Root_Tips_cDNA_P Parameter: Tissue Value: Root Tips
  misc_feature: MA Experiment ID: 108461 Result: Up-regulated in Transcription
  misc_feature: MA Experiment 108461 PARAMETER Experiment Name: At_Germinating_Seeds_cDNA_P Parameter: Age (day) Value: 1 vs. 0
  misc_feature: MA Experiment 108461 PARAMETER Experiment Name: At_Germinating_Seeds_cDNA_P Parameter: Tissue Value: Germinating Seeds
  misc_feature: MA Experiment ID: 108462 Result: Up-regulated in Transcription
  misc_feature: MA Experiment 108462 PARAMETER Experiment Name: At_Germinating_Seeds_cDNA_P Parameter: Age (day) Value: 2 vs. 0
  misc_feature: MA Experiment 108462 PARAMETER Experiment Name: At_Germinating_Seeds_cDNA_P Parameter: Tissue Value: Germinating Seeds
  misc_feature: MA Experiment ID: 20000179 Result: Up-regulated in Transcription
  misc_feature: MA Experiment 20000179 PARAMETER Experiment Name: At_Germinating_Seeds_P Parameter: Age (hr) Value: 6 vs. 0
  misc_feature: MA Experiment 20000179 PARAMETER Experiment Name: At_Germinating_Seeds_P Parameter: Tissue Value: Germinating Seeds
  misc_feature: MA Experiment ID: 20000180 Result: Up-regulated in Transcription
  misc_feature: MA Experiment 20000180 PARAMETER Experiment Name: At_Germinating_Seeds_P Parameter: Age (hr) Value: 24 vs. 0
  misc_feature: MA Experiment 20000180 PARAMETER Experiment Name: At_Germinating_Seeds_P Parameter: Tissue Value: Germinating Seeds
  misc_feature: MA Experiment ID: 20000185 Result: Up-regulated in Transcription
  misc_feature: MA Experiment 20000185 PARAMETER Experiment Name: At_Roots__P Parameter: Age (day) Value: 7 vs. 21
  misc_feature: MA Experiment 20000185 PARAMETER Experiment Name: At_Roots__P Parameter: Organism Value: A. thaliana
  misc_feature: MA Experiment 20000185 PARAMETER Experiment Name: At_Roots__P Parameter: Tissue Value: Roots vs. Whole Plant
  misc_feature: MA Experiment ID: 20000234 Result: Up-regulated in Transcription
  misc_feature: MA Experiment 20000234 PARAMETER Experiment Name: At_Siliques_P Parameter: Age (day) Value: 21
  misc_feature: MA Experiment 20000234 PARAMETER Experiment Name: At_Siliques_P Parameter: Organism Value: A. thaliana
  misc_feature: MA Experiment 20000234 PARAMETER Experiment Name: At_Siliques_P Parameter: Plant Line Value: WS
  misc_feature: MA Experiment 20000234 PARAMETER Experiment Name: At_Siliques_P Parameter: Tissue Value: Less Than 5mm Siliques vs. Whole Plant
  misc_feature: MA Experiment ID: 20000265 Result: Up-regulated in Transcription
  misc_feature: MA Experiment 20000265 PARAMETER Experiment Name: At_Open_Flower_P Parameter: Age (day) Value: 21
  misc_feature: MA Experiment 20000265 PARAMETER Experiment Name: At_Open_Flower_P Parameter: Plant Line Value: WS
  misc_feature: MA Experiment 20000265 PARAMETER Experiment Name: At_Open_Flower_P Parameter: Tissue Value: Closed Flower vs. Whole Plant
  misc_feature: MA Experiment ID: 20000439 Result: Up-regulated in Transcription
  misc_feature: MA Experiment 20000439 PARAMETER Experiment Name: At_Roots__P Parameter: Age (day) Value: 14 vs. 21
  misc_feature: MA Experiment 20000439 PARAMETER Experiment Name: At_Roots__P Parameter: Organism Value: A. thaliana
  misc_feature: MA Experiment 20000439 PARAMETER Experiment Name: At_Roots__P Parameter: Tissue Value: Roots vs. Whole Plant
  misc_feature: MA Experiment ID: 20000794 Result: Up-regulated in Transcription
  misc_feature: MA Experiment 20000794 PARAMETER Experiment Name: At_Petals_P Parameter: Age (day) Value: 23-25 days
  misc_feature: MA Experiment 20000794 PARAMETER Experiment Name: At_Petals_P Parameter: Plant Line Value: WS
  misc_feature: MA Experiment 20000794 PARAMETER Experiment Name: At_Petals_P Parameter: Tissue Value: Petals vs. Whole plant
  misc_feature: MA Experiment ID: 20001558 Result: Up-regulated in Transcription
  misc_feature: MA Experiment 20001558 PARAMETER Experiment Name: At_Drought_Soil_Dry_P Parameter: Age (day) Value: 27
  misc_feature: MA Experiment 20001558 PARAMETER Experiment Name: At_Drought_Soil_Dry_P Parameter: Organism Value: A. thaliana
  misc_feature: MA Experiment 20001558 PARAMETER Experiment Name: At_Drought_Soil_Dry_P Parameter: Plant Line Value: WS
  misc_feature: MA Experiment 20001558 PARAMETER Experiment Name: At_Drought_Soil_Dry_P Parameter: Post Timepoint (hr) Value: 6
  misc_feature: MA Experiment 20001558 PARAMETER Experiment Name: At_Drought_Soil_Dry_P Parameter: Post-Treatment Value: Re-Water vs. No Drought
  misc_feature: MA Experiment 20001558 PARAMETER Experiment Name: At_Drought_Soil_Dry_P Parameter: Timepoint (day) Value: 13
  misc_feature: MA Experiment 20001558 PARAMETER Experiment Name: At_Drought_Soil_Dry_P Parameter: Treatment Value: Drought vs. No Drought
  misc_feature: MA Experiment ID: 20001560 Result: Up-regulated in Transcription
  misc_feature: MA Experiment 20001560 PARAMETER Experiment Name: At_Drought_Soil_Dry_P Parameter: Age (day) Value: 28
  misc_feature: MA Experiment 20001560 PARAMETER Experiment Name: At_Drought_Soil_Dry_P Parameter: Organism Value: A. thaliana
  misc_feature: MA Experiment 20001560 PARAMETER Experiment Name: At_Drought_Soil_Dry_P Parameter: Plant Line Value: WS
  misc_feature: MA Experiment 20001560 PARAMETER Experiment Name: At_Drought_Soil_Dry_P Parameter: Post Timepoint (hr) Value: None
  misc_feature: MA Experiment 20001560 PARAMETER Experiment Name: At_Drought_Soil_Dry_P Parameter: Post-Treatment Value: None
  misc_feature: MA Experiment 20001560 PARAMETER Experiment Name: At_Drought_Soil_Dry_P Parameter: Timepoint (day) Value: 14
  misc_feature: MA Experiment 20001560 PARAMETER Experiment Name: At_Drought_Soil_Dry_P Parameter: Treatment Value: Drought vs. No Drought
  misc_feature: MA Experiment ID: 20001911 Result: Down-regulated in Transcription
  misc_feature: MA Experiment 20001911 PARAMETER Experiment Name: At_Drought_Reproduction_P Parameter: Age (day) Value: 40
  misc_feature: MA Experiment 20001911 PARAMETER Experiment Name: At_Drought_Reproduction_P Parameter: Organism Value: A. thaliana
  misc_feature: MA Experiment 20001911 PARAMETER Experiment Name: At_Drought_Reproduction_P Parameter: Plant Line Value: WS
  misc_feature: MA Experiment 20001911 PARAMETER Experiment Name: At_Drought_Reproduction_P Parameter: Timepoint (day) Value: 10
  misc_feature: MA Experiment 20001911 PARAMETER Experiment Name: At_Drought_Reproduction_P Parameter: Tissue Value: Flowers
  misc_feature: MA Experiment 20001911 PARAMETER Experiment Name: At_Drought_Reproduction_P Parameter: Treatment Value: Drought vs. No Drought
tgagtaatttaggaagtcaatgagaagaaaagaacgatttttttttttaattcccaacttgtgttcgatctctgagcagctcttatctgatacaaccatttttttggatataatatctaaatttgtagtctttagtttaattcagatcccaattataataatgcccttttgatctgatccacattgcgtatcaaaggctattattattttattcccagagttcaattatttagttggtagaatctctctgtgttgttgtgaatctgtctgtttatgtaaatcaattcaaaaggttgtgacttttgtgtttgacttaggaaaatggaagtgaaagctagagctcctgggaagatcatacttgcaggggaacacgctgttgttcatggatccaccgctgtagctgccgccattgatctctacacttacgttactctccgctttcctcttccatcagctgagaacaatgataggcttacacttcagctcaaggacatttccttggagttttcatggtccttagccagaatcaaagaagcgattccttatgattcaagcactctctgccgttctacgccggcttcatgttcagaggagacccttaaatcaattgcagttttggttgaagagcaaaatcttccaaaggaaaagatgtggctctcctctgggatctccacgtttctctggttatacaccagaattatagggttcaatccggctacagtagtcattaactctgagcttccatacgggtctggcctcggttcatcagcagctttatgtgtagctctcacagctgctctccttgcttcttctatttcagagaaaacccgtggtaacggttggtcatctctcgatgaaaccaatcttgagttgctaaataaatgggctttcgaaggcgaaaagatcatccatgggaaaccttctgggatagacaacaccgtcagtgcatacggcaacatgatcaagttctgctcaggcgagataactcggttacaatccaacatgcctctgagaatgctaattaccaacactagagttgggcgaaacacaaaagctctggtctctggtgtgtcacagagagcggtaagacatcctgatgcgatgaagtcagtgttcaacgccgtggattctataagcaaagagctcgctgcgatcattcagtctaaagacgagacctcagttacagaaaaagaagagagaataaaagaactcatggagatgaaccaaggtctgctcctgtcaatgggggttagccacagctcaatcgaggctgtgattctaaccacggtcaagcacaagcttgtctccaaacttacaggagctggtggcggcggctgcgtcctcactctattaccaaccgggacggtggtggacaaagtggtggaggagctcgagtccagcggttttcagtgtttcacggcattgattggtggtaacggagctcagatttgctattgatcaggtcggaaaaatcatatttggcctctcaccattcttaaacttgctgacgtgtacgtcaagaaggctgcaattagaaattcaaagagtcgattttttcttataaatgatgtgttgaatgtaaaattgctttattattataccatgtgacaaataattgaaaaaagctaaattactcac

SEQ ID NO: 98125 - protein, 378 aa, Arabidopsis thaliana; identical to SEQ ID NO: 25905
  peptide (1)..(378): Ceres Seq. ID no. 13579515
  misc_feature (1)..(378): Homolog of NCBI NO: 15240936 NR Description: mevalonate kinase [Arabidopsis thaliana] mevalonate kinase [Arabidopsis thaliana]
  misc_feature (1)..(378): Homolog of NCBI NO: 5578718 NR Description: mevalonate kinase [Arabidopsis thaliana]
  misc_feature (1)..(378): Homolog of NCBI NO: 16417946 NR Description: mevalonate kinase [Hevea brasiliensis]
  misc_feature (1)..(346): Homolog of NCBI NO: 37532842 NR Description: putative mevalonate kinase [Oryza sativa cultivar- group)] >gi|16905216|gb|AAL31086.1| putative mevalonate [Oryza sativa] >gi|31431195|gb|AAP53010.1| putative mevalonate
  misc_feature (7)..(376): Homolog of NCBI NO: 450346 NR Description: ORF for viral-cellular fusion transcript
  misc_feature (7)..(376): Homolog of NCBI NO: 4557769 NR Description: mevalonate kinase [Homo sapiens]
  misc_feature (7)..(376): Homolog of NCBI NO: 33303805 NR Description: mevalonate kinase [synthetic construct]
  misc_feature (7)..(373): Homolog of NCBI NO: 12963731 NR Description: mevalonate kinase [Mus musculus] Mevalonate kinase (MK) >gi|6006984|gb|AAF00700.1|AF137598_1 kinase [Mus musculus] >gi|13542811|gb|AAH05606.1| mevalonate
  misc_feature (7)..(376): Homolog of NCBI NO: 13592007 NR Description: mevalonate kinase [Rattus norvegicus]
  misc_feature (3)..(376): Homolog of NCBI NO: 28828936 NR Description: similar to Rattus norvegicus (Rat). Mevalonate

SEQ ID NO: 98126 - protein, 269 aa, Arabidopsis thaliana; identical to SEQ ID NO: 25906
  peptide (1)..(269): Ceres Seq. ID no. 13579516
  misc_feature (1)..(269): Homolog of NCBI NO: 15240936 NR Description: mevalonate kinase [Arabidopsis thaliana] mevalonate kinase [Arabidopsis thaliana]
  misc_feature (1)..(269): Homolog of NCBI NO: 5578718 NR Description: mevalonate kinase [Arabidopsis thaliana]
  misc_feature (1)..(269): Homolog of NCBI NO: 16417946 NR Description: mevalonate kinase [Hevea brasiliensis]
  misc_feature (1)..(237): Homolog of NCBI NO: 37532842 NR Description: putative mevalonate kinase [Oryza sativa cultivar- group)] >gi|16905216|gb|AAL31086.1| putative mevalonate [Oryza sativa] >gi|31431195|gb|AAP53010.1| putative mevalonate
  misc_feature (1)..(267): Homolog of NCBI NO: 450346 NR Description: ORF for viral-cellular fusion transcript
  misc_feature (1)..(267): Homolog of NCBI NO: 4557769 NR Description: mevalonate kinase [Homo sapiens]
  misc_feature (1)..(267): Homolog of NCBI NO: 33303805 NR Description: mevalonate kinase [synthetic construct]
  misc_feature (1)..(264): Homolog of NCBI NO: 12963731 NR Description: mevalonate kinase [Mus musculus] Mevalonate kinase (MK) >gi|6006984|gb|AAF00700.1|AF137598_1 kinase [Mus musculus] >gi|13542811|gb|AAH05606.1| mevalonate
  misc_feature (1)..(267): Homolog of NCBI NO: 13592007 NR Description: mevalonate kinase [Rattus norvegicus]
  misc_feature (1)..(267): Homolog of NCBI NO: 28828936 NR Description: similar to Rattus norvegicus (Rat). Mevalonate

SEQ ID NO: 98127 - DNA, 838 bp, Arabidopsis thaliana
  misc_feature (1)..(838): Ceres Seq. ID no. 13579881
  misc_feature: MA Experiment ID: 108573 Result: Up-regulated in Transcription
  misc_feature: MA Experiment 108573 PARAMETER Experiment Name: At_Drought_cDNA_P Parameter: Timepoint (hr) Value: 6
  misc_feature: MA Experiment 108573 PARAMETER Experiment Name: At_Drought_cDNA_P Parameter: Tissue Value: Aerial
  misc_feature: MA Experiment 108573 PARAMETER Experiment Name: At_Drought_cDNA_P Parameter: Treatment Value: Drought vs. No Drought
  misc_feature: MA Experiment ID: 20000224 Result: Down-regulated in Transcription
  misc_feature: Pfam Name: UQ_con Pfam Description: Ubiquitin-conjugating enzyme
attcattcatcacttatacgatctcttcccaaattattgattttttttacccatttctctcatcgcacggtgatattgagaatcgccgacctgaatcgatcggaaaactttctctgattaccggcggtcaacaccgctgaacacatatgtttgtttgacgacctcttctctccgcgatctttacctcaacaacgagatctgtttccacgaaagaaaggaggatgtcgacgccagcaaggaagaggttaatgagggatttcaagaggttgcagcaagacccacctgcgggtattagtggtgctccacaggacaacaacattatgctctggaatgctgtcatatttgggcctgatgacacaccatgggatggaggtactttcaaactctcactgcagttctctgaagattatcccaataaaccaccaacagttcggtttgtgtcacggatgtttcatcctaatatttatgcagatgggagtatctgcttggacattctacaaaaccagtggagtccaatctatgatgttgctgctatacttacctccatccagtccttgctctgtgaccctaatccgaattctcctgcaaactcggaagctgctcggatgtacagcgaaagcaagcgcgagtacaacaggagagtgcgtgatgttgttgagcaaagctggactgctgactagtagtagtttgttgtaagcgttgtagctctctctactttctctcaatcacgattcagcaacagctttcttctcttttcattcatgtcttgtgtttccaaaactatttaagtgattccatgctttgatgtaacccaacatccttaaaaaaacaactttgt

SEQ ID NO: 98128 - protein, 152 aa, Arabidopsis thaliana; identical to SEQ ID NO: 30521
  peptide (1)..(152): Ceres Seq. ID no. 13579882
  misc_feature: Pfam Name: UQ_con Pfam Description: Ubiquitin-conjugating enzyme
  misc_feature (1)..(152): Homolog of NCBI NO: 18394114 NR Description: ubiquitin-conjugating enzyme 1 (UBC1)
  misc_feature (1)..(152): Homolog of NCBI NO: 18395424 NR Description: ubiquitin-conjugating enzyme 2 (UBC2)
  misc_feature (1)..(152): Homolog of NCBI NO: 464980 NR Description: Ubiquitin-conjugating enzyme E2-17 kDa ligase) (Ubiquitin carrier protein) >gi|166422|gb|AAA18528.1|
  misc_feature (1)..(152): Homolog of NCBI NO: 8118527 NR Description: ubiquitin conjugating protein [Avicennia marina]
  misc_feature (1)..(152): Homolog of NCBI NO: 13516451 NR Description: ubiquitin-conjugating enzyme (E2) [Nicotiana
  misc_feature (1)..(152): Homolog of NCBI NO: 136640 NR Description: Ubiquitin-conjugating enzyme E2-17 kDa ligase) (Ubiquitin carrier protein) >gi|170785|gb|AAA34310.1|
  misc_feature (1)..(152): Homolog of NCBI NO: 13516453 NR Description: ubiquitin-conjugating enzyme (E2) [Nicotiana
  misc_feature (1)..(152): Homolog of NCBI NO: 33146810 NR Description: OsRad6 [Oryza sativa (japonica cultivar-group)]
  misc_feature (1)..(152): Homolog of NCBI NO: 18844990 NR Description: Rad6 [Oryza sativa (japonica cultivar-group)]
  misc_feature (1)..(149): Homolog of NCBI NO: 18424601 NR Description: ubiquitin-conjugating enzyme 3 (UBC3)

SEQ ID NO: 98129 - protein, 143 aa, Arabidopsis thaliana; identical to SEQ ID NO: 30522
  peptide (1)..(143): Ceres Seq. ID no. 13579883
  misc_feature: Pfam Name: UQ_con Pfam Description: Ubiquitin-conjugating enzyme
  misc_feature (1)..(143): Homolog of NCBI NO: 18394114 NR Description: ubiquitin-conjugating enzyme 1 (UBC1)
  misc_feature (1)..(143): Homolog of NCBI NO: 18395424 NR Description: ubiquitin-conjugating enzyme 2 (UBC2)
  misc_feature (1)..(143): Homolog of NCBI NO: 464980 NR Description: Ubiquitin-conjugating enzyme E2-17 kDa ligase) (Ubiquitin carrier protein) >gi|166422|gb|AAA18528.1|
  misc_feature (1)..(143): Homolog of NCBI NO: 8118527 NR Description: ubiquitin conjugating protein [Avicennia marina]
  misc_feature (1)..(143): Homolog of NCBI NO: 13516451 NR Description: ubiquitin-conjugating enzyme (E2) [Nicotiana
  misc_feature (1)..(143): Homolog of NCBI NO: 136640 NR Description: Ubiquitin-conjugating enzyme E2-17 kDa ligase) (Ubiquitin carrier protein) >gi|170785|gb|AAA34310.1|
  misc_feature (1)..(143): Homolog of NCBI NO: 13516453 NR Description: ubiquitin-conjugating enzyme (E2) [Nicotiana
  misc_feature (1)..(143): Homolog of NCBI NO: 33146810 NR Description: OsRad6 [Oryza sativa (japonica cultivar-group)]
  misc_feature (1)..(143): Homolog of NCBI NO: 18844990 NR Description: Rad6 [Oryza sativa (japonica cultivar-group)]
  misc_feature (1)..(140): Homolog of NCBI NO: 18424601 NR Description: ubiquitin-conjugating enzyme 3 (UBC3)

SEQ ID NO: 98130 - protein, 121 aa, Arabidopsis thaliana; identical to SEQ ID NO: 30523
  peptide (1)..(121): Ceres Seq. ID no. 13579884
  misc_feature: Pfam Name: UQ_con Pfam Description: Ubiquitin-conjugating enzyme

SEQ ID NO: 98131 - DNA, 1208 bp, Arabidopsis thaliana
  misc_feature (1)..(1208): Ceres Seq. ID no. 13580667
  misc_feature: MA Experiment ID: 20000184 Result: Down-regulated in Transcription
  misc_feature: MA Experiment 20000184 PARAMETER Experiment Name: At_Shoots__P Parameter: Age (day) Value: 7
  misc_feature: MA Experiment 20000184 PARAMETER Experiment Name: At_Shoots__P Parameter: Tissue Value: Shoots vs. Whole Plant
atggcagattccacgattaagctaacagtcaaattcggaggcaaatcaataccactttcggtatcaccagattgtacagtcaaagatcttaagtctcagttacaaccaatcaccaacgttcttcctcgtggccagaagctcatcttcaaaggtaaggttttggttgaaacgtcgactttgaaacaatctgatgtgggaagtggagctaaactcatgttaatggcttctcaaggtctgcatcaaggggaaggtccaatacttaaggaagctagtataaggccaatctctagaactgttgtatctgataaagtagatcagagaaagcctagtgtacttgtagacaagaaccgcactgatcgatggaaagccacaggagttattgctttagctcaagccaatttgaaggaaatacctgaagaagtgtgggactgtggatctggagtcagagtacttgacattagtgaaaacttcattaaagaagtacctgccaaaatcagctcctttggttctatgcagaaattgttccttcaaggaaatggtctgtccgatgaatccattcaatgggaagggatagcatctctgaagcgcctgatgcttctgtccattagccataacaatctaactgttctgccatcagcaatgggttcactgacgtctcttagacagcttgatgtcaccaacaacaagttgacaagtctaccgaatgagttaggacttctgacgcagcttgagattttgaaagccaacaacaacagaataactagtcttcctgagagtatcggaaactgttcattcctcatggaggttgatctttcagctaatattatatcagaacttcccgagacattcaccaaactgcgtaatctaaagacgctggagctgaataacacgggattgaagacgctgccatcggctttatttaagatgtgtttgcagctctcaactttaggtctccacaacacagagataaccgttgaatttctccgccagttcgagggatatgatgattttgatgaaagaagacgtaccaagcatcaaaagcagcttgattttcgtgttgtgggatctggccaattcgacgaaggcgctgataaatcttggtgatcaagccaagtcgagtctcgaatcgtcagtactcttaatatatttgtggcactttcagtgaaaaaatctttctccttcatgcctatatattgtttgcttactcc

SEQ ID NO: 98132 - protein, 367 aa, Arabidopsis thaliana
  peptide (1)..(367): Ceres Seq. ID no. 13580668
  misc_feature (6)..(78): Pfam Name: Ubiquitin family Pfam Description: Ubiquitin family
  misc_feature (1)..(367): Homolog of NCBI NO: 30684470 NR Description: unknown protein, leucine-rich repeat -related
  misc_feature (1)..(367): Homolog of NCBI NO: 7445541 NR Description: hypothetical protein At2g30100 [imported] -
  misc_feature (5)..(367): Homolog of NCBI NO: 37534990 NR Description: putative leucine-rich repeat protein [Oryza
  misc_feature (116)..(365): Homolog of NCBI NO: 22326653 NR Description: leucine rich repeat protein family [Arabidopsis >gi|20260338|gb|AAM13067.1| unknown protein [Arabidopsis >gi|22136192|gb|AAM91174.1| unknown protein [Arabidopsis
  misc_feature (116)..(363): Homolog of NCBI NO: 11357392 NR Description: hypothetical protein F13G24.110 - Arabidopsis >gi|6562305|emb|CAB62603.1| putative protein [Arabidopsis >gi|10176725|dbj|BAB09955.1| gene_id:MXM12.15~unknown protein
  misc_feature (129)..(324): Homolog of NCBI NO: 24216022 NR Description: Leucine-rich repeat containing protein interrogans serovar lai str. 56601]
  misc_feature (133)..(339): Homolog of NCBI NO: 19074817 NR Description: LEUCINE-RICH RAS SUPPRESSOR PROTEIN
  misc_feature (126)..(324): Homolog of NCBI NO: 23128321 NR Description: hypothetical protein [Nostoc punctiforme]
  misc_feature (147)..(333): Homolog of NCBI NO: 23124578 NR Description: hypothetical protein [Nostoc punctiforme]
  misc_feature (148)..(324): Homolog of NCBI NO: 24215148 NR Description: putative outermembrane protein [Leptospira serovar lai str. 56601] >gi|24196218|gb|AAN49647.1|AE011413_1 outermembrane protein [Leptospira interrogans serovar lai str.
MADSTIKLTVKFGGKSIPLSVSPDCTVKDLKSQLQPITNVLPRGQKLIFKGKVLVETSTLKQSDVGSGAKLMLMASQGLHQGEGPILKEASIRPISRTVVSDKVDQRKPSVLVDKNRTDRWKATGVIALAQANLKEIPEEVWDCGSGVRVLDISENFIKEVPAKISSFGSMQKLFLQGNGLSDESIQWEGIASLKRLMLLSISHNNLTVLPSAMGSLTSLRQLDVTNNKLTSLPNELGLLTQLEILKANNNRITSLPESIGNCSFLMEVDLSANIISELPETFTKLRNLKTLELNNTGLKTLPSALFKMCLQLSTLGLHNTEITVEFLRQFEGYDDFDERRRTKHQKQLDFRVVGSGQFDEGADKSW

SEQ ID NO: 98133 - protein, 296 aa, Arabidopsis thaliana
  peptide (1)..(296): Ceres Seq. ID no. 13580669
  misc_feature (99)..(124): Pfam Name: Leucine Rich Repeat Pfam Description: Leucine Rich Repeat
  misc_feature (1)..(296): Homolog of NCBI NO: 30684470 NR Description: unknown protein, leucine-rich repeat -related
  misc_feature (1)..(296): Homolog of NCBI NO: 7445541 NR Description: hypothetical protein At2g30100 [imported] -
  misc_feature (1)..(296): Homolog of NCBI NO: 37534990 NR Description: putative leucine-rich repeat protein [Oryza
  misc_feature (45)..(294): Homolog of NCBI NO: 22326653 NR Description: leucine rich repeat protein family [Arabidopsis >gi|20260338|gb|AAM13067.1| unknown protein [Arabidopsis >gi|22136192|gb|AAM91174.1| unknown protein [Arabidopsis
  misc_feature (45)..(292): Homolog of NCBI NO: 11357392 NR Description: hypothetical protein F13G24.110 - Arabidopsis >gi|6562305|emb|CAB62603.1| putative protein [Arabidopsis >gi|10176725|dbj|BAB09955.1| gene_id:MXM12.15~unknown protein
  misc_feature (58)..(253): Homolog of NCBI NO: 24216022 NR Description: Leucine-rich repeat containing protein interrogans serovar lai str. 56601]
  misc_feature (62)..(268): Homolog of NCBI NO: 19074817 NR Description: LEUCINE-RICH RAS SUPPRESSOR PROTEIN
  misc_feature (55)..(253): Homolog of NCBI NO: 23128321 NR Description: hypothetical protein [Nostoc punctiforme]
  misc_feature (76)..(262): Homolog of NCBI NO: 23124578 NR Description: hypothetical protein [Nostoc punctiforme]
  misc_feature (77)..(253): Homolog of NCBI NO: 24215148 NR Description: putative outermembrane protein [Leptospira serovar lai str. 56601] >gi|24196218|gb|AAN49647.1|AE011413_1 outermembrane protein [Leptospira interrogans serovar lai str.
MLMASQGLHQGEGPILKEASIRPISRTVVSDKVDQRKPSVLVDKNRTDRWKATGVIALAQANLKEIPEEVWDCGSGVRVLDISENFIKEVPAKISSFGSMQKLFLQGNGLSDESIQWEGIASLKRLMLLSISHNNLTVLPSAMGSLTSLRQLDVTNNKLTSLPNELGLLTQLEILKANNNRITSLPESIGNCSFLMEVDLSANIISELPETFTKLRNLKTLELNNTGLKTLPSALFKMCLQLSTLGLHNTEITVEFLRQFEGYDDFDERRRTKHQKQLDFRVVGSGQFDEGADKSW

SEQ ID NO: 98134 - protein, 294 aa, Arabidopsis thaliana
  peptide (1)..(294): Ceres Seq. ID no. 13580670
  misc_feature (97)..(122): Pfam Name: Leucine Rich Repeat Pfam Description: Leucine Rich Repeat
  misc_feature (1)..(294): Homolog of NCBI NO: 30684470 NR Description: unknown protein, leucine-rich repeat -related
  misc_feature (1)..(294): Homolog of NCBI NO: 7445541 NR Description: hypothetical protein At2g30100 [imported] -
  misc_feature (1)..(294): Homolog of NCBI NO: 37534990 NR Description: putative leucine-rich repeat protein [Oryza
  misc_feature (43)..(292): Homolog of NCBI NO: 22326653 NR Description: leucine rich repeat protein family [Arabidopsis >gi|20260338|gb|AAM13067.1| unknown protein [Arabidopsis >gi|22136192|gb|AAM91174.1| unknown protein [Arabidopsis
  misc_feature (43)..(290): Homolog of NCBI NO: 11357392 NR Description: hypothetical protein F13G24.110 - Arabidopsis >gi|6562305|emb|CAB62603.1| putative protein [Arabidopsis >gi|10176725|dbj|BAB09955.1| gene_id:MXM12.15~unknown protein
  misc_feature (56)..(251): Homolog of NCBI NO: 24216022 NR Description: Leucine-rich repeat containing protein interrogans serovar lai str. 56601]
  misc_feature (60)..(266): Homolog of NCBI NO: 19074817 NR Description: LEUCINE-RICH RAS SUPPRESSOR PROTEIN
  misc_feature (53)..(251): Homolog of NCBI NO: 23128321 NR Description: hypothetical protein [Nostoc punctiforme]
  misc_feature (74)..(260): Homolog of NCBI NO: 23124578 NR Description: hypothetical protein [Nostoc punctiforme]
  misc_feature (75)..(251): Homolog of NCBI NO: 24215148 NR Description: putative outermembrane protein [Leptospira serovar lai str. 56601] >gi|24196218|gb|AAN49647.1|AE011413_1 outermembrane protein [Leptospira interrogans serovar lai str.
MASQGLHQGEGPILKEASIRPISRTVVSDKVDQRKPSVLVDKNRTDRWKATGVIALAQANLKEIPEEVWDCGSGVRVLDISENFIKEVPAKISSFGSMQKLFLQGNGLSDESIQWEGIASLKRLMLLSISHNNLTVLPSAMGSLTSLRQLDVTNNKLTSLPNELGLLTQLEILKANNNRITSLPESIGNCSFLMEVDLSANIISELPETFTKLRNLKTLELNNTGLKTLPSALFKMCLQLSTLGLHNTEITVEFLRQFEGYDDFDERRRTKHQKQLDFRVVGSGQFDEGADKSW

SEQ ID NO: 98135 - DNA, 1313 bp, Arabidopsis thaliana
  misc_feature (1)..(1313): Ceres Seq. ID no. 13580671
  misc_feature: MA Experiment ID: 20000179 Result: Up-regulated in Transcription
  misc_feature: MA Experiment 20000179 PARAMETER Experiment Name: At_Germinating_Seeds_P Parameter: Age (hr) Value: 6 vs. 0
  misc_feature: MA Experiment 20000179 PARAMETER Experiment Name: At_Germinating_Seeds_P Parameter: Tissue Value: Germinating Seeds
  misc_feature: MA Experiment ID: 20000180 Result: Up-regulated in Transcription
  misc_feature: MA Experiment 20000180 PARAMETER Experiment Name: At_Germinating_Seeds_P Parameter: Age (hr) Value: 24 vs. 0
  misc_feature: MA Experiment 20000180 PARAMETER Experiment Name: At_Germinating_Seeds_P Parameter: Tissue Value: Germinating Seeds
  misc_feature: MA Experiment ID: 20000184 Result: Up-regulated in Transcription
  misc_feature: MA Experiment 20000184 PARAMETER Experiment Name: At_Shoots__P Parameter: Age (day) Value: 7
  misc_feature: MA Experiment 20000184 PARAMETER Experiment Name: At_Shoots__P Parameter: Tissue Value: Shoots vs. Whole Plant
  misc_feature: MA Experiment ID: 20000264 Result: Down-regulated in Transcription
  misc_feature: MA Experiment 20000264 PARAMETER Experiment Name: At_Open_Flower_P Parameter: Age (day) Value: 21
  misc_feature: MA Experiment 20000264 PARAMETER Experiment Name: At_Open_Flower_P Parameter: Plant Line Value: WS
  misc_feature: MA Experiment 20000264 PARAMETER Experiment Name: At_Open_Flower_P Parameter: Tissue Value: Open Flower vs. Whole Plant
  misc_feature: MA Experiment ID: 20000265 Result: Down-regulated in Transcription
  misc_feature: MA Experiment 20000265 PARAMETER Experiment Name: At_Open_Flower_P Parameter: Age (day) Value: 21
  misc_feature: MA Experiment 20000265 PARAMETER Experiment Name: At_Open_Flower_P Parameter: Plant Line Value: WS
  misc_feature: MA Experiment 20000265 PARAMETER Experiment Name: At_Open_Flower_P Parameter: Tissue Value: Closed Flower vs. Whole Plant
  misc_feature: MA Experiment ID: 20000286 Result: Down-regulated in Transcription
  misc_feature: MA Experiment 20000286 PARAMETER Experiment Name: At_Open_Flower_P Parameter: Age (day) Value: 21
  misc_feature: MA Experiment 20000286 PARAMETER Experiment Name: At_Open_Flower_P Parameter: Plant Line Value: WS
  misc_feature: MA Experiment 20000286 PARAMETER Experiment Name: At_Open_Flower_P Parameter: Tissue Value: Half Open vs. Whole Plant
  misc_feature: MA Experiment ID: 20000437 Result: Down-regulated in Transcription
  misc_feature: MA Experiment 20000437 PARAMETER Experiment Name: At_Drought_P Parameter: Age (day) Value: 8
  misc_feature: MA Experiment 20000437 PARAMETER Experiment Name: At_Drought_P Parameter: Organism Value: A. thaliana
  misc_feature: MA Experiment 20000437 PARAMETER Experiment Name: At_Drought_P Parameter: Plant Line Value: WS
  misc_feature: MA Experiment 20000437 PARAMETER Experiment Name: At_Drought_P Parameter: Timepoint (hr) Value: 24
  misc_feature: MA Experiment 20000437 PARAMETER Experiment Name: At_Drought_P Parameter: Tissue Value: Whole Plant
  misc_feature: MA Experiment 20000437 PARAMETER Experiment Name: At_Drought_P Parameter: Treatment Value: Drought vs. No Drought
  misc_feature: MA Experiment ID: 20000794 Result: Down-regulated in Transcription
  misc_feature: MA Experiment 20000794 PARAMETER Experiment Name: At_Petals_P Parameter: Age (day) Value: 23-25 days
  misc_feature: MA Experiment 20000794 PARAMETER Experiment Name: At_Petals_P Parameter: Plant Line Value: WS
  misc_feature: MA Experiment 20000794 PARAMETER Experiment Name: At_Petals_P Parameter: Tissue Value: Petals vs. Whole plant
  misc_feature: MA Experiment ID: 20001555 Result: Down-regulated in Transcription
  misc_feature: MA Experiment 20001555 PARAMETER Experiment Name: At_Drought_Soil_Dry_P Parameter: Age (day) Value: 24
  misc_feature: MA Experiment 20001555 PARAMETER Experiment Name: At_Drought_Soil_Dry_P Parameter: Organism Value: A. thaliana
  misc_feature: MA Experiment 20001555 PARAMETER Experiment Name: At_Drought_Soil_Dry_P Parameter: Plant Line Value: WS
  misc_feature: MA Experiment 20001555 PARAMETER Experiment Name: At_Drought_Soil_Dry_P Parameter: Post Timepoint (hr) Value: None
  misc_feature: MA Experiment 20001555 PARAMETER Experiment Name: At_Drought_Soil_Dry_P Parameter: Post-Treatment Value: None
  misc_feature: MA Experiment 20001555 PARAMETER Experiment Name: At_Drought_Soil_Dry_P Parameter: Timepoint (day) Value: 10
  misc_feature: MA Experiment 20001555 PARAMETER Experiment Name: At_Drought_Soil_Dry_P Parameter: Treatment Value: Drought vs. No Drought
  misc_feature: MA Experiment ID: 20001556 Result: Down-regulated in Transcription
  misc_feature: MA Experiment 20001556 PARAMETER Experiment Name: At_Drought_Soil_Dry_P Parameter: Age (day) Value: 26
  misc_feature: MA Experiment 20001556 PARAMETER Experiment Name: At_Drought_Soil_Dry_P Parameter: Organism Value: A. thaliana
  misc_feature: MA Experiment 20001556 PARAMETER Experiment Name: At_Drought_Soil_Dry_P Parameter: Plant Line Value: WS
  misc_feature: MA Experiment 20001556 PARAMETER Experiment Name: At_Drought_Soil_Dry_P Parameter: Post Timepoint (hr) Value: None
  misc_feature: MA Experiment 20001556 PARAMETER Experiment Name: At_Drought_Soil_Dry_P Parameter: Post-Treatment Value: None
  misc_feature: MA Experiment 20001556 PARAMETER Experiment Name: At_Drought_Soil_Dry_P Parameter: Timepoint (day) Value: 12
  misc_feature: MA Experiment 20001556 PARAMETER Experiment Name: At_Drought_Soil_Dry_P Parameter: Treatment Value: Drought vs. No Drought
  misc_feature: MA Experiment ID: 20001559 Result: Down-regulated in Transcription
  misc_feature: MA Experiment 20001559 PARAMETER Experiment Name: At_Drought_Soil_Dry_P Parameter: Age (day) Value: 28
  misc_feature: MA Experiment 20001559 PARAMETER Experiment Name: At_Drought_Soil_Dry_P Parameter: Organism Value: A. thaliana
  misc_feature: MA Experiment 20001559 PARAMETER Experiment Name: At_Drought_Soil_Dry_P Parameter: Plant Line Value: WS
  misc_feature: MA Experiment 20001559 PARAMETER Experiment Name: At_Drought_Soil_Dry_P Parameter: Post Timepoint (hr) Value: 29
  misc_feature: MA Experiment 20001559 PARAMETER Experiment Name: At_Drought_Soil_Dry_P Parameter: Post-Treatment Value: Re-Water vs. No Drought
  misc_feature: MA Experiment 20001559 PARAMETER Experiment Name: At_Drought_Soil_Dry_P Parameter: Timepoint (day) Value: 14
  misc_feature: MA Experiment 20001559 PARAMETER Experiment Name: At_Drought_Soil_Dry_P Parameter: Treatment Value: Drought vs. No Drought
  misc_feature: MA Experiment ID: 20001904 Result: Down-regulated in Transcription
  misc_feature: MA Experiment 20001904 PARAMETER Experiment Name: At_Drought_Reproduction_P Parameter: Age (day) Value: 37
  misc_feature: MA Experiment 20001904 PARAMETER Experiment Name: At_Drought_Reproduction_P Parameter: Organism Value: A. thaliana
  misc_feature: MA Experiment 20001904 PARAMETER Experiment Name: At_Drought_Reproduction_P Parameter: Plant Line Value: WS
  misc_feature: MA Experiment 20001904 PARAMETER Experiment Name: At_Drought_Reproduction_P Parameter: Timepoint (day) Value: 7
  misc_feature: MA Experiment 20001904 PARAMETER Experiment Name: At_Drought_Reproduction_P Parameter: Tissue Value: Rosettes
  misc_feature: MA Experiment 20001904 PARAMETER Experiment Name: At_Drought_Reproduction_P Parameter: Treatment Value: Drought vs. No Drought
  misc_feature: MA Experiment ID: 20001905 Result: Down-regulated in Transcription
  misc_feature: MA Experiment 20001905 PARAMETER Experiment Name: At_Drought_Reproduction_P Parameter: Age (day) Value: 40
  misc_feature: MA Experiment 20001905 PARAMETER Experiment Name: At_Drought_Reproduction_P Parameter: Organism Value: A. thaliana
  misc_feature: MA Experiment 20001905 PARAMETER Experiment Name: At_Drought_Reproduction_P Parameter: Plant Line Value: WS
  misc_feature: MA Experiment 20001905 PARAMETER Experiment Name: At_Drought_Reproduction_P Parameter: Timepoint (day) Value: 10
  misc_feature: MA Experiment 20001905 PARAMETER Experiment Name: At_Drought_Reproduction_P Parameter: Tissue Value: Rosettes
  misc_feature: MA Experiment 20001905 PARAMETER Experiment Name: At_Drought_Reproduction_P Parameter: Treatment Value: Drought vs. No Drought
  misc_feature: MA Experiment ID: 20001911 Result: Down-regulated in Transcription
  misc_feature: MA Experiment 20001911 PARAMETER Experiment Name: At_Drought_Reproduction_P Parameter: Age (day) Value: 40
  misc_feature: MA Experiment 20001911 PARAMETER Experiment Name: At_Drought_Reproduction_P Parameter: Organism Value: A. thaliana
  misc_feature: MA Experiment 20001911 PARAMETER Experiment Name: At_Drought_Reproduction_P Parameter: Plant Line Value: WS
  misc_feature: MA Experiment 20001911 PARAMETER Experiment Name: At_Drought_Reproduction_P Parameter: Timepoint (day) Value: 10
  misc_feature: MA Experiment 20001911 PARAMETER Experiment Name: At_Drought_Reproduction_P Parameter: Tissue Value: Flowers
  misc_feature: MA Experiment 20001911 PARAMETER Experiment Name: At_Drought_Reproduction_P Parameter: Treatment Value: Drought vs. No Drought
agacaaaacaaacaaacaaaacttcagtctctgcaaagctccatcctttgtggttgtgtcgtagatagccattcgagtggttaaaagttaaaaacttttatgtccacttgaatccttttttgtttctttttggattttatctgatcactcgttttgtgtctctgaatctctatcccgtggattcgcatctggatttgtttttttttcatttttattcgagcggctaacctttctcggatccatctgatatcgattggattctctctaatcaatcgttgaaatggcggatgcgtggaaggatttagcttcagggactgttggaggagctgctcaactagttgttggtcatccatttgacactatcaaggtcaaacttcagagccaaccgactccagcaccaggccaacttccaaggtacaccggtgcaatcgatgcggttaaacagaccgttgcttctgaaggaaccaaaggtttgtataaaggtatgggagctccacttgcaaccgttgctgccttcaatgcggttttgttcactgtgagaggtcaaatggaagggctgcttaggtctgaagctggagttcctttgaccattagtcaacagtttgtggccggtgcaggcgctggtttcgctgtttcgttccttgcttgtcctaccgagttgatcaagtgcaggttgcaagcacaaggtgcattagctggtgcctctactacaagctcagtggttgcagccgtgaaatacggtggaccaatggatgtagcccgtcatgtcctacgatcagaaggaggagcacgaggtctattcaaaggtttattccctacattcgcccgtgaagtcccgggaaatgcaacaatgtttgcagcctacgaagctttcaagcggtttttagccggtggttcagacacttcaagcttaggacaagggtcattgatcatggcgggtggagtcgctggtgcttctttttggggaatagtatatccgacagatgttgtgaagagtgttcttcaagtcgacgattacaaaaacccgagatacacggggtcgatggatgcttttcggaagattctgaaatctgaaggagttaaaggtttgtataaaggatttggtccagctatggctaggagtgttcctgctaatgctgcttgcttcttggcttatgagatgacaaggtcaagcttgggataaaccggttcggtttgggtttaactgttggttcgatttctgaatgttccattgcgattaacctctctgtttttagatttgattcttaaaaaatttctgcaaaatttatgtaccatttacacagtttatttca

SEQ ID NO: 98136 - protein, 300 aa, Arabidopsis thaliana
  peptide (1)..(300): Ceres Seq. ID no. 13580672
  misc_feature (1)..(300): Homolog of NCBI NO: 18422718 NR Description: mitochondrial carrier protein family [Arabidopsis
  misc_feature (1)..(300): Homolog of NCBI NO: 9758516 NR Description: carnitine/acylcarnitine translocase-like protein
  misc_feature (1)..(300): Homolog of NCBI NO: 37537070 NR Description: putative carnitine/acylcarnitine translocase
  misc_feature (1)..(300): Homolog of NCBI NO: 37537072 NR Description: putative carnitine/acylcarnitine translocase
  misc_feature (1)..(295): Homolog of NCBI NO: 17539560 NR Description: Embryonic tissue differentiation factor DIF-1,
  misc_feature (1)..(295): Homolog of NCBI NO: 39593620 NR Description: Hypothetical protein CBG05908 [Caenorhabditis
  misc_feature (6)..(299): Homolog of NCBI NO: 38541954 NR Description: Unknown (protein for MGC:77760) [Danio rerio]
  misc_feature (6)..(299): Homolog of NCBI NO: 27694786 NR Description: Similar to solute carrier family 25
  misc_feature (6)..(299): Homolog of NCBI NO: 38566282 NR Description: Carnitine/acylcarnitine translocase [Silurana
  misc_feature (1)..(295): Homolog of NCBI NO: 7511491 NR Description: mitochondrial carrier protein DIF-1 homolog -
MADAWKDLASGTVGGAAQLVVGHPFDTIKVKLQSQPTPAPGQLPRYTGAIDAVKQTVASEGTKGLYKGMGAPLATVAAFNAVLFTVRGQMEGLLRSEAGVPLTISQQFVAGAGAGFAVSFLACPTELIKCRLQAQGALAGASTTSSVVAAVKYGGPMDVARHVLRSEGGARGLFKGLFPTFAREVPGNATMFAAYEAFKRFLAGGSDTSSLGQGSLIMAGGVAGASFWGIVYPTDVVKSVLQVDDYKNPRYTGSMDAFRKILKSEGVKGLYKGFGPAMARSVPANAACFLAYEMTRSSLG

SEQ ID NO: 98137 - protein, 232 aa, Arabidopsis thaliana
  peptide (1)..(232): Ceres Seq. ID no. 13580673
  misc_feature (1)..(232): Homolog of NCBI NO: 18422718 NR Description: mitochondrial carrier protein family [Arabidopsis
  misc_feature (1)..(232): Homolog of NCBI NO: 9758516 NR Description: carnitine/acylcarnitine translocase-like protein
  misc_feature (1)..(232): Homolog of NCBI NO: 37537070 NR Description: putative carnitine/acylcarnitine translocase
  misc_feature (1)..(232): Homolog of NCBI NO: 37537072 NR Description: putative carnitine/acylcarnitine translocase
  misc_feature (1)..(227): Homolog of NCBI NO: 17539560 NR Description: Embryonic tissue differentiation factor DIF-1,
  misc_feature (1)..(227): Homolog of NCBI NO: 39593620 NR Description: Hypothetical protein CBG05908 [Caenorhabditis
  misc_feature (1)..(231): Homolog of NCBI NO: 38541954 NR Description: Unknown (protein for MGC:77760) [Danio rerio]
  misc_feature (1)..(231): Homolog of NCBI NO: 27694786 NR Description: Similar to solute carrier family 25
  misc_feature (1)..(231): Homolog of NCBI NO: 38566282 NR Description: Carnitine/acylcarnitine translocase [Silurana
  misc_feature (1)..(227): Homolog of NCBI NO: 7511491 NR Description: mitochondrial carrier protein DIF-1 homolog -
MGAPLATVAAFNAVLFTVRGQMEGLLRSEAGVPLTISQQFVAGAGAGFAVSFLACPTELIKCRLQAQGALAGASTTSSVVAAVKYGGPMDVARHVLRSEGGARGLFKGLFPTFAREVPGNATMFAAYEAFKRFLAGGSDTSSLGQGSLIMAGGVAGASFWGIVYPTDVVKSVLQVDDYKNPRYTGSMDAFRKILKSEGVKGLYKGFGPAMARSVPANAACFLAYEMTRSSLG

SEQ ID NO: 98138 - protein, 211 aa, Arabidopsis thaliana
  peptide (1)..(211): Ceres Seq. ID no. 13580674
  misc_feature (1)..(211): Homolog of NCBI NO: 18422718 NR Description: mitochondrial carrier protein family [Arabidopsis
  misc_feature (1)..(211): Homolog of NCBI NO: 9758516 NR Description: carnitine/acylcarnitine translocase-like protein
  misc_feature (1)..(211): Homolog of NCBI NO: 37537070 NR Description: putative carnitine/acylcarnitine translocase
  misc_feature (1)..(211): Homolog of NCBI NO: 37537072 NR Description: putative carnitine/acylcarnitine translocase
  misc_feature (1)..(206): Homolog of NCBI NO: 17539560 NR Description: Embryonic tissue differentiation factor DIF-1,
  misc_feature (1)..(206): Homolog of NCBI NO: 39593620 NR Description: Hypothetical protein CBG05908 [Caenorhabditis
  misc_feature (1)..(210): Homolog of NCBI NO: 38541954 NR Description: Unknown (protein for MGC:77760) [Danio rerio]
  misc_feature (1)..(210): Homolog of NCBI NO: 27694786 NR Description: Similar to solute carrier family 25
  misc_feature (1)..(210): Homolog of NCBI NO: 38566282 NR Description: Carnitine/acylcarnitine translocase [Silurana
  misc_feature (1)..(206): Homolog of NCBI NO: 7511491 NR Description: mitochondrial carrier protein DIF-1 homolog -
MEGLLRSEAGVPLTISQQFVAGAGAGFAVSFLACPTELIKCRLQAQGALAGASTTSSVVAAVKYGGPMDVARHVLRSEGGARGLFKGLFPTFAREVPGNATMFAAYEAFKRFLAGGSDTSSLGQGSLIMAGGVAGASFWGIVYPTDVVKSVLQVDDYKNPRYTGSMDAFRKILKSEGVKGLYKGFGPAMARSVPANAACFLAYEMTRSSLG

SEQ ID NO: 98139 - DNA, 1198 bp, Arabidopsis thaliana
  misc_feature (1)..(1198): Ceres Seq. ID no. 13580678
  misc_feature: MA Experiment ID: 108434 Result: Down-regulated in Transcription
  misc_feature: MA Experiment 108434 PARAMETER Experiment Name: At_Root_Tips_cDNA_P Parameter: Tissue Value: Root Tips
  misc_feature: MA Experiment ID: 108461 Result: Up-regulated in Transcription
  misc_feature: MA Experiment 108461 PARAMETER Experiment Name: At_Germinating_Seeds_cDNA_P Parameter: Age (day) Value: 1 vs. 0
  misc_feature: MA Experiment 108461 PARAMETER Experiment Name: At_Germinating_Seeds_cDNA_P Parameter: Tissue Value: Germinating Seeds
  misc_feature: MA Experiment ID: 108462 Result: Up-regulated in Transcription
  misc_feature: MA Experiment 108462 PARAMETER Experiment Name: At_Germinating_Seeds_cDNA_P Parameter: Age (day) Value: 2 vs. 0
  misc_feature: MA Experiment 108462 PARAMETER Experiment Name: At_Germinating_Seeds_cDNA_P Parameter: Tissue Value: Germinating Seeds
  misc_feature: MA Experiment ID: 108463 Result: Up-regulated in Transcription
  misc_feature: MA Experiment 108463 PARAMETER Experiment Name: At_Germinating_Seeds_cDNA_P Parameter: Age (day) Value: 3 vs. 0
  misc_feature: MA Experiment 108463 PARAMETER Experiment Name: At_Germinating_Seeds_cDNA_P Parameter: Tissue Value: Germinating Seeds
  misc_feature: MA Experiment ID: 108577 Result: Down-regulated in Transcription
  misc_feature: MA Experiment 108577 PARAMETER Experiment Name: At_42deg_Heat_cDNA_P Parameter: Temperature (deg C) Value: 42 vs. 22
  misc_feature: MA Experiment 108577 PARAMETER Experiment Name: At_42deg_Heat_cDNA_P Parameter: Timepoint (hr) Value: 6
  misc_feature: MA Experiment 108577 PARAMETER Experiment Name: At_42deg_Heat_cDNA_P Parameter: Tissue Value: Aerial
  misc_feature: MA Experiment ID: 108668 Result: Down-regulated in Transcription
  misc_feature: MA Experiment 108668 PARAMETER Experiment Name: At_2mM_SA_cDNA_P Parameter: Plant Line Value: WS
  misc_feature: MA Experiment 108668 PARAMETER Experiment Name: At_2mM_SA_cDNA_P Parameter: Timepoint (hr) Value: 6
  misc_feature: MA Experiment 108668 PARAMETER Experiment Name: At_2mM_SA_cDNA_P Parameter: Treatment Value: 2mM SA vs. No Treatment
  misc_feature: MA Experiment ID: 20000069 Result: Down-regulated in Transcription
  misc_feature: MA Experiment 20000069 PARAMETER Experiment Name: At_100uM_ABA_Mutants_cDNA_P Parameter: Plant Line Value: CS23
  misc_feature: MA Experiment 20000069 PARAMETER Experiment Name: At_100uM_ABA_Mutants_cDNA_P Parameter: Timepoint (hr) Value: 6
  misc_feature: MA Experiment 20000069 PARAMETER Experiment Name: At_100uM_ABA_Mutants_cDNA_P Parameter: Tissue Value: Aerial
  misc_feature: MA Experiment 20000069 PARAMETER Experiment Name: At_100uM_ABA_Mutants_cDNA_P Parameter: Treatment Value: 100uM ABA vs. No Treatment
  misc_feature: MA Experiment ID: 20000089 Result: Down-regulated in Transcription
  misc_feature: MA Experiment ID: 20000090 Result: Down-regulated in Transcription
  misc_feature: MA Experiment ID: 20000179 Result: Up-regulated in Transcription
  misc_feature: MA Experiment 20000179 PARAMETER Experiment Name: At_Germinating_Seeds_P Parameter: Age (hr) Value: 6 vs. 0
  misc_feature: MA Experiment 20000179 PARAMETER Experiment Name: At_Germinating_Seeds_P Parameter: Tissue Value: Germinating Seeds
  misc_feature: MA Experiment ID: 20000180 Result: Up-regulated in Transcription
  misc_feature: MA Experiment 20000180 PARAMETER Experiment Name: At_Germinating_Seeds_P Parameter: Age (hr) Value: 24 vs. 0
  misc_feature: MA Experiment 20000180 PARAMETER Experiment Name: At_Germinating_Seeds_P Parameter: Tissue Value: Germinating Seeds
  misc_feature: MA Experiment ID: 20000182 Result: Down-regulated in Transcription
  misc_feature: MA Experiment 20000182 PARAMETER Experiment Name: At_2mM_SA_P Parameter: Age (day) Value: 14
  misc_feature: MA Experiment 20000182 PARAMETER Experiment Name: At_2mM_SA_P Parameter: Organism Value: A. thaliana
  misc_feature: MA Experiment 20000182 PARAMETER Experiment Name: At_2mM_SA_P Parameter: Plant Line Value: WS
  misc_feature: MA Experiment 20000182 PARAMETER Experiment Name: At_2mM_SA_P Parameter: Timepoint (hr) Value: 6
  misc_feature: MA Experiment 20000182 PARAMETER Experiment Name: At_2mM_SA_P Parameter: Tissue Value: Aerial
  misc_feature: MA Experiment 20000182 PARAMETER Experiment Name: At_2mM_SA_P Parameter: Treatment Value: 2mM SA vs. No Treatment
  misc_feature: MA Experiment ID: 20000439 Result: Up-regulated in Transcription
  misc_feature: MA Experiment 20000439 PARAMETER Experiment Name: At_Roots__P Parameter: Age (day) Value: 14 vs. 21
  misc_feature: MA Experiment 20000439 PARAMETER Experiment Name: At_Roots__P Parameter: Organism Value: A. thaliana
  misc_feature: MA Experiment 20000439 PARAMETER Experiment Name: At_Roots__P Parameter: Tissue Value: Roots vs. Whole Plant
  misc_feature: MA Experiment ID: 20001248 Result: Down-regulated in Transcription
  misc_feature: MA Experiment 20001248 PARAMETER Experiment Name: At_Far-red-induction_P Parameter: Age (day) Value: 7
  misc_feature: MA Experiment 20001248 PARAMETER Experiment Name: At_Far-red-induction_P Parameter: Light Value: Far-red vs. White
  misc_feature: MA Experiment 20001248 PARAMETER Experiment Name: At_Far-red-induction_P Parameter: Organism Value: A. thaliana
  misc_feature: MA Experiment 20001248 PARAMETER Experiment Name: At_Far-red-induction_P Parameter: Plant Line Value: Columbia
  misc_feature: MA Experiment 20001248 PARAMETER Experiment Name: At_Far-red-induction_P Parameter: Timepoint (hr) Value: 4
  misc_feature: MA Experiment 20001248 PARAMETER Experiment Name: At_Far-red-induction_P Parameter: Tissue Value: Whole Plant
acctctttcccattcactcatcttctcttccttatctccttaaaaatcttctgctgttttcttttttatatttagagctcctctgtttcttctccaataaccaaaaaaaaaaaaaaactcttcctctgtttgttttcaagttctgacatcataaattcagaccgagaaaacataaaaatttgagtcttttgatgatcggaaactgatgactcccgttctctgcgaaatcctgctctctgggctcacggtcaaatctgctctctgccgtagaacccatctcgttcaatctttctccgtcgtcttcctctactggttttacaacgtttcatgaattgctacaaactctaattaattttttcagacagatcataaaaaaaaaccaaacataaaacataaaactctgtcctttttttgtcttcttgtaacttttcttgttaaaaatcaatggcgtcatctagcagcacataccggagctcaagctcttccgacggtggtaataataacccgtcggactccgtcgtcaccgtcgacgaacgaaaacgtaaaagaatgttatcgaacagagaatctgcacgtaggtcaaggatgcgtaaacagaaacacgttgatgatctaacggctcagatcaatcagctatcaaacgacaaccgtcagatcttgaacagcctcaccgtaacatctcagctttacatgaagatccaagccgagaactctgttctcaccgctcagatggaggagcttagcaccagactccaatctctcaacgagatcgttgatcttgttcaatccaacggtgcaggatttggtgttgaccagatcgacggctgtggttttgatgatcgtacggttgggatcgacggatattacgatgatatgaatatgatgagtaatgttaatcattggggtggttcggtttacactaaccaacccattatggctaatgatatcaatatgtattgattaataaaattaattaaaataattagatgccccttttttgtctttttattttaaaatttagcccattttggtgtttttgggttggtgtgatgatgtaattatagtacatgcatctttgattggttggaaggataaatataaactttatatatatattggggcatatatatatgagttgtactttgtcatgtattggtgtgtgttttgttataattatatgattatatatgtttatgtt

SEQ ID NO: 98140 - protein, 171 aa, Arabidopsis thaliana; identical to SEQ ID NO: 30637
  peptide (1)..(171): Ceres Seq. ID no. 13580679
  misc_feature (27)..(87): Pfam Name: bZIP transcription factor Pfam Description: bZIP transcription factor
  misc_feature (1)..(171): Homolog of NCBI NO: 15224118 NR Description: bZIP family transcription factor [Arabidopsis
  misc_feature (1)..(171): Homolog of NCBI NO: 10443481 NR Description: transcription factor GBF5 [Arabidopsis thaliana]
  misc_feature (1)..(166): Homolog of NCBI NO: 15222223 NR Description: bZIP transcription factor ATB2, putative
  misc_feature (1)..(171): Homolog of NCBI NO: 4457221 NR Description: putative bZIP DNA-binding protein [Capsicum
  misc_feature (1)..(171): Homolog of NCBI NO: 16580130 NR Description: bZIP transcription factor BZI-2 [Nicotiana
  misc_feature (1)..(171): Homolog of NCBI NO: 24460973 NR Description: bZIP transcription factor [Capsicum chinense]

SEQ ID NO: 98141 - protein, 136 aa, Arabidopsis thaliana; identical to SEQ ID NO: 30638
  peptide (1)..(136): Ceres Seq. ID no. 13580680
  misc_feature (1)..(52): Pfam Name: bZIP transcription factor Pfam Description: bZIP transcription factor
  misc_feature (1)..(136): Homolog of NCBI NO: 15224118 NR Description: bZIP family transcription factor [Arabidopsis
  misc_feature (1)..(136): Homolog of NCBI NO: 10443481 NR Description: transcription factor GBF5 [Arabidopsis thaliana]
  misc_feature (1)..(131): Homolog of NCBI NO: 15222223 NR Description: bZIP transcription factor ATB2, putative
  misc_feature (1)..(136): Homolog of NCBI NO: 4457221 NR Description: putative bZIP DNA-binding protein [Capsicum
  misc_feature (1)..(136): Homolog of NCBI NO: 16580130 NR Description: bZIP transcription factor BZI-2 [Nicotiana
  misc_feature (1)..(136): Homolog of NCBI NO: 24460973 NR Description: bZIP transcription factor [Capsicum chinense]

SEQ ID NO: 98142 - protein, 124 aa, Arabidopsis thaliana; identical to SEQ ID NO: 30639
  peptide (1)..(124): Ceres Seq. ID no. 13580681
  misc_feature (1)..(124): Homolog of NCBI NO: 15224118 NR Description: bZIP family transcription factor [Arabidopsis
  misc_feature (1)..(124): Homolog of NCBI NO: 10443481 NR Description: transcription factor GBF5 [Arabidopsis thaliana]
  misc_feature (1)..(119): Homolog of NCBI NO: 15222223 NR Description: bZIP transcription factor ATB2, putative
  misc_feature (1)..(124): Homolog of NCBI NO: 4457221 NR Description: putative bZIP DNA-binding protein [Capsicum
  misc_feature (1)..(124): Homolog of NCBI NO: 16580130 NR Description: bZIP transcription factor BZI-2 [Nicotiana
  misc_feature (1)..(124): Homolog of NCBI NO: 24460973 NR Description: bZIP transcription factor [Capsicum chinense]

SEQ ID NO: 98143 - DNA, 874 bp, Arabidopsis thaliana
  misc_feature (1)..(874): Ceres Seq. ID no. 13580690
  misc_feature: MA Experiment ID: 20000184 Result: Down-regulated in Transcription
  misc_feature: MA Experiment 20000184 PARAMETER Experiment Name: At_Shoots__P Parameter: Age (day) Value: 7
  misc_feature: MA Experiment 20000184 PARAMETER Experiment Name: At_Shoots__P Parameter: Tissue Value: Shoots vs. Whole Plant
  misc_feature: MA Experiment ID: 20000234 Result: Up-regulated in Transcription
  misc_feature: MA Experiment 20000234 PARAMETER Experiment Name: At_Siliques_P Parameter: Age (day) Value: 21
  misc_feature: MA Experiment 20000234 PARAMETER Experiment Name: At_Siliques_P Parameter: Organism Value: A. thaliana
  misc_feature: MA Experiment 20000234 PARAMETER Experiment Name: At_Siliques_P Parameter: Plant Line Value: WS
  misc_feature: MA Experiment 20000234 PARAMETER Experiment Name: At_Siliques_P Parameter: Tissue Value: Less Than 5mm Siliques vs. Whole Plant
  misc_feature: MA Experiment ID: 20000264 Result: Up-regulated in Transcription
  misc_feature: MA Experiment 20000264 PARAMETER Experiment Name: At_Open_Flower_P Parameter: Age (day) Value: 21
  misc_feature: MA Experiment 20000264 PARAMETER Experiment Name: At_Open_Flower_P Parameter: Plant Line Value: WS
  misc_feature: MA Experiment 20000264 PARAMETER Experiment Name: At_Open_Flower_P Parameter: Tissue Value: Open Flower vs. Whole Plant
  misc_feature: MA Experiment ID: 20000265 Result: Up-regulated in Transcription
  misc_feature: MA Experiment 20000265 PARAMETER Experiment Name: At_Open_Flower_P Parameter: Age (day) Value: 21
  misc_feature: MA Experiment 20000265 PARAMETER Experiment Name: At_Open_Flower_P Parameter: Plant Line Value: WS
  misc_feature: MA Experiment 20000265 PARAMETER Experiment Name: At_Open_Flower_P Parameter: Tissue Value: Closed Flower vs. Whole Plant
  misc_feature: MA Experiment ID: 20000286 Result: Up-regulated in Transcription
  misc_feature: MA Experiment 20000286 PARAMETER Experiment Name: At_Open_Flower_P Parameter: Age (day) Value: 21
  misc_feature: MA Experiment 20000286 PARAMETER Experiment Name: At_Open_Flower_P Parameter: Plant Line Value: WS
  misc_feature: MA Experiment 20000286 PARAMETER Experiment Name: At_Open_Flower_P Parameter: Tissue Value: Half Open vs. Whole Plant
  misc_feature: MA Experiment ID: 20000794 Result: Down-regulated in Transcription
  misc_feature: MA Experiment 20000794 PARAMETER Experiment Name: At_Petals_P Parameter: Age (day) Value: 23-25 days
  misc_feature: MA Experiment 20000794 PARAMETER Experiment Name: At_Petals_P Parameter: Plant Line Value: WS
  misc_feature: MA Experiment 20000794 PARAMETER Experiment Name: At_Petals_P Parameter: Tissue Value: Petals vs. Whole plant
aaaaaaagctgaattgagttgggtgaagcaaattctcaggatgggaagaggaaagatagaaataaagaggatagagaactcaacaaatcgacaagtgacgttttgcaaaagaagaaatggacttctgaagaaagcctatgagctttcggtcctttgcgatgcagaagttgcgctcattgttttctccactcgtggccgtctctatgaatacgccaataacaacataagatcaaccattgagaggtacaagaaagcttgttctgatagcaccaacactagcactgtccaagaaatcaatgccgcgtactatcaacaagaatctgctaagctgagacaacagatccaaacgattcaaaactccaacaggaatctgatgggagactctttgagttccttaagtgtcaaggaactaaaacaagttgagaatcgccttgagaaagctatctctaggatcaggtccaagaaggagattgagcttgacaatgagaacatctatctaagaactaaggtagcagaagtggagaggtatcaacaacaccatcatcaaatggttagtggttcagagattaatgcaattgaagctttagcctcacgcaattactttgctcatagcattatgactgctggttctggatctggtaatggaggttcttactctgatcccgacaagaaaattcttcatctcggataatctcgtctgcgaaaaaccgagctgcaataactctctgcatgcatctggggattctttgctcagatttatctctacataaaatatgttttggtgcaaaataattcaaagtacaatgaaggtattggtccttcaagactcattgcaatttgtgttgtgtaatgattaagacatactctagttttt

SEQ ID NO: 98144 - protein, 229 aa, Arabidopsis thaliana
  peptide (1)..(229): Ceres Seq. ID no. 13580691
  misc_feature (87)..(172): Pfam Name: K-box region Pfam Description: K-box region
  misc_feature (14)..(229): Homolog of NCBI NO: 30681253 NR Description: MADS-box protein [Arabidopsis thaliana]
  misc_feature (14)..(229): Homolog of NCBI NO: 15234874 NR Description: MADS-box protein [Arabidopsis thaliana]
  misc_feature (14)..(229): Homolog of NCBI NO: 23194453 NR Description: MADS box protein GHMADS-2 [Gossypium hirsutum]
  misc_feature (14)..(229): Homolog of NCBI NO: 4103342 NR Description: agamous-like putative transcription factor
  misc_feature (14)..(229): Homolog of NCBI NO: 20385590 NR Description: MADS-box protein 5 [Vitis vinifera]
  misc_feature (14)..(229): Homolog of NCBI NO: 27763670 NR Description: mads-box transcription factor [Momordica
  misc_feature (14)..(229): Homolog of NCBI NO: 29467048 NR Description: MADS-box transcription factor AG [Agapanthus
  misc_feature (14)..(229): Homolog of NCBI NO: 7446521 NR Description: MADS-box protein - cucumber
  misc_feature (14)..(229): Homolog of NCBI NO: 3646326 NR Description: MADS-box protein [Malus x domestica]
  misc_feature (14)..(228): Homolog of NCBI NO: 1568513 NR Description: fbp11 [Petunia x hybrida]
KKAELSWVKQILRMGRGKIEIKRIENSTNRQVTFCKRRNGLLKKAYELSVLCDAEVALIVFSTRGRLYEYANNNIRSTIERYKKACSDSTNTSTVQEINAAYYQQESAKLRQQIQTIQNSNRNLMGDSLSSLSVKELKQVENRLEKAISRIRSKKEIELDNENIYLRTKVAEVERYQQHHHQMVSGSEINAIEALASRNYFAHSIMTAGSGSGNGGSYSDPDKKILHLG

SEQ ID NO: 98145 - protein, 216 aa, Arabidopsis thaliana
  peptide (1)..(216): Ceres Seq. ID no. 13580692
  misc_feature (74)..(159): Pfam Name: K-box region Pfam Description: K-box region
  misc_feature (1)..(216): Homolog of NCBI NO: 30681253 NR Description: MADS-box protein [Arabidopsis thaliana]
  misc_feature (1)..(216): Homolog of NCBI NO: 15234874 NR Description: MADS-box protein [Arabidopsis thaliana]
  misc_feature (1)..(216): Homolog of NCBI NO: 23194453 NR Description: MADS box protein GHMADS-2 [Gossypium hirsutum]
  misc_feature (1)..(216): Homolog of NCBI NO: 4103342 NR Description: agamous-like putative transcription factor
  misc_feature (1)..(216): Homolog of NCBI NO: 20385590 NR Description: MADS-box protein 5 [Vitis vinifera]
  misc_feature (1)..(216): Homolog of NCBI NO: 27763670 NR Description: mads-box transcription factor [Momordica
  misc_feature (1)..(216): Homolog of NCBI NO: 29467048 NR Description: MADS-box transcription factor AG [Agapanthus
  misc_feature (1)..(216): Homolog of NCBI NO: 7446521 NR Description: MADS-box protein - cucumber
  misc_feature (1)..(216): Homolog of NCBI NO: 3646326 NR Description: MADS-box protein [Malus x domestica]
  misc_feature (1)..(215): Homolog of NCBI NO: 1568513 NR Description: fbp11 [Petunia x hybrida]
MGRGKIEIKRIENSTNRQVTFCKRRNGLLKKAYELSVLCDAEVALIVFSTRGRLYEYANNNIRSTIERYKKACSDSTNTSTVQEINAAYYQQESAKLRQQIQTIQNSNRNLMGDSLSSLSVKELKQVENRLEKAISRIRSKKEIELDNENIYLRTKVAEVERYQQHHHQMVSGSEINAIEALASRNYFAHSIMTAGSGSGNGGSYSDPDKKILHLG

SEQ ID NO: 98146 - DNA, 3362 bp, Arabidopsis thaliana
  misc_feature (1)..(3362): Ceres Seq. ID no. 13580709
  misc_feature: MA Experiment ID: 20000179 Result: Up-regulated in Transcription
  misc_feature: MA Experiment 20000179 PARAMETER Experiment Name: At_Germinating_Seeds_P Parameter: Age (hr) Value: 6 vs. 0
  misc_feature: MA Experiment 20000179 PARAMETER Experiment Name: At_Germinating_Seeds_P Parameter: Tissue Value: Germinating Seeds
  misc_feature: MA Experiment ID: 20000180 Result: Up-regulated in Transcription
  misc_feature: MA Experiment 20000180 PARAMETER Experiment Name: At_Germinating_Seeds_P Parameter: Age (hr) Value: 24 vs. 0
  misc_feature: MA Experiment 20000180 PARAMETER Experiment Name: At_Germinating_Seeds_P Parameter: Tissue Value: Germinating Seeds
  misc_feature: MA Experiment ID: 20000184 Result: Down-regulated in Transcription
  misc_feature: MA Experiment 20000184 PARAMETER Experiment Name: At_Shoots__P Parameter: Age (day) Value: 7
  misc_feature: MA Experiment 20000184 PARAMETER Experiment Name: At_Shoots__P Parameter: Tissue Value: Shoots vs. Whole Plant
  misc_feature: MA Experiment ID: 20001905 Result: Down-regulated in Transcription
  misc_feature: MA Experiment 20001905 PARAMETER Experiment Name: At_Drought_Reproduction_P Parameter: Age (day) Value: 40
  misc_feature: MA Experiment 20001905 PARAMETER Experiment Name: At_Drought_Reproduction_P Parameter: Organism Value: A. thaliana
  misc_feature: MA Experiment 20001905 PARAMETER Experiment Name: At_Drought_Reproduction_P Parameter: Plant Line Value: WS
  misc_feature: MA Experiment 20001905 PARAMETER Experiment Name: At_Drought_Reproduction_P Parameter: Timepoint (day) Value: 10
  misc_feature: MA Experiment 20001905 PARAMETER Experiment Name: At_Drought_Reproduction_P Parameter: Tissue Value: Rosettes
  misc_feature: MA Experiment 20001905 PARAMETER Experiment Name: At_Drought_Reproduction_P Parameter: Treatment Value: Drought vs. No Drought
ataggaaacttacatcagatcggagaattaccgcatcagactctatggaaactctcaaagaagtatggtccggtgatgcatttgatgcttggaagagtcccaacagtcgtagtttcttcttcggatacagcaagacaagttttgagagttcatgacctccattgttgtactcgtccaagcttgtcagggccaagagagctttcgtacaactatctggacattgctttctctccttatgatgattattggaaagaagttaggaagctctgtgttcaagaacttttcagtactaaacaagttcactcgattcaacctattaaggacgaggaggtcaagaaaatgatcgattcaattgcggaatcagcctctcagaagaatccggttaacttgaacaataagtgtcttgaattaacagtaagtgtagtatgcaggacagcttttggggttagttttgagggaactgtgctcaacagtgacagattcaacaaaatagtccgcgaggcgctcgagatgttgggaagcttttctgccgcggattttattccgtatgtcggatggatcatcgatgtgttgacgggtttgcaaggaaggagagaaagaagcaagagagatctcaatgcattctttgaacaaatgtttgatttgcataaagagggaaagaaagaagggaatgaagattttgtggacttgctcttaaggttggagaaagaagaggcagttcttggaaatgataaacttacaagaaaccatatcaaagcaatcttgctggtaactaaaacaagatttagctaacaatcctttatgtaatgtagtagtaccaaagagtctgatatgttttgaatgagacaggatgttctacttgcgggaatcgatacttctgcaataacaatgacatgggcaatgacagaacttgcaagaaatccacgagtgatgaagaaagttcaatctgaaataagaactcaaatggggaacagatcaatgataagtttcgaagacatggatcagctagagtatctgaaaatggtgatcaaagaaacatggaggctacatcctacaacacctcttttgcttccaagagaagcaatgtctgaatttgatatcaacggctacactattcctgtcaagacacggcttcatgtgaatgtttgggctattggtcgtgatcctgatacttggaaagaccctgaagtgtttctcccggagaggtttatggataataacattgatgcaaaaggacaacattttgagctgttaccgtttgggggcggtcggagaatctgtcctgcaatatacatggggacaacaatggttgagtttggtctagctaatctcttgtatcattttgactggaagttaccagaaggcgtggaggttaaagatatcgacgtggaagaagctcctggactcactgtaaacaagaaaaacgagctcctacttgtgccagagatgagaagatcgtgtggttgagattagagctgactcatcatatcgacggttatgttgttgttcttgtttgacttttcaaacctaaaaagtatatcttatgaatataaaattaagtttaacgttacgtactacgtagcagagaatatatattgtaagataataataattgaagagagcagcaatgtactagtataatataaagactacacttatggagccactttaattgcaattaaatcagaaatgacaaacatttggcttctgtcacttatcttcgtcatttgtattcttgtagccgtgttcaaccacaagaatcggaggaattatcaacggacaccaccgtctcctcctggctgtcctatcatcggaaacttgcatcaactcggagaattaccacatcaatctctatggaaactctccaaaaagtatggccctgtgatgcttttaaagcttggaagagtaccaacagtcatagtttcttcctctgaaacagcaaaacaagctttgaaaatccatgacctccattgttgtagtcgtccaggctttgcaggggcaagagagctctcttacaactatctagacattgctttttctccttatgatgattattggaaagaagtaaggaagctcgctgttcaagaacttttcagtagtaaacaagttcactctatacaaccgataaaggacgaggaggtcaagaaactgatcgattcaatctccgaatcagctgctcagaagactccgatcaacttgaacaagacattgctggctttaactgttagtgtggtctgcaggacagcgtttagtgtgaattttgagggaactgtgctcaacagtgaacgattcaataacatagtccgtgaggcgctcgagatgttgggaagcttttctgcctcagatttcattccgtatgtcggaaggatcatcgacttgttgacgggtttgcaaggacggcgagagagaagcatgagagatctcgatgctttctatgaacaaatgtttgatctgcataaacagaaaaaggaagaaggtagtgaagactttgtggacttgctgttgaggttggagaaagaagaagctgttcttggaaatgacaagctcactagaaaccatatcaaagcgatattgatggatgttcttctagcaggaatggatacttctgcaataaccatgacatgggcaatggcagaactcgcaaagaatccacgagtgatgaaaaaagttcaatccgaaatcagaagtcaaatcaagaacaaagaaagaatcagctttgatgacactgataagcttgagtacctcaaaatggttatcaaagaaacatggaggttacatcctacaacacctcttctaatcccaagggaagcaatgtctgaatttgagatcaacggctacacgattccagttaagacacggcttcacgtgaatgtatgggctattggtcgtgatcccgatacctggaaagaccctgaagtgtttctcccggagaggtttacggataataatattgatgcaaaaggacagcattttgagctgttaccgtttggaggcggccggagaatgtgtcctgcagtttatatggggacaacaatggtcgagtttggtttggctaatcttttgtatcattttgattggaagttaccagaaggcatgaaggttgacgatattgacatggaagaagctcccggactcactgtcaacaagaaaaacgagcttatacttgtgccaacgaagtttctagatccttaaaataatgtcatcacatggaatatataaaaacatcgcatcttcctttgatgtttaatcagacaggacaaaaaaaaagagtttcttctttttaaataaaatgttttaacgcattacgttttgtaatattgtgctctcaagaatttggttctaagatgggatgatcttgtact

SEQ ID NO: 98147 - protein, 500 aa, Arabidopsis thaliana; identical to SEQ ID NO: 72389
  peptide (1)..(500): Ceres Seq. ID no. 13580710
  misc_feature (32)..(492): Pfam Name: Cytochrome P450 Pfam Description: Cytochrome P450
  misc_feature (1)..(500): Homolog of NCBI NO: 15231538 NR Description: cytochrome P450 family [Arabidopsis thaliana] Cytochrome P450 71B34 >gi|9294288|dbj|BAB02190.1| cytochrome P450
  misc_feature (1)..(494): Homolog of NCBI NO: 15231539 NR Description: cytochrome P450 family [Arabidopsis thaliana] Cytochrome P450 71B35 >gi|9294289|dbj|BAB02191.1| cytochrome P450
  misc_feature (1)..(499): Homolog of NCBI NO: 15231537 NR Description: cytochrome p450 71B26 [Arabidopsis thaliana] Cytochrome P450 71B26 >gi|11994450|dbj|BAB02452.1| cytochrome [Arabidopsis thaliana] >gi|22136028|gb|AAM91596.1| cytochrome
  misc_feature (1)..(499): Homolog of NCBI NO: 15231542 NR Description: cytochrome p450 family [Arabidopsis thaliana]
  misc_feature (1)..(499): Homolog of NCBI NO: 9294291 NR Description: cytochrome p450 [Arabidopsis thaliana]
  misc_feature (1)..(499): Homolog of NCBI NO: 15231541 NR Description: cytochrome P450 71B36 [Arabidopsis thaliana] Cytochrome P450 71B36 >gi|9294290|dbj|BAB02192.1| cytochrome P450
  misc_feature (1)..(498): Homolog of NCBI NO: 15227003 NR Description: cytochrome P450 family [Arabidopsis thaliana] Cytochrome P450 71B9 >gi|20197089|gb|AAC18928.2| putative
  misc_feature (1)..(498): Homolog of NCBI NO: 18175891 NR Description: putative cytochrome P450 protein [Arabidopsis
  misc_feature (1)..(498): Homolog of NCBI NO: 7430672 NR Description: probable cytochrome P450 At2g02580 [imported] -
  misc_feature (1)..(498): Homolog of NCBI NO: 13878390 NR Description: Cytochrome P450 71B10 >gi|8777359|dbj|BAA96949.1|

SEQ ID NO: 98148 - protein, 435 aa, Arabidopsis thaliana; identical to SEQ ID NO: 72390
  peptide (1)..(435): Ceres Seq. ID no. 13580711
  misc_feature (1)..(427): Pfam Name: Cytochrome P450 Pfam Description: Cytochrome P450
  misc_feature (1)..(435): Homolog of NCBI NO: 15231538 NR Description: cytochrome P450 family [Arabidopsis thaliana] Cytochrome P450 71B34 >gi|9294288|dbj|BAB02190.1| cytochrome P450
  misc_feature (1)..(429): Homolog of NCBI NO: 15231539 NR Description: cytochrome P450 family [Arabidopsis thaliana] Cytochrome P450 71B35 >gi|9294289|dbj|BAB02191.1| cytochrome P450
  misc_feature (1)..(434): Homolog of NCBI NO: 15231537 NR Description: cytochrome p450 71B26 [Arabidopsis thaliana] Cytochrome P450 71B26 >gi|11994450|dbj|BAB02452.1| cytochrome [Arabidopsis thaliana] >gi|22136028|gb|AAM91596.1| cytochrome
  misc_feature (1)..(434): Homolog of NCBI NO: 15231542 NR Description: cytochrome p450 family [Arabidopsis thaliana]
  misc_feature (1)..(434): Homolog of NCBI NO: 9294291 NR Description: cytochrome p450 [Arabidopsis thaliana]
  misc_feature (1)..(434): Homolog of NCBI NO: 15231541 NR Description: cytochrome P450 71B36 [Arabidopsis thaliana] Cytochrome P450 71B36 >gi|9294290|dbj|BAB02192.1| cytochrome P450
  misc_feature (1)..(433): Homolog of NCBI NO: 15227003 NR Description: cytochrome P450 family [Arabidopsis thaliana] Cytochrome P450 71B9 >gi|20197089|gb|AAC18928.2| putative
  misc_feature (1)..(433): Homolog of NCBI NO: 18175891 NR Description: putative cytochrome P450 protein [Arabidopsis
  misc_feature (1)..(433): Homolog of NCBI NO: 7430672 NR Description: probable cytochrome P450 At2g02580 [imported] -
  misc_feature (1)..(433): Homolog of NCBI NO: 13878390 NR Description: Cytochrome P450 71B10 >gi|8777359|dbj|BAA96949.1|

SEQ ID NO: 98149 - protein, 290 aa, Arabidopsis thaliana; identical to SEQ ID NO: 72391
  peptide (1)..(290): Ceres Seq. ID no. 13580712
  misc_feature (1)..(282): Pfam Name: Cytochrome P450 Pfam Description: Cytochrome P450
  misc_feature (1)..(290): Homolog of NCBI NO: 15231538 NR Description: cytochrome P450 family [Arabidopsis thaliana] Cytochrome P450 71B34 >gi|9294288|dbj|BAB02190.1| cytochrome P450
  misc_feature (1)..(284): Homolog of NCBI NO: 15231539 NR Description: cytochrome P450 family [Arabidopsis thaliana] Cytochrome P450 71B35 >gi|9294289|dbj|BAB02191.1| cytochrome P450
  misc_feature (1)..(289): Homolog of NCBI NO: 15231537 NR Description: cytochrome p450 71B26 [Arabidopsis thaliana] Cytochrome P450 71B26 >gi|11994450|dbj|BAB02452.1| cytochrome [Arabidopsis thaliana] >gi|22136028|gb|AAM91596.1| cytochrome
  misc_feature (1)..(289): Homolog of NCBI NO: 15231542 NR Description: cytochrome p450 family [Arabidopsis thaliana]
  misc_feature (1)..(289): Homolog of NCBI NO: 9294291 NR Description: cytochrome p450 [Arabidopsis thaliana]
  misc_feature (1)..(289): Homolog of NCBI NO: 15231541 NR Description: cytochrome P450 71B36 [Arabidopsis thaliana] Cytochrome P450 71B36 >gi|9294290|dbj|BAB02192.1| cytochrome P450
  misc_feature (1)..(288): Homolog of NCBI NO: 15227003 NR Description: cytochrome P450 family [Arabidopsis thaliana] Cytochrome P450 71B9 >gi|20197089|gb|AAC18928.2| putative
  misc_feature (1)..(288): Homolog of NCBI NO: 18175891 NR Description: putative cytochrome P450 protein [Arabidopsis
  misc_feature (1)..(288): Homolog of NCBI NO: 7430672 NR Description: probable cytochrome P450 At2g02580 [imported] -
  misc_feature (1)..(288): Homolog of NCBI NO: 13878390 NR Description: Cytochrome P450 71B10 >gi|8777359|dbj|BAA96949.1|

SEQ ID NO: 98150 - DNA, 1414 bp, Arabidopsis thaliana
  misc_feature (1)..(1414): Ceres Seq. ID no. 13580721
  misc_feature: MA Experiment ID: 20000184 Result: Down-regulated in Transcription
  misc_feature: MA Experiment 20000184 PARAMETER Experiment Name: At_Shoots__P Parameter: Age (day) Value: 7
  misc_feature: MA Experiment 20000184 PARAMETER Experiment Name: At_Shoots__P Parameter: Tissue Value: Shoots vs. Whole Plant
  misc_feature: MA Experiment ID: 20000185 Result: Down-regulated in Transcription
  misc_feature: MA Experiment 20000185 PARAMETER Experiment Name: At_Roots__P Parameter: Age (day) Value: 7 vs. 21
  misc_feature: MA Experiment 20000185 PARAMETER Experiment Name: At_Roots__P Parameter: Organism Value: A. thaliana
  misc_feature: MA Experiment 20000185 PARAMETER Experiment Name: At_Roots__P Parameter: Tissue Value: Roots vs. Whole Plant
  misc_feature: MA Experiment ID: 20000234 Result: Down-regulated in Transcription
  misc_feature: MA Experiment 20000234 PARAMETER Experiment Name: At_Siliques_P Parameter: Age (day) Value: 21
  misc_feature: MA Experiment 20000234 PARAMETER Experiment Name: At_Siliques_P Parameter: Organism Value: A. thaliana
  misc_feature: MA Experiment 20000234 PARAMETER Experiment Name: At_Siliques_P Parameter: Plant Line Value: WS
  misc_feature: MA Experiment 20000234 PARAMETER Experiment Name: At_Siliques_P Parameter: Tissue Value: Less Than 5mm Siliques vs. Whole Plant
  misc_feature: MA Experiment ID: 20000235 Result: Down-regulated in Transcription
  misc_feature: MA Experiment 20000235 PARAMETER Experiment Name: At_Siliques_P Parameter: Age (day) Value: 21
  misc_feature: MA Experiment 20000235 PARAMETER Experiment Name: At_Siliques_P Parameter: Organism Value: A. thaliana
  misc_feature: MA Experiment 20000235 PARAMETER Experiment Name: At_Siliques_P Parameter: Plant Line Value: WS
  misc_feature: MA Experiment 20000235 PARAMETER Experiment Name: At_Siliques_P Parameter: Tissue Value: 5-10mm Siliques vs. Whole Plant
  misc_feature: MA Experiment ID: 20000264 Result: Down-regulated in Transcription
  misc_feature: MA Experiment 20000264 PARAMETER Experiment Name: At_Open_Flower_P Parameter: Age (day) Value: 21
  misc_feature: MA Experiment 20000264 PARAMETER Experiment Name: At_Open_Flower_P Parameter: Plant Line Value: WS
  misc_feature: MA Experiment 20000264 PARAMETER Experiment Name: At_Open_Flower_P Parameter: Tissue Value: Open Flower vs. Whole Plant
  misc_feature: MA Experiment ID: 20000265 Result: Down-regulated in Transcription
  misc_feature: MA Experiment 20000265 PARAMETER Experiment Name: At_Open_Flower_P Parameter: Age (day) Value: 21
  misc_feature: MA Experiment 20000265 PARAMETER Experiment Name: At_Open_Flower_P Parameter: Plant Line Value: WS
  misc_feature: MA Experiment 20000265 PARAMETER Experiment Name: At_Open_Flower_P Parameter: Tissue Value: Closed Flower vs. Whole Plant
  misc_feature: MA Experiment ID: 20000286 Result: Down-regulated in Transcription
  misc_feature: MA Experiment 20000286 PARAMETER Experiment Name: At_Open_Flower_P Parameter: Age (day) Value: 21
  misc_feature: MA Experiment 20000286 PARAMETER Experiment Name: At_Open_Flower_P Parameter: Plant Line Value: WS
  misc_feature: MA Experiment 20000286 PARAMETER Experiment Name: At_Open_Flower_P Parameter: Tissue Value: Half Open vs. Whole Plant
  misc_feature: MA Experiment ID: 20000438 Result: Down-regulated in Transcription
  misc_feature: MA Experiment 20000438 PARAMETER Experiment Name: At_Shoots__P Parameter: Age (day) Value: 14
  misc_feature: MA Experiment 20000438 PARAMETER Experiment Name: At_Shoots__P Parameter: Tissue Value: Shoots vs. Whole Plant
  misc_feature: MA Experiment ID: 20000439 Result: Down-regulated in Transcription
  misc_feature: MA Experiment 20000439 PARAMETER Experiment Name: At_Roots__P Parameter: Age (day) Value: 14 vs. 21
  misc_feature: MA Experiment 20000439 PARAMETER Experiment Name: At_Roots__P Parameter: Organism Value: A. thaliana
  misc_feature: MA Experiment 20000439 PARAMETER Experiment Name: At_Roots__P Parameter: Tissue Value: Roots vs. Whole Plant
  misc_feature: MA Experiment ID: 20000573 Result: Down-regulated in Transcription
  misc_feature: MA Experiment 20000573 PARAMETER Experiment Name: At_100uM_ABA_Mutants__P Parameter: Organism Value: A. thaliana
  misc_feature: MA Experiment 20000573 PARAMETER Experiment Name: At_100uM_ABA_Mutants__P Parameter: Plant Line Value: CS22 vs. Ler wt
  misc_feature: MA Experiment 20000573 PARAMETER Experiment Name: At_100uM_ABA_Mutants__P Parameter: Timepoint (hr) Value: N/A
  misc_feature: MA Experiment 20000573 PARAMETER Experiment Name: At_100uM_ABA_Mutants__P Parameter: Tissue Value: Whole Plant
  misc_feature: MA Experiment 20000573 PARAMETER Experiment Name: At_100uM_ABA_Mutants__P Parameter: Treatment Value: None
  misc_feature: MA Experiment ID: 20000574 Result: Down-regulated in Transcription
  misc_feature: MA Experiment 20000574 PARAMETER Experiment Name: At_100uM_ABA_Mutants__P Parameter: Organism Value: A. thaliana
  misc_feature: MA Experiment 20000574 PARAMETER Experiment Name: At_100uM_ABA_Mutants__P Parameter: Plant Line Value: CS23 vs. Ler wt
  misc_feature: MA Experiment 20000574 PARAMETER Experiment Name: At_100uM_ABA_Mutants__P Parameter: Timepoint (hr) Value: N/A
  misc_feature: MA Experiment 20000574 PARAMETER Experiment Name: At_100uM_ABA_Mutants__P Parameter: Tissue Value: Whole Plant
  misc_feature: MA Experiment 20000574 PARAMETER Experiment Name: At_100uM_ABA_Mutants__P Parameter: Treatment Value: None
  misc_feature: MA Experiment ID: 20001247 Result: Up-regulated in Transcription
  misc_feature: MA Experiment 20001247 PARAMETER Experiment Name: At_Far-red-induction_P Parameter: Age (day) Value: 7
  misc_feature: MA Experiment 20001247 PARAMETER Experiment Name: At_Far-red-induction_P Parameter: Light Value: Far-red vs. White
  misc_feature: MA Experiment 20001247 PARAMETER Experiment Name: At_Far-red-induction_P Parameter: Organism Value: A. thaliana
  misc_feature: MA Experiment 20001247 PARAMETER Experiment Name: At_Far-red-induction_P Parameter: Plant Line Value: Columbia
  misc_feature: MA Experiment 20001247 PARAMETER Experiment Name: At_Far-red-induction_P Parameter: Timepoint (hr) Value: 1
  misc_feature: MA Experiment 20001247 PARAMETER Experiment Name: At_Far-red-induction_P Parameter: Tissue Value: Whole Plant
  misc_feature: MA Experiment ID: 20001248 Result: Up-regulated in Transcription
  misc_feature: MA Experiment 20001248 PARAMETER Experiment Name: At_Far-red-induction_P Parameter: Age (day) Value: 7
  misc_feature: MA Experiment 20001248 PARAMETER Experiment Name: At_Far-red-induction_P Parameter: Light Value: Far-red vs. White
  misc_feature: MA Experiment 20001248 PARAMETER Experiment Name: At_Far-red-induction_P Parameter: Organism Value: A. thaliana
  misc_feature: MA Experiment 20001248 PARAMETER Experiment Name: At_Far-red-induction_P Parameter: Plant Line Value: Columbia
  misc_feature: MA Experiment 20001248 PARAMETER Experiment Name: At_Far-red-induction_P Parameter: Timepoint (hr) Value: 4
  misc_feature: MA Experiment 20001248 PARAMETER Experiment Name: At_Far-red-induction_P Parameter: Tissue Value: Whole Plant
tggatttgtgagagaagaaaaaaaagcacaatctttgaatggactggaatttcaaacttagctctggttatttatctggattcgatcaagaaccagatttatcaccaatggatggttcgatctcgtttggtgggtcgtcacagtcaaaagcggatttttcatttgatctaaaacttggaagaaacattggaaactcttcctctgtttttggtgatacagagcaagtgattagtcttagtaagtggaaagatagtgctttagctaaaccagaaggttcaagaagctcgagttcaaagagaacaagagggaatggtgttggaaccaaccagatgccgatttgtcttgttgatggatgtgattctgattttagtaattgtagagagtatcataagagacataaagtttgtgatgttcattcaaaaactcctgtggttactattaatggtcataaacagaggttttgtcaacaatgcagcaggtaagattgtgtgttaatggtttaagcttcttgttgggttggtgaagatgttaacatttgtgtctaattaggtttcatgctttggaggagtttgatgaagggaagagaagttgtaggaaacgtcttgatggacataatcgaagacgacggaagccgcagcctgaacatatcggtcgtcctgccaacttctttacgggttttcaaggtttctgttttaagaaaagttagttagtttcttgaatccaatagaccgttccttgttgatgaagaagcattgttttatgttttcaggtagcaaattgctagagttttctggtggttcacatgtgtttccaactacatctgtgttgaacccgagctggggaaatagtcttgtaagcgttgctgtagccgccaatggttcgagttatgggcagagccagagctatgttgttggttcttctcctgcaaagacagggataatgtttccaatctcttcttctccaaacagtaccagaagcatagcaaaacaattccctttcttgcaagaagaagaaagctcgagaaccgcatcgttgtgtgagagaatgacgagttgcatccatgactctgattgtgctctctctcttctgtcatcctcctcgtcgtcagtccctcatttgcttcaaccaccactttctttgtcccaagaagcagttgagacagttttttacgggtcgggattgtttgagaatgcgagtgcagtctctgatggatcggttatatccggtaacgaggctgtccgtcttccgcagacattcccgtttcattgggagtagtagaagaagaagtaggtagatagatagaatcagaaagatctatttgtgtctcttctcttctccctcatttttcaatgttctttatcatcatcattgttcttgttaacactacaagaaatatggacattcttaacacacc

SEQ ID NO: 98151 - protein, 177 aa, Arabidopsis thaliana
  peptide (1)..(177): Ceres Seq. ID no. 13580722
  misc_feature (8)..(177): Homolog of NCBI NO: 18423163 NR Description: expressed protein [Arabidopsis thaliana] expressed protein [Arabidopsis thaliana] expressed protein [Arabidopsis thaliana]
  misc_feature (8)..(177): Homolog of NCBI NO: 21536841 NR Description: unknown [Arabidopsis thaliana]
  misc_feature (1)..(177): Homolog of NCBI NO: 20260414 NR Description: unknown protein [Arabidopsis thaliana]
MKKHCFMFSGSKLLEFSGGSHVFPTTSVLNPSWGNSLVSVAVAANGSSYGQSQSYVVGSSPAKTGIMFPISSSPNSTRSIAKQFPFLQEEESSRTASLCERMTSCIHDSDCALSLLSSSSSSVPHLLQPPLSLSQEAVETVFYGSGLFENASAVSDGSVISGNEAVRLPQTFPFHWE

SEQ ID NO: 98152 - protein, 171 aa, Arabidopsis thaliana
  peptide (1)..(171): Ceres Seq. ID no. 13580723
  misc_feature (2)..(171): Homolog of NCBI NO: 18423163 NR Description: expressed protein [Arabidopsis thaliana] expressed protein [Arabidopsis thaliana] expressed protein [Arabidopsis thaliana]
  misc_feature (2)..(171): Homolog of NCBI NO: 21536841 NR Description: unknown [Arabidopsis thaliana]
  misc_feature (1)..(171): Homolog of NCBI NO: 20260414 NR Description: unknown protein [Arabidopsis thaliana]
MFSGSKLLEFSGGSHVFPTTSVLNPSWGNSLVSVAVAANGSSYGQSQSYVVGSSPAKTGIMFPISSSPNSTRSIAKQFPFLQEEESSRTASLCERMTSCIHDSDCALSLLSSSSSSVPHLLQPPLSLSQEAVETVFYGSGLFENASAVSDGSVISGNEAVRLPQTFPFHWE

SEQ ID NO: 98153 - protein, 147 aa, Arabidopsis thaliana
  peptide (1)..(147): Ceres Seq. ID no. 13580724
  misc_feature (1)..(147): Homolog of NCBI NO: 18423163 NR Description: expressed protein [Arabidopsis thaliana] expressed protein [Arabidopsis thaliana] expressed protein [Arabidopsis thaliana]
  misc_feature (24)..(147): Homolog of NCBI NO: 21536841 NR Description: unknown [Arabidopsis thaliana]
  misc_feature (67)..(147): Homolog of NCBI NO: 6094241 NR Description: SQUAMOSA-PROMOTER BINDING PROTEIN 2
  misc_feature (79)..(147): Homolog of NCBI NO: 25352584 NR Description: squamosa promoter binding protein-homolog 4 - garden snapdragon (fragment) >gi|5931641|emb|CAB56569.1|
  misc_feature (82)..(147): Homolog of NCBI NO: 30577628 NR Description: squamosa promoter binding like-protein [Betula
  misc_feature (79)..(147): Homolog of NCBI NO: 30688933 NR Description: squamosa-promoter binding protein -related
  misc_feature (79)..(147): Homolog of NCBI NO: 25352586 NR Description: squamosa promoter binding protein homolog 9 - Arabidopsis thaliana >gi|5931675|emb|CAB56591.1| squamosa
  misc_feature (79)..(147): Homolog of NCBI NO: 15028115 NR Description: putative squamosa-promoter binding protein
  misc_feature (79)..(147): Homolog of NCBI NO: 15227896 NR Description: squamosa-promoter binding protein -related
  misc_feature (85)..(147): Homolog of NCBI NO: 6730637 NR Description: F4N2.13 [Arabidopsis thaliana]
MDWNFKLSSGYLSGFDQEPDLSPMDGSISFGGSSQSKADFSFDLKLGRNIGNSSSVFGDTEQVISLSKWKDSALAKPEGSRSSSSKRTRGNGVGTNQMPICLVDGCDSDFSNCREYHKRHKVCDVHSKTPVVTINGHKQRFCQQCSR

SEQ ID NO: 98154 - DNA, 1959 bp, Arabidopsis thaliana
  misc_feature (1)..(1959): Ceres Seq. ID no. 13580725
  misc_feature: MA Experiment ID: 20000169 Result: Up-regulated in Transcription
  misc_feature: MA Experiment 20000169 PARAMETER Experiment Name: At_100uM_ABA_P Parameter: Age (day) Value: 14
  misc_feature: MA Experiment 20000169 PARAMETER Experiment Name: At_100uM_ABA_P Parameter: Organism Value: A. thaliana
  misc_feature: MA Experiment 20000169 PARAMETER Experiment Name: At_100uM_ABA_P Parameter: Plant Line Value: WS
  misc_feature: MA Experiment 20000169 PARAMETER Experiment Name: At_100uM_ABA_P Parameter: Timepoint (hr) Value: 6
  misc_feature: MA Experiment 20000169 PARAMETER Experiment Name: At_100uM_ABA_P Parameter: Tissue Value: Aerial
  misc_feature: MA Experiment 20000169 PARAMETER Experiment Name: At_100uM_ABA_P Parameter: Treatment Value: 100uM ABA vs. No Treatment
  misc_feature: MA Experiment ID: 20000179 Result: Up-regulated in Transcription
  misc_feature: MA Experiment 20000179 PARAMETER Experiment Name: At_Germinating_Seeds_P Parameter: Age (hr) Value: 6 vs. 0
  misc_feature: MA Experiment 20000179 PARAMETER Experiment Name: At_Germinating_Seeds_P Parameter: Tissue Value: Germinating Seeds
  misc_feature: MA Experiment ID: 20000180 Result: Up-regulated in Transcription
  misc_feature: MA Experiment 20000180 PARAMETER Experiment Name: At_Germinating_Seeds_P Parameter: Age (hr) Value: 24 vs. 0
  misc_feature: MA Experiment 20000180 PARAMETER Experiment Name: At_Germinating_Seeds_P Parameter: Tissue Value: Germinating Seeds
  misc_feature: MA Experiment ID: 20000184 Result: Down-regulated in Transcription
  misc_feature: MA Experiment 20000184 PARAMETER Experiment Name: At_Shoots__P Parameter: Age (day) Value: 7
  misc_feature: MA Experiment 20000184 PARAMETER Experiment Name: At_Shoots__P Parameter: Tissue Value: Shoots vs. Whole Plant
  misc_feature: MA Experiment ID: 20000227 Result: Down-regulated in Transcription
  misc_feature: MA Experiment 20000227 PARAMETER Experiment Name: At_Root-Tips-vs-Tops_P Parameter: Tissue Value: Root Tips vs. Root Tops
  misc_feature: MA Experiment ID: 20000265 Result: Up-regulated in Transcription
  misc_feature: MA Experiment 20000265 PARAMETER Experiment Name: At_Open_Flower_P Parameter: Age (day) Value: 21
  misc_feature: MA Experiment 20000265 PARAMETER Experiment Name: At_Open_Flower_P Parameter: Plant Line Value: WS
  misc_feature: MA Experiment 20000265 PARAMETER Experiment Name: At_Open_Flower_P Parameter: Tissue Value: Closed Flower vs. Whole Plant
  misc_feature: MA Experiment ID: 20000286 Result: Up-regulated in Transcription
  misc_feature: MA Experiment 20000286 PARAMETER Experiment Name: At_Open_Flower_P Parameter: Age (day) Value: 21
  misc_feature: MA Experiment 20000286 PARAMETER Experiment Name: At_Open_Flower_P Parameter: Plant Line Value: WS
  misc_feature: MA Experiment 20000286 PARAMETER Experiment Name: At_Open_Flower_P Parameter: Tissue Value: Half Open vs. Whole Plant
  misc_feature: MA Experiment ID: 20000436 Result: Up-regulated in Transcription
  misc_feature: MA Experiment 20000436 PARAMETER Experiment Name: At_Drought_P Parameter: Age (day) Value: 7
  misc_feature: MA Experiment 20000436 PARAMETER Experiment Name: At_Drought_P Parameter: Organism Value: A. thaliana
  misc_feature: MA Experiment 20000436 PARAMETER Experiment Name: At_Drought_P Parameter: Plant Line Value: WS
  misc_feature: MA Experiment 20000436 PARAMETER Experiment Name: At_Drought_P Parameter: Timepoint (hr) Value: 12
  misc_feature: MA Experiment 20000436 PARAMETER Experiment Name: At_Drought_P Parameter: Tissue Value: Whole Plant
  misc_feature: MA Experiment 20000436 PARAMETER Experiment Name: At_Drought_P Parameter: Treatment Value: Drought vs. No Drought
  misc_feature: MA Experiment ID: 20000437 Result: Up-regulated in Transcription
  misc_feature: MA Experiment 20000437 PARAMETER Experiment Name: At_Drought_P Parameter: Age (day) Value: 8
  misc_feature: MA Experiment 20000437 PARAMETER Experiment Name: At_Drought_P Parameter: Organism Value: A. thaliana
  misc_feature: MA Experiment 20000437 PARAMETER Experiment Name: At_Drought_P Parameter: Plant Line Value: WS
  misc_feature: MA Experiment 20000437 PARAMETER Experiment Name: At_Drought_P Parameter: Timepoint (hr) Value: 24
  misc_feature: MA Experiment 20000437 PARAMETER Experiment Name: At_Drought_P Parameter: Tissue Value: Whole Plant
  misc_feature: MA Experiment 20000437 PARAMETER Experiment Name: At_Drought_P Parameter: Treatment Value: Drought vs. No Drought
  misc_feature: MA Experiment ID: 20001451 Result: Down-regulated in Transcription
  misc_feature: MA Experiment 20001451 PARAMETER Experiment Name: At_Far-red-induction_P Parameter: Age (day) Value: 7
  misc_feature: MA Experiment 20001451 PARAMETER Experiment Name: At_Far-red-induction_P Parameter: Light Value: Far-red vs. White
  misc_feature: MA Experiment 20001451 PARAMETER Experiment Name: At_Far-red-induction_P Parameter: Organism Value: A. thaliana
  misc_feature: MA Experiment 20001451 PARAMETER Experiment Name: At_Far-red-induction_P Parameter: Plant Line Value: Columbia
  misc_feature: MA Experiment 20001451 PARAMETER Experiment Name: At_Far-red-induction_P Parameter: Timepoint (hr) Value: 24
  misc_feature: MA Experiment 20001451 PARAMETER Experiment Name: At_Far-red-induction_P Parameter: Tissue Value: Whole Plant
  misc_feature: MA Experiment ID: 20001554 Result: Up-regulated in Transcription
  misc_feature: MA Experiment 20001554 PARAMETER Experiment Name: At_Drought_Soil_Dry_P Parameter: Age (day) Value: 21
  misc_feature: MA Experiment 20001554 PARAMETER Experiment Name: At_Drought_Soil_Dry_P Parameter: Organism Value: A. thaliana
  misc_feature: MA Experiment 20001554 PARAMETER Experiment Name: At_Drought_Soil_Dry_P Parameter: Plant Line Value: WS
  misc_feature: MA Experiment 20001554 PARAMETER Experiment Name: At_Drought_Soil_Dry_P Parameter: Post Timepoint (hr) Value: None
  misc_feature: MA Experiment 20001554 PARAMETER Experiment Name: At_Drought_Soil_Dry_P Parameter: Post-Treatment Value: None
  misc_feature: MA Experiment 20001554 PARAMETER Experiment Name: At_Drought_Soil_Dry_P Parameter: Timepoint (day) Value: 7
  misc_feature: MA Experiment 20001554 PARAMETER Experiment Name: At_Drought_Soil_Dry_P Parameter: Treatment Value: Drought vs. No Drought
aatgtccattacaaacaacaacagcatcataaatctcatcacgacgaactttcttctctttctccgtcgattcaatcctccacttcccgattccttcctccgccgccggagaaaccttcacaacctccgtctcaaacctaaccatctcctcaatcccaaactccttagcgaaatctttcaaatacgccaaaacttcgccatgactcggaaacctcctccgatctctagacacaccggaacgaaccacgaacgggaaatctctgtatccggtacactctcgtgtaccgttgattcgtagagatctatagacgcttgaatgaacaacggatcgggtcgggtcaacacttaacggatccgattcgacttcatcggtgtaaatccaggttcctcccacttgtttttgtttctcgaaaacgaccactgagtgaccttctcgtcgaagctctcgtgccgctactagtccggcgggtccagcaccgataaccgccacgtggtgtgatctgaagcaggtattgaagcaattggagccatggtgtgaacttaaagataaagtggttcttgtgacaggtgcttcctctggtatagggagagagatctgtcttgatctatgcaaagctggttgtaagattgtagcagcagctcgtcgtgttgatcgtctcaactctctctgttctgaaatcaacagctttggtgctatcggagtccaagccgtagcacttgagctagacgtttcatcagaagcagacactattcgaaaagcggttaaagaagcttgggaaacctttggaaagatcgatgttttgatcaataatgccggaatcagaggcaatgtcaagtcgagtttggatttgtcagaagaagaatgggacaaagtctttagaaccaacttaaccggatcttggttaatatccaaatacgtctgccttttgatgcgtgacgctgagcgcgggggctcggtgattaacgtctcgtcgatctctgggcttcatcgcggtttgttgcgcggtggactagcgtatgcttgttccaaaggtggtgttgacaccatgacgaggatgatggctattgagttagctgtttataagatcagagtgaactcgatcgcaccggggattttcaggtcagagatcacacaaggtcttttccagaaagagtggctcaagaaggttacggaaaaggttgtaccattaaagatgcaacagactgtggatccggggcttacatctcttgttcgctatctcattcacgattcttctcaatatgtcaccgggaatacatacattgtcgattccggaactacactgcccggtgtgcccattttttcttctctttctccgtagattcaattctccatttcccgcttccttcttccgccgccggagcaaccttcacaaccgccgtatcaaaccgaatcatctcctcgatcgcaaactccttagcgaaatcttgtaaatacgccaaaacttcaccatgactcggaaacctcctcggatctctagattccgatacaccggaacgaaccacgaacgggaagtccctgtatcccatacactcacgggggagattagttcggagagagccataaacgctcgaatgaacaacggatcgggtcgggtcaacgcttaatggatcgggttcgatatgatcggtgtatatccaggttcctccgacttgtttttgtctttcgaagacgaccaccgagtgaccttcccgtcgaagctctcgcgccgctactaatccggcggctccggcgccgataactgccgcgtggtgtgatctgattggtgataaggaaggcgccattggtttttttaacgagattcgttaacgatggtgaatatactacggcctttttataaatatgtggcccaaaaactcatgatccacacacaccacgacacaatgttaaaaaaacaaaaacaaattcctgagaaattatctaaacgctgcgttttatcg

SEQ ID NO: 98155 - protein, 136 aa, Arabidopsis thaliana; identical to SEQ ID NO: 79520
  peptide (1)..(136): Ceres Seq. ID no. 13580726
  misc_feature (1)..(136): Homolog of NCBI NO: 15222406 NR Description: short-chain dehydrogenase/reductase family protein
  misc_feature (1)..(134): Homolog of NCBI NO: 15221517 NR Description: short-chain dehydrogenase/reductase family protein
  misc_feature (1)..(134): Homolog of NCBI NO: 18410245 NR Description: short-chain dehydrogenase/reductase family [Arabidopsis thaliana] >gi|15028305|gb|AAK76629.1| putative [Arabidopsis thaliana] >gi|19310685|gb|AAL85073.1| putative
  misc_feature (1)..(134): Homolog of NCBI NO: 11250516 NR Description: oxidoreductase-like protein - Arabidopsis thaliana
  misc_feature (1)..(134): Homolog of NCBI NO: 15233243 NR Description: short-chain dehydrogenase/reductase family protein
  misc_feature (1)..(134): Homolog of NCBI NO: 15231362 NR Description: short-chain dehydrogenase/reductase family protein
  misc_feature (1)..(134): Homolog of NCBI NO: 18398539 NR Description: short-chain dehydrogenase/reductase family
  misc_feature (1)..(134): Homolog of NCBI NO: 23451057 NR Description: putative short-chain type alcohol dehydrogenase
  misc_feature (1)..(134): Homolog of NCBI NO: 13549123 NR Description: putative short-chain type alcohol dehydrogenase
  misc_feature (1)..(134): Homolog of NCBI NO: 28411870 NR Description: putative 3-ketoacyl-acyl carrier protein

SEQ ID NO: 98156 - protein, 98 aa, Arabidopsis thaliana; identical to SEQ ID NO: 79521
  peptide (1)..(98): Ceres Seq. ID no. 13580727

SEQ ID NO: 98157 - protein, 97 aa, Arabidopsis thaliana; identical to SEQ ID NO: 79522
  peptide (1)..(97): Ceres Seq. ID no. 13580728
  misc_feature (1)..(97): Homolog of NCBI NO: 15222406 NR Description: short-chain dehydrogenase/reductase family protein
  misc_feature (1)..(95): Homolog of NCBI NO: 15221517 NR Description: short-chain dehydrogenase/reductase family protein
  misc_feature (1)..(95): Homolog of NCBI NO: 18410245 NR Description: short-chain dehydrogenase/reductase family [Arabidopsis thaliana] >gi|15028305|gb|AAK76629.1| putative [Arabidopsis thaliana] >gi|19310685|gb|AAL85073.1| putative
  misc_feature (1)..(95): Homolog of NCBI NO: 11250516 NR Description: oxidoreductase-like protein - Arabidopsis thaliana
  misc_feature (1)..(95): Homolog of NCBI NO: 15233243 NR Description: short-chain dehydrogenase/reductase family protein
  misc_feature (1)..(95): Homolog of NCBI NO: 15231362 NR Description: short-chain dehydrogenase/reductase family protein
  misc_feature (1)..(95): Homolog of NCBI NO: 18398539 NR Description: short-chain dehydrogenase/reductase family
  misc_feature (1)..(95): Homolog of NCBI NO: 23451057 NR Description: putative short-chain type alcohol dehydrogenase
  misc_feature (1)..(95): Homolog of NCBI NO: 13549123 NR Description: putative short-chain type alcohol dehydrogenase
  misc_feature (1)..(95): Homolog of NCBI NO: 28411870 NR Description: putative 3-ketoacyl-acyl carrier protein

SEQ ID NO: 98158 - DNA, 3155 bp, Arabidopsis thaliana
  misc_feature (1)..(3155): Ceres Seq. ID no. 13580733
  misc_feature: MA Experiment ID: 108569 Result: Up-regulated in Transcription
  misc_feature: MA Experiment 108569 PARAMETER Experiment Name: At_0.001%_MeJA__cDNA_P Parameter: Timepoint (hr) Value: 6
  misc_feature: MA Experiment 108569 PARAMETER Experiment Name: At_0.001%_MeJA__cDNA_P Parameter: Tissue Value: Aerial
  misc_feature: MA Experiment 108569 PARAMETER Experiment Name: At_0.001%_MeJA__cDNA_P Parameter: Treatment Value: 0.001% MeJA vs. No Treatment
  misc_feature: MA Experiment ID: 108573 Result: Up-regulated in Transcription
  misc_feature: MA Experiment 108573 PARAMETER Experiment Name: At_Drought_cDNA_P Parameter: Timepoint (hr) Value: 6
  misc_feature: MA Experiment 108573 PARAMETER Experiment Name: At_Drought_cDNA_P Parameter: Tissue Value: Aerial
  misc_feature: MA Experiment 108573 PARAMETER Experiment Name: At_Drought_cDNA_P Parameter: Treatment Value: Drought vs. No Drought
  misc_feature: MA Experiment ID: 108577 Result: Down-regulated in Transcription
  misc_feature: MA Experiment 108577 PARAMETER Experiment Name: At_42deg_Heat_cDNA_P Parameter: Temperature (deg C) Value: 42 vs. 22
  misc_feature: MA Experiment 108577 PARAMETER Experiment Name: At_42deg_Heat_cDNA_P Parameter: Timepoint (hr) Value: 6
  misc_feature: MA Experiment 108577 PARAMETER Experiment Name: At_42deg_Heat_cDNA_P Parameter: Tissue Value: Aerial
  misc_feature: MA Experiment ID: 20000495 Result: Down-regulated in Transcription
  misc_feature: MA Experiment 20000495 PARAMETER Experiment Name: At_Guard_Cells_P Parameter: Harvest Date Value: 8/2/2002
  misc_feature: MA Experiment 20000495 PARAMETER Experiment Name: At_Guard_Cells_P Parameter: Organism Value: A. thaliana
  misc_feature: MA Experiment 20000495 PARAMETER Experiment Name: At_Guard_Cells_P Parameter: Tissue Value: Guard Cells vs. Leaves
  misc_feature (1434)..(1434): n is a, c, t, g, unknown, or other
  misc_feature (1436)..(1436): n is a, c, t, g, unknown, or other
  misc_feature (1438)..(1438): n is a, c, t, g, unknown, or other
atcaaaaaatagaaatttcttacttttttcaaaattcatttctccccaaaaaaaatatcttgtgaaaactgcaactgtgatccatggcggaggatatggctgccgacgaagttacggctcctcctcgtaaggttcttatcatctccgctggtgctagccactccgtcgctcttctctctggtgacattgtttgttcttggggtcgaggagaggatggacagttaggtcatggcgatgcagaggatcgaccttctccgactcagcttagcgctttagatggccaccaaattgtttccgttacctgtggtgctgatcacactgttgcttattcacaatcaggcatggaagtctacagttggggatggggtgattttgggagattaggccatggtaactcaagcgacttgtttactccgctaccaatcaaagcattgcacggtattcggatcaagcagattgcttgtggggatagtcattgtttggctgtcactatggaaggagaggtccagagttggggccgcaaccagaatggtcaacttggtctgggggacaccgaagattctctagtgcctcagaagattcaagcctttgagggaatacgaatcaaaatggttgctgctggtgcagaacacactgctgcagttacagaagatggtgacctctatggatggggctggggaagatacggaaatttgggattaggtgaccggactgaccgcttagttcctgaaagagttacctctactggtggtgagaaaatgtcaatggttgcttgtggatggcggcacacaatatcagtttcctactctggagcattgtatacttatggatggagcaaatatggacagctaggacatggagacttggaggatcaccttattcctcacaaactggaagcactgagcaacagttttatctcccagatttcgggaggttggagacatacaatggcattgacttcagatggaaaactatatggatggggttggaataagtttggacaagtaggagtcggcaataatttagatcagtgttctcctgtgcaagtgcgatttcccgatgatcagaaagtagttcaagtctcatgtggatggagacataccttggctgtcactgaaagaaataacgtgtttgcttggggtagaggtacaaatggacagctcggcattggagagtcggttgacaggaactttcccaagattatagaggcactcagcgtcgatggagcaagtggacaacatatagaatcttctaatatcgatccatcttcagggaaaagctgggtgtcgcctgcagagagatatgcagttgttcctgatgaaacgggcctaacggatggttcaagcaaaggtaatggaggtgatatcagtgttccacaaactgatgtcaagcgtgtacgaatttgagcctgagtcaattccgtttttttttccnananatctcttgttgctccttgtattagcccatcatttttttatttctcctgcgaattctccgccatagattttcttttgaatttctcctgctaactcttgagctccccaaaggcggctacatcggttttgtcacctctactcgctcacttttctccgtccaattttgcagcttttgaagatcaagaggtgaacattcggagtgatgaatcggccaaaggttcagcgtcgtgttggaaagtatgaggttggaaagacgcttggacaaggcacttttgcgaaagttcggtgtgctgttaatactgagacaggagaacgcgtggctctcaaaatacttgataaggagaaggttcttaagcataagatggctgaacagataaggagagaaatttgtactatgaagctgataaaccatccaaatgtagtgcggctgtatgaggttttggcgagcaagactaagatatatattgttctagagttcggcactggtggagagctttttgacaaaattgtacatgatgggcgcttgaaagaagagaatgcacggaaatattttcagcagcttattaatgcagttgattactgccatagcaggggaagtgtaccaccgggacttaaagccggaaaaacttgcttctagatgctcaaggaaatctgaaagtctctgattttggattgagtgcgttgtcccgacaagtcaggggtgatggtcttcttcacactgcatgcggaactccaaactatgctgctcctgaggttcttaatgatcaaggttatgacggggcaaccgcagacttgtggtcctgtggagtgatactctttgtactacttgctggctacttgcctttcgaggattctaatctcatgacgctgtataaaaagataatagctggtgaatatcattgtcctccttggctctctcctggtgctaagaacttgattgtccgaatcttggatccaaaccctatgactcgtatcacaattccagaggttctgggagatgcgtggttcaagaaaaattacaagccagctgttttcgaggagaaggaagaagccaacttggatgatgtggacgctgttttcaaagattcagaagagcatcatgtcacagaaaagaaagaggagcaaccaacttcaatgaatgcctttgagttgatatcaatgtcgagagctctggatctcgggaatttgtttgaagaagaagagggattcaagcgagaaacgagatttgctgctaaaggtgctgctaatgatttagtccaaaagattgaagaagcttctaagccgcttggtttcgatattcaaaagaaaaactataagatgagacttgaaaacgtgactgctggaaggaaaggaaacctaagagttgcaactgagatatttcaagtatcaccgtctcttcatatgatcgaagtccggaaaacgaaaggggatacactagaattccataagttctacaagaagctctcaacctcacttaacgatgtggtttggaaatctggcgagagctctggtctaagcaaataagaaaaaagactgatgattcaagtccttgctttgactatcttttatttagctttttgctgatactttctttcaagactcaattcttttaaatattagagacaaaaagccatgagattgatgactctgtagatatcgaagcatgtgcagtaagtttatgctgttcatataattgcaaacttcgattgtgttgtgtct

SEQ ID NO: 98159 - protein, 440 aa, Arabidopsis thaliana
  peptide (1)..(440): Ceres Seq. ID no. 13580734
  misc_feature (1)..(440): Homolog of NCBI NO: 15237540 NR Description: UVB-resistance protein UVR8 (gb|AAD43920.1)
  misc_feature (1)..(440): Homolog of NCBI NO: 11358913 NR Description: UVB-resistance protein UVR8 [imported] -
  misc_feature (32)..(377): Homolog of NCBI NO: 33468901 NR Description: hect (homologous to the E6-AP (UBE3A) carboxyl
  misc_feature (9)..(342): Homolog of NCBI NO: 33468901 NR Description: hect (homologous to the E6-AP (UBE3A) carboxyl
  misc_feature (20)..(375): Homolog of NCBI NO: 13548329 NR Description: putative protein [Arabidopsis thaliana]
  misc_feature (39)..(402): Homolog of NCBI NO: 33468901 NR Description: hect (homologous to the E6-AP (UBE3A) carboxyl
  misc_feature (22)..(344): Homolog of NCBI NO: 33468901 NR Description: hect (homologous to the E6-AP (UBE3A) carboxyl
  misc_feature (88)..(377): Homolog of NCBI NO: 33468901 NR Description: hect (homologous to the E6-AP (UBE3A) carboxyl
  misc_feature (15)..(83): Homolog of NCBI NO: 33468901 NR Description: hect (homologous to the E6-AP (UBE3A) carboxyl
  misc_feature (16)..(293): Homolog of NCBI NO: 33468901 NR Description: hect (homologous to the E6-AP (UBE3A) carboxyl
MAEDMAADEVTAPPRKVLIISAGASHSVALLSGDIVCSWGRGEDGQLGHGDAEDRPSPTQLSALDGHQIVSVTCGADHTVAYSQSGMEVYSWGWGDFGRLGHGNSSDLFTPLPIKALHGIRIKQIACGDSHCLAVTMEGEVQSWGRNQNGQLGLGDTEDSLVPQKIQAFEGIRIKMVAAGAEHTAAVTEDGDLYGWGWGRYGNLGLGDRTDRLVPERVTSTGGEKMSMVACGWRHTISVSYSGALYTYGWSKYGQLGHGDLEDHLIPHKLEALSNSFISQISGGWRHTMALTSDGKLYGWGWNKFGQVGVGNNLDQCSPVQVRFPDDQKVVQVSCGWRHTLAVTERNNVFAWGRGTNGQLGIGESVDRNFPKIIEALSVDGASGQHIESSNIDPSSGKSWVSPAERYAVVPDETGLTDGSSKGNGGDISVPQTDVKRVRI

SEQ ID NO: 98160 - protein, 436 aa, Arabidopsis thaliana
  peptide (1)..(436): Ceres Seq. ID no. 13580735
  misc_feature (1)..(436): Homolog of NCBI NO: 15237540 NR Description: UVB-resistance protein UVR8 (gb|AAD43920.1)
  misc_feature (1)..(436): Homolog of NCBI NO: 11358913 NR Description: UVB-resistance protein UVR8 [imported] -
  misc_feature (28)..(373): Homolog of NCBI NO: 33468901 NR Description: hect (homologous to the E6-AP (UBE3A) carboxyl
  misc_feature (5)..(338): Homolog of NCBI NO: 33468901 NR Description: hect (homologous to the E6-AP (UBE3A) carboxyl
  misc_feature (16)..(371): Homolog of NCBI NO: 13548329 NR Description: putative protein [Arabidopsis thaliana]
  misc_feature (35)..(398): Homolog of NCBI NO: 33468901 NR Description: hect (homologous to the E6-AP (UBE3A) carboxyl
  misc_feature (18)..(340): Homolog of NCBI NO: 33468901 NR Description: hect (homologous to the E6-AP (UBE3A) carboxyl
  misc_feature (84)..(373): Homolog of NCBI NO: 33468901 NR Description: hect (homologous to the E6-AP (UBE3A) carboxyl
  misc_feature (11)..(79): Homolog of NCBI NO: 33468901 NR Description: hect (homologous to the E6-AP (UBE3A) carboxyl
  misc_feature (12)..(289): Homolog of NCBI NO: 33468901 NR Description: hect (homologous to the E6-AP (UBE3A) carboxyl
MAADEVTAPPRKVLIISAGASHSVALLSGDIVCSWGRGEDGQLGHGDAEDRPSPTQLSALDGHQIVSVTCGADHTVAYSQSGMEVYSWGWGDFGRLGHGNSSDLFTPLPIKALHGIRIKQIACGDSHCLAVTMEGEVQSWGRNQNGQLGLGDTEDSLVPQKIQAFEGIRIKMVAAGAEHTAAVTEDGDLYGWGWGRYGNLGLGDRTDRLVPERVTSTGGEKMSMVACGWRHTISVSYSGALYTYGWSKYGQLGHGDLEDHLIPHKLEALSNSFISQISGGWRHTMALTSDGKLYGWGWNKFGQVGVGNNLDQCSPVQVRFPDDQKVVQVSCGWRHTLAVTERNNVFAWGRGTNGQLGIGESVDRNFPKIIEALSVDGASGQHIESSNIDPSSGKSWVSPAERYAVVPDETGLTDGSSKGNGGDISVPQTDVKRVRI

SEQ ID NO: 98161 - protein, 354 aa, Arabidopsis thaliana
  peptide (1)..(354): Ceres Seq. ID no. 13580736
  misc_feature (1)..(354): Homolog of NCBI NO: 15237540 NR Description: UVB-resistance protein UVR8 (gb|AAD43920.1)
  misc_feature (1)..(354): Homolog of NCBI NO: 11358913 NR Description: UVB-resistance protein UVR8 [imported] -
  misc_feature (1)..(291): Homolog of NCBI NO: 33468901 NR Description: hect (homologous to the E6-AP (UBE3A) carboxyl
  misc_feature (1)..(256): Homolog of NCBI NO: 33468901 NR Description: hect (homologous to the E6-AP (UBE3A) carboxyl
  misc_feature (1)..(289): Homolog of NCBI NO: 13548329 NR Description: putative protein [Arabidopsis thaliana]
  misc_feature (1)..(316): Homolog of NCBI NO: 33468901 NR Description: hect (homologous to the E6-AP (UBE3A) carboxyl
  misc_feature (1)..(258): Homolog of NCBI NO: 33468901 NR Description: hect (homologous to the E6-AP (UBE3A) carboxyl
  misc_feature (2)..(291): Homolog of NCBI NO: 33468901 NR Description: hect (homologous to the E6-AP (UBE3A) carboxyl
  misc_feature (1)..(207): Homolog of NCBI NO: 33468901 NR Description: hect (homologous to the E6-AP (UBE3A) carboxyl
  misc_feature (1)..(259): Homolog of NCBI NO: 30678589 NR Description: expressed protein [Arabidopsis thaliana]
MEVYSWGWGDFGRLGHGNSSDLFTPLPIKALHGIRIKQIACGDSHCLAVTMEGEVQSWGRNQNGQLGLGDTEDSLVPQKIQAFEGIRIKMVAAGAEHTAAVTEDGDLYGWGWGRYGNLGLGDRTDRLVPERVTSTGGEKMSMVACGWRHTISVSYSGALYTYGWSKYGQLGHGDLEDHLIPHKLEALSNSFISQISGGWRHTMALTSDGKLYGWGWNKFGQVGVGNNLDQCSPVQVRFPDDQKVVQVSCGWRHTLAVTERNNVFAWGRGTNGQLGIGESVDRNFPKIIEALSVDGASGQHIESSNIDPSSGKSWVSPAERYAVVPDETGLTDGSSKGNGGDISVPQTDVKRVRI

SEQ ID NO: 98162 - DNA, 3309 bp, Arabidopsis thaliana
  misc_feature (1)..(3309): Ceres Seq. ID no. 13580737
  misc_feature: MA Experiment ID: 20000180 Result: Down-regulated in Transcription
  misc_feature: MA Experiment 20000180 PARAMETER Experiment Name: At_Germinating_Seeds_P Parameter: Age (hr) Value: 24 vs. 0
  misc_feature: MA Experiment 20000180 PARAMETER Experiment Name: At_Germinating_Seeds_P Parameter: Tissue Value: Germinating Seeds
  misc_feature: MA Experiment ID: 20000182 Result: Up-regulated in Transcription
  misc_feature: MA Experiment 20000182 PARAMETER Experiment Name: At_2mM_SA_P Parameter: Age (day) Value: 14
  misc_feature: MA Experiment 20000182 PARAMETER Experiment Name: At_2mM_SA_P Parameter: Organism Value: A. thaliana
  misc_feature: MA Experiment 20000182 PARAMETER Experiment Name: At_2mM_SA_P Parameter: Plant Line Value: WS
  misc_feature: MA Experiment 20000182 PARAMETER Experiment Name: At_2mM_SA_P Parameter: Timepoint (hr) Value: 6
  misc_feature: MA Experiment 20000182 PARAMETER Experiment Name: At_2mM_SA_P Parameter: Tissue Value: Aerial
  misc_feature: MA Experiment 20000182 PARAMETER Experiment Name: At_2mM_SA_P Parameter: Treatment Value: 2mM SA vs. No Treatment
  misc_feature: MA Experiment ID: 20000184 Result: Down-regulated in Transcription
  misc_feature: MA Experiment 20000184 PARAMETER Experiment Name: At_Shoots__P Parameter: Age (day) Value: 7
  misc_feature: MA Experiment 20000184 PARAMETER Experiment Name: At_Shoots__P Parameter: Tissue Value: Shoots vs. Whole Plant
  misc_feature: MA Experiment ID: 20001905 Result: Down-regulated in Transcription
  misc_feature: MA Experiment 20001905 PARAMETER Experiment Name: At_Drought_Reproduction_P Parameter: Age (day) Value: 40
  misc_feature: MA Experiment 20001905 PARAMETER Experiment Name: At_Drought_Reproduction_P Parameter: Organism Value: A. thaliana
  misc_feature: MA Experiment 20001905 PARAMETER Experiment Name: At_Drought_Reproduction_P Parameter: Plant Line Value: WS
  misc_feature: MA Experiment 20001905 PARAMETER Experiment Name: At_Drought_Reproduction_P Parameter: Timepoint (day) Value: 10
  misc_feature: MA Experiment 20001905 PARAMETER Experiment Name: At_Drought_Reproduction_P Parameter: Tissue Value: Rosettes
  misc_feature: MA Experiment 20001905 PARAMETER Experiment Name: At_Drought_Reproduction_P Parameter: Treatment Value: Drought vs. No Drought
atggcgatgctttctactgcttccgtttcggggagcgtcgaccttcctcgaggaaccatgaaggttgactcgtctgcgtctccggaggtcgtatccgatctcccaccatcttccccaaagggctcacctgatcgccatgacccttccacttcttctccgagccccagtcgtggtggtgacaatcagtctgaagtcatatccaagagtgaagagtatcggcaattgtttcggcttccagctgacgaaatccttgttcaagattttaactgtgcttgtcaggagagtattcttatgcagggtcatatgtacctcttcatccattatatctgcttttactccaacatctttggttatgagaccaagaaaattatcccatttgctgaaatatcttgtgttaaacgagccaagactgctggtatttttcctaatgccattgagattttagctggagggaagaagtacttttttgcatcgtttctttcccgcgatgaagctttcaagcttatccatgatggatggttggaatatggtagtgctgtcaaatcagaaggcgagattctggtgaccgaaccgcaggtaagcgatggagttgttaaaagggcacgcagttccatggatttggccaatgaactagatattccagtaagggatgaaactcttcatctttccagcagttccagtcttcctgtcattagtcagaatggcgttccaccttcatccgttcagcggcacgctgaaccagatgtagatgttgtggcggccaatactttcaactggaagcctgaagatacagatgcacctaaattgtcatctgactttacaaaggtagcagaggcaaagttttcgattccagtagaagagttctttagattgtttttttcagatggtgctgtcagttttgttgaatctttccataaaaattgtggagacaaagagtttaggtgtacctcttggcaacctcatgaaaagcttggacacacccgcaatgtctcatttcaacatccgataaaaatttattttggtgcaaagtttggtggctgccaggagtcacagaaatttcggatgtacagaaatagccatctggttattgaaacatcacacagatcagcgatgtgccttatgcagattattttacggtagagggagtctgggacttgaaaagagattgcagagactcggtagaaggtggatttgcccctatatttccagacatctgttatcacttaacccattacaagcccgctgccgcagatattcccgtggcgagcgataacccagcgcactatgcggatgccattcgttataatgctcgaacgcctctgcaaggttctttgctgccgttaacccgtctggtttgggcatgatactgatgtagtcacgctttatcgttttcacgaagctctctgctattccgttactctccggactccgcaccgccgtgttcttcggttcaagtcccaacatccgggcgaactggcgtgtttcattagcccggtagcatgaaccattatccgtcagccactccactggagacgacggaagatcgttgccgaagcggcgttccaccgctcccagcatgacgtcctgtactgtttcactgttgaagccgccggtagtgaccgcccagtgcagtgcctcacgatcacagcagtccagcgcgaacgtgacacgcagtctctctccgttatcacagcagaactcgaacccgtcagagcaccatcgctgattgctttctttcacggccactctgcctgtatgtgcccgtttcgatggcggtacagcaggttttcgctcaagcaacagcgcattctggcgcatgatccggtaaacacgtttggcattgatcgcaggcataccatcaagttctgcctgtctgcgaagcagcgcccatacccgacgataaccatacgttggcagctctccgataacatggtgtatacggagaagcacatccgtatcatcagtgtgacgactgcggcggccatccatccagtcatcggttcgtctgagaatgacgtgcaactgcgcacgcgacacccggagacaacggctgactaagcttactccccatccccgggcaataagggcgcgtgcgctatccacttttttgcccgtccatattcaacggcttctttgaggagttcattttccatcgttttcttgccgagcaggcgctggagttctttaatctgcttcatggcggcagcaagttcagaggcaggaacaacctgttctccggcggcgacagcagtaagacttccttcctggtattgcttacgccagagaaataactggctggctgctacaccatgttgccgggcaacgagggagaccgtcatccccggttcaaagctctgctgaacaattgcgatcttttcctgtgtggtacgccgtctgcgtttctccggccctaagacatcaatcatctgttctccaatgactagtctaaaaactagtattaagactatcacttatttaagtgatattggttgtctggagattcagggggccagtctagaaggttgtatattggatgtttatgtcaatgtggccttctctaaaagaacagtgtggaaagggaaaatagtgcagtctactttagaagaatgtagagaagcttatgcacattggataagaatggcacatgaactgttgaagcagaagaagctggagaaccaagaagggaataagttgattgaggatggtgaaccgctagcagcaagggaagaaagagtatctgaatgtgacgaggaggggaaggtggaaatggtgggcgaaggggtagttaaaaaaagcttaaaggaagcatgggtgaatctgacttcatttgtgaagaggcaaagcgggacaaggcaggttatagtattagcgtttgcagtaatcttactgatgcaggtgacgatagtggtgctactgaaaaaaggaggaggggggcaagtggagtatcatgagaggtacgacgagtacagtgtaaacggggagactttggggtggttagagaagagaatgcatttcctgagggaagagatgatgatggttgaggatcgtttgcagaggatgcgacaagaccatgccgccttgaaggctcagttccaccatttggaacgcctcctccgccgcaacaaacagtaaatttgctacaccctactctctgtttgtgcagaatgcggatggatatatgcatgtatgtatgtaatgtattatcggacgttactttgcaaagttgttgttatacctacctactcatatgaatatgagcagagactctgttaaacgaaatgatgtaatcaattgtattcgtgttgcacc

SEQ ID NO: 98163 - protein, 379 aa, Arabidopsis thaliana
  peptide (1)..(379): Ceres Seq. ID no. 13580738
  misc_feature (70)..(136): Pfam Name: GRAM domain Pfam Description: GRAM domain
  misc_feature (20)..(329): Homolog of NCBI NO: 15217621 NR Description: expressed protein [Arabidopsis thaliana]
  misc_feature (341)..(366): Homolog of NCBI NO: 15217621 NR Description: expressed protein [Arabidopsis thaliana]
  misc_feature (1)..(379): Homolog of NCBI NO: 18086353 NR Description: At1g02120/T7I23_26 [Arabidopsis thaliana]
  misc_feature (1)..(82): Homolog of NCBI NO: 15217621 NR Description: expressed protein [Arabidopsis thaliana]
  misc_feature (37)..(286): Homolog of NCBI NO: 22760671 NR Description: unnamed protein product [Homo sapiens]
  misc_feature (68)..(286): Homolog of NCBI NO: 7959333 NR Description: KIAA1533 protein [Homo sapiens]
  misc_feature (68)..(286): Homolog of NCBI NO: 24308247 NR Description: KIAA1533 protein [Homo sapiens]
  misc_feature (68)..(173): Homolog of NCBI NO: 26350799 NR Description: unnamed protein product [Mus musculus]
  misc_feature (68)..(173): Homolog of NCBI NO: 26665873 NR Description: DNA segment, Chr 7, Brigham & Women's Genetics expressed [Mus musculus] >gi|17391321|gb|AAH18554.1| RIKEN cDNA
  misc_feature (68)..(173): Homolog of NCBI NO: 34855719 NR Description: similar to RIKEN cDNA 1300003M23 [Rattus
MAMLSTASVSGSVDLPRGTMKVDSSASPEVVSDLPPSSPKGSPDRHDPSTSSPSPSRGGDNQSEVISKSEEYRQLFRLPADEILVQDFNCACQESILMQGHMYLFIHYICFYSNIFGYETKKIIPFAEISCVKRAKTAGIFPNAIEILAGGKKYFFASFLSRDEAFKLIHDGWLEYGSAVKSEGEILVTEPQVSDGVVKRARSSMDLANELDIPVRDETLHLSSSSSLPVISQNGVPPSSVQRHAEPDVDVVAANTFNWKPEDTDAPKLSSDFTKVAEAKFSIPVEEFFRLFFSDGAVSFVESFHKNCGDKEFRCTSWQPHEKLGHTRNVSFQHPIKIYFGAKFGGCQESQKFRMYRNSHLVIETSHRSAMCLMQIILR

SEQ ID NO: 98164 - protein, 377 aa, Arabidopsis thaliana
  peptide (1)..(377): Ceres Seq. ID no. 13580739
  misc_feature (68)..(134): Pfam Name: GRAM domain Pfam Description: GRAM domain
  misc_feature (18)..(327): Homolog of NCBI NO: 15217621 NR Description: expressed protein [Arabidopsis thaliana]
  misc_feature (339)..(364): Homolog of NCBI NO: 15217621 NR Description: expressed protein [Arabidopsis thaliana]
  misc_feature (1)..(377): Homolog of NCBI NO: 18086353 NR Description: At1g02120/T7I23_26 [Arabidopsis thaliana]
  misc_feature (1)..(80): Homolog of NCBI NO: 15217621 NR Description: expressed protein [Arabidopsis thaliana]
  misc_feature (35)..(284): Homolog of NCBI NO: 22760671 NR Description: unnamed protein product [Homo sapiens]
  misc_feature (66)..(284): Homolog of NCBI NO: 7959333 NR Description: KIAA1533 protein [Homo sapiens]
  misc_feature (66)..(284): Homolog of NCBI NO: 24308247 NR Description: KIAA1533 protein [Homo sapiens]
  misc_feature (66)..(171): Homolog of NCBI NO: 26350799 NR Description: unnamed protein product [Mus musculus]
  misc_feature (66)..(171): Homolog of NCBI NO: 26665873 NR Description: DNA segment, Chr 7, Brigham & Women's Genetics expressed [Mus musculus] >gi|17391321|gb|AAH18554.1| RIKEN cDNA
  misc_feature (66)..(171): Homolog of NCBI NO: 34855719 NR Description: similar to RIKEN cDNA 1300003M23 [Rattus
MLSTASVSGSVDLPRGTMKVDSSASPEVVSDLPPSSPKGSPDRHDPSTSSPSPSRGGDNQSEVISKSEEYRQLFRLPADEILVQDFNCACQESILMQGHMYLFIHYICFYSNIFGYETKKIIPFAEISCVKRAKTAGIFPNAIEILAGGKKYFFASFLSRDEAFKLIHDGWLEYGSAVKSEGEILVTEPQVSDGVVKRARSSMDLANELDIPVRDETLHLSSSSSLPVISQNGVPPSSVQRHAEPDVDVVAANTFNWKPEDTDAPKLSSDFTKVAEAKFSIPVEEFFRLFFSDGAVSFVESFHKNCGDKEFRCTSWQPHEKLGHTRNVSFQHPIKIYFGAKFGGCQESQKFRMYRNSHLVIETSHRSAMCLMQIILR

SEQ ID NO: 98165 - protein, 360 aa, Arabidopsis thaliana
  peptide (1)..(360): Ceres Seq. ID no. 13580740
  misc_feature (51)..(117): Pfam Name: GRAM domain Pfam Description: GRAM domain
  misc_feature (1)..(310): Homolog of NCBI NO: 15217621 NR Description: expressed protein [Arabidopsis thaliana]
  misc_feature (322)..(347): Homolog of NCBI NO: 15217621 NR Description: expressed protein [Arabidopsis thaliana]
  misc_feature (1)..(360): Homolog of NCBI NO: 18086353 NR Description: At1g02120/T7I23_26 [Arabidopsis thaliana]
  misc_feature (1)..(63): Homolog of NCBI NO: 15217621 NR Description: expressed protein [Arabidopsis thaliana]
  misc_feature (18)..(267): Homolog of NCBI NO: 22760671 NR Description: unnamed protein product [Homo sapiens]
  misc_feature (49)..(267): Homolog of NCBI NO: 7959333 NR Description: KIAA1533 protein [Homo sapiens]
  misc_feature (49)..(267): Homolog of NCBI NO: 24308247 NR Description: KIAA1533 protein [Homo sapiens]
  misc_feature (49)..(154): Homolog of NCBI NO: 26350799 NR Description: unnamed protein product [Mus musculus]
  misc_feature (49)..(154): Homolog of NCBI NO: 26665873 NR Description: DNA segment, Chr 7, Brigham & Women's Genetics expressed [Mus musculus] >gi|17391321|gb|AAH18554.1| RIKEN cDNA
  misc_feature (49)..(154): Homolog of NCBI NO: 34855719 NR Description: similar to RIKEN cDNA 1300003M23 [Rattus
MKVDSSASPEVVSDLPPSSPKGSPDRHDPSTSSPSPSRGGDNQSEVISKSEEYRQLFRLPADEILVQDFNCACQESILMQGHMYLFIHYICFYSNIFGYETKKIIPFAEISCVKRAKTAGIFPNAIEILAGGKKYFFASFLSRDEAFKLIHDGWLEYGSAVKSEGEILVTEPQVSDGVVKRARSSMDLANELDIPVRDETLHLSSSSSLPVISQNGVPPSSVQRHAEPDVDVVAANTFNWKPEDTDAPKLSSDFTKVAEAKFSIPVEEFFRLFFSDGAVSFVESFHKNCGDKEFRCTSWQPHEKLGHTRNVSFQHPIKIYFGAKFGGCQESQKFRMYRNSHLVIETSHRSAMCLMQIILR

SEQ ID NO: 98166 - DNA, 1492 bp, Arabidopsis thaliana
  misc_feature (1)..(1492): Ceres Seq. ID no. 13580741
  misc_feature: MA Experiment ID: 108433 Result: Down-regulated in Transcription
  misc_feature: MA Experiment 108433 PARAMETER Experiment Name: At_rhl_Mutant2_cDNA_P Parameter: Age (day) Value: 7
  misc_feature: MA Experiment 108433 PARAMETER Experiment Name: At_rhl_Mutant2_cDNA_P Parameter: Organism Value: A. thaliana
  misc_feature: MA Experiment 108433 PARAMETER Experiment Name: At_rhl_Mutant2_cDNA_P Parameter: Plant Line Value: rhl Mutant vs. wt landsburg
  misc_feature: MA Experiment 108433 PARAMETER Experiment Name: At_rhl_Mutant2_cDNA_P Parameter: Tissue Value: Roots
  misc_feature: MA Experiment ID: 20000315 Result: Down-regulated in Transcription
  misc_feature: MA Experiment 20000315 PARAMETER Experiment Name: At_14day_Shoots-Roots_Sub_P Parameter: Age (day) Value: 14
  misc_feature: MA Experiment 20000315 PARAMETER Experiment Name: At_14day_Shoots-Roots_Sub_P Parameter: Organism Value: A. thaliana
  misc_feature: MA Experiment 20000315 PARAMETER Experiment Name: At_14day_Shoots-Roots_Sub_P Parameter: Plant Line Value: WS
  misc_feature: MA Experiment 20000315 PARAMETER Experiment Name: At_14day_Shoots-Roots_Sub_P Parameter: Tissue Value: Shoots vs. Whole Plant
  misc_feature: MA Experiment ID: 20000328 Result: Down-regulated in Transcription
  misc_feature: MA Experiment 20000328 PARAMETER Experiment Name: At_42deg_Heat_Sub_P Parameter: Age (day) Value: 14
  misc_feature: MA Experiment 20000328 PARAMETER Experiment Name: At_42deg_Heat_Sub_P Parameter: Organism Value: A. thaliana
  misc_feature: MA Experiment 20000328 PARAMETER Experiment Name: At_42deg_Heat_Sub_P Parameter: Plant Line Value: WS
  misc_feature: MA Experiment 20000328 PARAMETER Experiment Name: At_42deg_Heat_Sub_P Parameter: Temperature (deg C) Value: 42 vs. 22
  misc_feature: MA Experiment 20000328 PARAMETER Experiment Name: At_42deg_Heat_Sub_P Parameter: Timepoint (hr) Value: 6
  misc_feature: MA Experiment 20000328 PARAMETER Experiment Name: At_42deg_Heat_Sub_P Parameter: Tissue Value: Aerial
aagataacagaaaaacaaaaacaaaaatttctgctttgaagaagaagagtcgatccataatcgccactttcagatttccagattctggggaaacatctctaaactcttcaacgatggcgactgagaatctcaccgataagaatgttgttttcagaaagctgaaatcaaaatccgagaacaaggtttgctttgattgtagtgcgaagaatccaacatgggcttctgttccttatgggatcttcctatgcatcgattgttctgctgttcatcgaagtctaggtgttcatatcagcttcgtcaggtcaacgaacttagactcgtggagtcctgagcagctaagaacaatgatgtttggagggaacaatcgagctcaggtgttttttaagcaacatggatggaatgatggtggtaagattgaggctaagtatacttcaagagctgctgatatgtatagacagactcttgctaaagaagttgctaaagccatggctgaagaaactgttttaccgtcgttatcctctgttgctacttctcagccagtggaatcatctgaaaatgggtttacttctgaatctccgaaagagagttctttgaagcaagaagcagctgttgtctcttcaccaaaagcttctcagaaagttgttgctagtacgtttaagaaacctcttgtttcgcgaaagtctgggaagactggtggtcttggtgctcgtaagcttactactaagtcaaaggataacctctatgagcagaagcctgaagaacctgtacctgtgattcctgctgcttctccaaccaatgacacatcagcagctggatcatcatttgcctctcgatttgagtactttgatgatgagcaatctggtgggcaaagtggcacacgggtgcttagccatgttgctccaccaaagtcatcaaatttctttaatgaatttggaatggacagtgctttccccaagaagtcaagctcaagctcatccaaagctcaggttgaagaaacagatgaagcaagaaagaagttttcaaacgccaaatcgatttcctctgcccaatttttcggaaatcagaacagagatgccgatcttgactcaaaagctacccttcagaagttctcgggttcagcagctatttcaagttctgatctttttggccacggaccagatgattccaacatcgatatcactgcaagcgatctcatcaaccgaatttctttccaggcgcagcaagatatgtcatctattgctaacttagctgaggaaacaaagaataagctgggaacatttgcctctagtatattcagtgatcttcaggatagaatgctgtaagaaacatacaaaggatcttgtcttttgatttacagagaacaaattgttggatataaatgtcatttttatttttggtttgactttgtagttgaaagagtgatttttgaggtaaattgttaaatgtggaatttgataatttgatgtggatatggtagaatatgttacagtat

SEQ ID NO: 98167 - protein, 439 aa, Arabidopsis thaliana
  peptide (1)..(439): Ceres Seq. ID no. 13580742
  misc_feature (47)..(163): Pfam Name: Putative GTPase activating protein for Arf Pfam Description: Putative GTPase activating protein for Arf
  misc_feature (38)..(439): Homolog of NCBI NO: 15237500 NR Description: ARF GTPase-activating domain-containing protein
  misc_feature (36)..(439): Homolog of NCBI NO: 7487780 NR Description: hypothetical protein T6K21.70 - Arabidopsis >gi|2894598|emb|CAA17132.1| putative protein [Arabidopsis >gi|7268541|emb|CAB78791.1| putative protein [Arabidopsis
  misc_feature (36)..(439): Homolog of NCBI NO: 18414983 NR Description: ARF GTPase-activating domain-containing protein thaliana] >gi|24030421|gb|AAN41368.1| unknown protein
  misc_feature (36)..(439): Homolog of NCBI NO: 13430530 NR Description: unknown protein [Arabidopsis thaliana]
  misc_feature (38)..(439): Homolog of NCBI NO: 37537094 NR Description: unknown protein [Oryza sativa (japonica
  misc_feature (38)..(431): Homolog of NCBI NO: 18403775 NR Description: ARF GTPase-activating domain-containing protein
  misc_feature (38)..(439): Homolog of NCBI NO: 29126345 NR Description: putative zinc finger protein [Oryza sativa
  misc_feature (188)..(437): Homolog of NCBI NO: 37362182 NR Description: ADP-ribosylation factor GTPase activating protein
  misc_feature (47)..(191): Homolog of NCBI NO: 37362182 NR Description: ADP-ribosylation factor GTPase activating protein
  misc_feature (38)..(202): Homolog of NCBI NO: 27695479 NR Description: Similar to ADP-ribosylation factor GTPase
DNRKTKTKISALKKKSRSIIATFRFPDSGETSLNSSTMATENLTDKNVVFRKLKSKSENKVCFDCSAKNPTWASVPYGIFLCIDCSAVHRSLGVHISFVRSTNLDSWSPEQLRTMMFGGNNRAQVFFKQHGWNDGGKIEAKYTSRAADMYRQTLAKEVAKAMAEETVLPSLSSVATSQPVESSENGFTSESPKESSLKQEAAVVSSPKASQKVVASTFKKPLVSRKSGKTGGLGARKLTTKSKDNLYEQKPEEPVPVIPAASPTNDTSAAGSSFASRFEYFDDEQSGGQSGTRVLSHVAPPKSSNFFNEFGMDSAFPKKSSSSSSKAQVEETDEARKKFSNAKSISSAQFFGNQNRDADLDSKATLQKFSGSAAISSSDLFGHGPDDSNIDITASDLINRISFQAQQDMSSIANLAEETKNKLGTFASSIFSDLQDRML

SEQ ID NO: 98168 - protein, 402 aa, Arabidopsis thaliana; identical to SEQ ID NO: 78261
  peptide (1)..(402): Ceres Seq. ID no. 13580743
  misc_feature (10)..(126): Pfam Name: Putative GTPase activating protein for Arf Pfam Description: Putative GTPase activating protein for Arf
  misc_feature (1)..(402): Homolog of NCBI NO: 15237500 NR Description: ARF GTPase-activating domain-containing protein
  misc_feature (1)..(402): Homolog of NCBI NO: 7487780 NR Description: hypothetical protein T6K21.70 - Arabidopsis >gi|2894598|emb|CAA17132.1| putative protein [Arabidopsis >gi|7268541|emb|CAB78791.1| putative protein [Arabidopsis
  misc_feature (1)..(402): Homolog of NCBI NO: 18414983 NR Description: ARF GTPase-activating domain-containing protein thaliana] >gi|24030421|gb|AAN41368.1| unknown protein
  misc_feature (1)..(402): Homolog of NCBI NO: 13430530 NR Description: unknown protein [Arabidopsis thaliana]
  misc_feature (1)..(402): Homolog of NCBI NO: 37537094 NR Description: unknown protein [Oryza sativa (japonica
  misc_feature (1)..(394): Homolog of NCBI NO: 18403775 NR Description: ARF GTPase-activating domain-containing protein
  misc_feature (1)..(402): Homolog of NCBI NO: 29126345 NR Description: putative zinc finger protein [Oryza sativa
  misc_feature (151)..(400): Homolog of NCBI NO: 37362182 NR Description: ADP-ribosylation factor GTPase activating protein
  misc_feature (10)..(154): Homolog of NCBI NO: 37362182 NR Description: ADP-ribosylation factor GTPase activating protein
  misc_feature (1)..(165): Homolog of NCBI NO: 27695479 NR Description: Similar to ADP-ribosylation factor GTPase

SEQ ID NO: 98169 - protein, 325 aa, Arabidopsis thaliana; identical to SEQ ID NO: 78262
  peptide (1)..(325): Ceres Seq. ID no. 13580744
  misc_feature (1)..(325): Homolog of NCBI NO: 15237500 NR Description: ARF GTPase-activating domain-containing protein
  misc_feature (1)..(325): Homolog of NCBI NO: 7487780 NR Description: hypothetical protein T6K21.70 - Arabidopsis >gi|2894598|emb|CAA17132.1| putative protein [Arabidopsis >gi|7268541|emb|CAB78791.1| putative protein [Arabidopsis
  misc_feature (1)..(325): Homolog of NCBI NO: 18414983 NR Description: ARF GTPase-activating domain-containing protein thaliana] >gi|24030421|gb|AAN41368.1| unknown protein
  misc_feature (1)..(325): Homolog of NCBI NO: 13430530 NR Description: unknown protein [Arabidopsis thaliana]
  misc_feature (1)..(325): Homolog of NCBI NO: 37537094 NR Description: unknown protein [Oryza sativa (japonica
  misc_feature (1)..(317): Homolog of NCBI NO: 18403775 NR Description: ARF GTPase-activating domain-containing protein
  misc_feature (1)..(325): Homolog of NCBI NO: 29126345 NR Description: putative zinc finger protein [Oryza sativa
  misc_feature (74)..(323): Homolog of NCBI NO: 37362182 NR Description: ADP-ribosylation factor GTPase activating protein
  misc_feature (1)..(77): Homolog of NCBI NO: 37362182 NR Description: ADP-ribosylation factor GTPase activating protein
  misc_feature (1)..(88): Homolog of NCBI NO: 27695479 NR Description: Similar to ADP-ribosylation factor GTPase

SEQ ID NO: 98170 - DNA, 1008 bp, Arabidopsis thaliana
  misc_feature (1)..(1008): Ceres Seq. ID no. 13580749
  misc_feature: MA Experiment ID: 108573 Result: Up-regulated in Transcription
  misc_feature: MA Experiment 108573 PARAMETER Experiment Name: At_Drought_cDNA_P Parameter: Timepoint (hr) Value: 6
  misc_feature: MA Experiment 108573 PARAMETER Experiment Name: At_Drought_cDNA_P Parameter: Tissue Value: Aerial
  misc_feature: MA Experiment 108573 PARAMETER Experiment Name: At_Drought_cDNA_P Parameter: Treatment Value: Drought vs. No Drought
  misc_feature: MA Experiment ID: 20000224 Result: Up-regulated in Transcription
ataagcttgagaacacttgaaaagacaagattcgcgagttcttcgttctgcctttttttttttttttgtgtgttcgagagatgtctgcctttgaagacgattccttcgtcatactcaacgatgatgcgtctgagtctgttccagtctcaggctcttttgacgccactgattctttctcagctttcgacggctcactccaagtcgaggactccgtcgacgatgtttttgcagcgccgtcttctgactacggtgcttactccaacggtgacggcatcttcggatccaacggggatcacgacggtcctatcttgccaccaccgtcggagatggaatcagatgagggatttgctcttagagaatggagaagacaaaatgcaattcaacttgaggagaaggagaagagagaaaaggaattgttgaagcaaattattgaggaagctgatcaatacaaagaagagtttcataagaagattgaagtaacttgtgaaaacaacaaagcagctaacagagagaaggaaaagctgtatctggagaaccaagagaagttctacgcggaatccagcaagaattactggaaggcaatagcagagctagttcctaaagaagttccaacaatagagaaaaggagaggaaaaaaagagcaacaagatcctaagaagccaacagtctctgtgattcaaggtccaaagcccggtaagccaaccgatctaacaagaatgagacaaatattggtgaagctcaaacacaacccaccttctcacctgaaactcacttctcaacctccatcggaggaggcggctgctcctccaaagaatgttcccgaaaccaagcccactgaggcagttactgctgcttaaaaacctcctttgttttcttattcgttgcttacatctgtgtgaattcagtctttgcatttcattatgtgttataaacagctgagagattttatggttcatgtgtgttattaacataattatgtcatattggaatgataactttttatgtttt

SEQ ID NO: 98171 - protein, 258 aa, Arabidopsis thaliana
  peptide (1)..(258): Ceres Seq. ID no. 13580750
  misc_feature (2)..(226): Pfam Name: Clathrin light chain Pfam Description: Clathrin light chain
  misc_feature (1)..(258): Homolog of NCBI NO: 18405251 NR Description: expressed protein [Arabidopsis thaliana]
  misc_feature (1)..(258): Homolog of NCBI NO: 21593842 NR Description: unknown [Arabidopsis thaliana]
  misc_feature (23)..(248): Homolog of NCBI NO: 18409442 NR Description: expressed protein [Arabidopsis thaliana]
  misc_feature (36)..(254): Homolog of NCBI NO: 21536711 NR Description: unknown [Arabidopsis thaliana]
  misc_feature (36)..(239): Homolog of NCBI NO: 18399468 NR Description: expressed protein [Arabidopsis thaliana]
  misc_feature (23)..(248): Homolog of NCBI NO: 11291712 NR Description: hypothetical protein [imported] - Arabidopsis
  misc_feature (83)..(248): Homolog of NCBI NO: 21617999 NR Description: unknown [Arabidopsis thaliana]
  misc_feature (63)..(258): Homolog of NCBI NO: 34394059 NR Description: hypothetical protein [Oryza sativa (japonica
MSAFEDDSFVILNDDASESVPVSGSFDATDSFSAFDGSLQVEDSVDDVFAAPSSDYGAYSNGDGIFGSNGDHDGPILPPPSEMESDEGFALREWRRQNAIQLEEKEKREKELLKQIIEEADQYKEEFHKKIEVTCENNKAANREKEKLYLENQEKFYAESSKNYWKAIAELVPKEVPTIEKRRGKKEQQDPKKPTVSVIQGPKPGKPTDLTRMRQILVKLKHNPPSHLKLTSQPPSEEAAAPPKNVPETKPTEAVTAA

SEQ ID NO: 98172 - protein, 176 aa, Arabidopsis thaliana; identical to SEQ ID NO: 27014
  peptide (1)..(176): Ceres Seq. ID no. 13580751
  misc_feature (1)..(144): Pfam Name: Clathrin light chain Pfam Description: Clathrin light chain
  misc_feature (1)..(176): Homolog of NCBI NO: 18405251 NR Description: expressed protein [Arabidopsis thaliana]
  misc_feature (1)..(176): Homolog of NCBI NO: 21593842 NR Description: unknown [Arabidopsis thaliana]
  misc_feature (1)..(166): Homolog of NCBI NO: 18409442 NR Description: expressed protein [Arabidopsis thaliana]
  misc_feature (1)..(172): Homolog of NCBI NO: 21536711 NR Description: unknown [Arabidopsis thaliana]
  misc_feature (1)..(157): Homolog of NCBI NO: 18399468 NR Description: expressed protein [Arabidopsis thaliana]
  misc_feature (1)..(166): Homolog of NCBI NO: 11291712 NR Description: hypothetical protein [imported] - Arabidopsis
  misc_feature (1)..(166): Homolog of NCBI NO: 21617999 NR Description: unknown [Arabidopsis thaliana]
  misc_feature (1)..(176): Homolog of NCBI NO: 34394059 NR Description: hypothetical protein [Oryza sativa (japonica

SEQ ID NO: 98173 - protein, 139 aa, Arabidopsis thaliana
  peptide (1)..(139): Ceres Seq. ID no. 13580752
ISLRTLEKTRFASSSFCLFFFFCVFERCLPLKTIPSSYSTMMRLSLFQSQALLTPLILSQLSTAHSKSRTPSTMFLQRRLLTTVLTPTVTASSDPTGITTVLSCHHRRRWNQMRDLLLENGEDKMQFNLRRRRREKRNC

SEQ ID NO: 98174 - DNA, 1814 bp, Arabidopsis thaliana
  misc_feature (1)..(1814): Ceres Seq. ID no. 13580753
  misc_feature: MA Experiment ID: 20000180 Result: Down-regulated in Transcription
  misc_feature: MA Experiment 20000180 PARAMETER Experiment Name: At_Germinating_Seeds_P Parameter: Age (hr) Value: 24 vs. 0
  misc_feature: MA Experiment 20000180 PARAMETER Experiment Name: At_Germinating_Seeds_P Parameter: Tissue Value: Germinating Seeds
  misc_feature: MA Experiment ID: 20000185 Result: Down-regulated in Transcription
  misc_feature: MA Experiment 20000185 PARAMETER Experiment Name: At_Roots__P Parameter: Age (day) Value: 7 vs. 21
  misc_feature: MA Experiment 20000185 PARAMETER Experiment Name: At_Roots__P Parameter: Organism Value: A. thaliana
  misc_feature: MA Experiment 20000185 PARAMETER Experiment Name: At_Roots__P Parameter: Tissue Value: Roots vs. Whole Plant
  misc_feature: MA Experiment ID: 20000264 Result: Down-regulated in Transcription
  misc_feature: MA Experiment 20000264 PARAMETER Experiment Name: At_Open_Flower_P Parameter: Age (day) Value: 21
  misc_feature: MA Experiment 20000264 PARAMETER Experiment Name: At_Open_Flower_P Parameter: Plant Line Value: WS
  misc_feature: MA Experiment 20000264 PARAMETER Experiment Name: At_Open_Flower_P Parameter: Tissue Value: Open Flower vs. Whole Plant
  misc_feature: MA Experiment ID: 20000438 Result: Up-regulated in Transcription
  misc_feature: MA Experiment 20000438 PARAMETER Experiment Name: At_Shoots__P Parameter: Age (day) Value: 14
  misc_feature: MA Experiment 20000438 PARAMETER Experiment Name: At_Shoots__P Parameter: Tissue Value: Shoots vs. Whole Plant
atgcatcattttgtccctgacttcgataccgatgatgattatgtcaacaaccataattcttctttgaatcatcttcctagaaaatccattactactatgggtgaagatgatgatcttatggagcttttatggcagaacggtcaagttgttgttcaaaaccagagacttcacaccaagaaaccttcttcttctccaccgaagcttcttccttctatggatcctcagcagcaaccttcttcagatcagaatctttttattcaagaagatgaaatgacttcttggcttcattatcctctccgtgacgatgatttctgctcagatcttctcttctccgccgcacctactgcgacggctaccgcgacggtgagtcaagtcaccgccgcgagaccgccagtatcttcgacgaatgagtcgaggccgccggtgaggaacttcatgaatttctcgaggctgagaggggattttaataacggtagaggtggtgaatctggaccgttgctttcgaaggcggttgtgagagaatctacgcaggtaagtcctagcgcaacaccgtcggcggcggcgagtgaatccggtttaacacggcggacggatggtactgacagttccgccgtagctggaggcggcgcgtataatcggaagggaaaagcagtggctatgacggcgccggcgatcgagataaccggtacatcgtcatctgtagtgtcaaagagcgaaatcgaaccggagaagacgaacgtcgatgataggaaacgaaaagagagagaagccaccactactgatgaaactgaatcccgtagcgaggaaacaaaacaagcacgtgtatcaacaacatctaccaagagatctcgtgctgctgaagttcataatctctctgaaagaaaacggagagataggatcaatgagagaatgaaagctttgcaagaacttatacctcgctgcaacaagtcagataaagcttcgatgctagatgaagctattgagtacatgaaatctcttcagcttcaaatacagatgatgtcaatgggatgtggaatgatgccaatgatgtatccgggcatgcaacagtacatgcctcatatggcgatgggtatgggtatgaaccagcctattcctcctccttccttcatgccattccccaacatgttagccgctcaaagacctttgcctacacaaactcacatggccgggtcaggaccgcaataccctgttcatgcttctgacccgtcaagagtctttgtaccgaaccagcagtatgatccaacctcgggccagcctcagtatccagctggttacacggatccatatcagcagttccgcggtctccacccgacccaaccacctcagtttcagaatcaagcaacatcgtacccaagttcgagcagggtgagtagtagtaaggaatctgaggatcacggaaaccacacaacaggttaataatgtccatggagcaacaagaagatctgttttcacaagcaaacacaatttcttatccgacccgacccaaccacctcagtttcagaatcaagcaacatcgtatccaagttcgagcagggtgagtagtagtaaggaatctgaggatcacggaaaccacacaacaggttaataatgtccatggagcaacaagaagatctgttttcacaagcaaacacaattttgagaaattgacagagagacctaacatgtatatatatcgccatctgtttcttgtttttctttggtttgttttgtcctctcttctcaggttgtatacttagagagctgtacatgtaatgatccagagatctaggaatcaatacatagaggttgcagag

SEQ ID NO: 98175 - protein, 478 aa, Arabidopsis thaliana; identical to SEQ ID NO: 88103
  peptide (1)..(478): Ceres Seq. ID no. 13580754
  misc_feature (285)..(334): Pfam Name: Helix-loop-helix DNA-binding domain Pfam Description: Helix-loop-helix DNA-binding domain
  misc_feature (1)..(478): Homolog of NCBI NO: 30680909 NR Description: (bHLH015) putative bHLH transcription factor thaliana] >gi|26051284|gb|AAN78308.1| putative bHLH transcription
  misc_feature (1)..(477): Homolog of NCBI NO: 25411969 NR Description: hypothetical protein At2g20180 [imported] - thaliana >gi|4580456|gb|AAD24380.1| unknown protein [Arabidopsis
  misc_feature (72)..(478): Homolog of NCBI NO: 30680903 NR Description: (bHLH015) putative bHLH transcription factor
  misc_feature (26)..(400): Homolog of NCBI NO: 7485527 NR Description: hypothetical protein F16A16.100 - Arabidopsis >gi|4218119|emb|CAA22973.1| putative protein [Arabidopsis >gi|7269734|emb|CAB81467.1| putative protein [Arabidopsis
  misc_feature (297)..(467): Homolog of NCBI NO: 26185713 NR Description: putative bHLH transcription factor [Arabidopsis
  misc_feature (26)..(338): Homolog of NCBI NO: 30688111 NR Description: expressed protein [Arabidopsis thaliana]
  misc_feature (266)..(382): Homolog of NCBI NO: 33111973 NR Description: putative bHLH127 transcription factor
  misc_feature (32)..(134): Homolog of NCBI NO: 33111973 NR Description: putative bHLH127 transcription factor
  misc_feature (36)..(459): Homolog of NCBI NO: 15235427 NR Description: hypothetical protein [Arabidopsis thaliana]
  misc_feature (37)..(386): Homolog of NCBI NO: 30689218 NR Description: transcription factor (BHLH9) -related

SEQ ID NO: 98176 - protein, 446 aa, Arabidopsis thaliana; identical to SEQ ID NO: 88104
  peptide (1)..(446): Ceres Seq. ID no. 13580755
  misc_feature (253)..(302): Pfam Name: Helix-loop-helix DNA-binding domain Pfam Description: Helix-loop-helix DNA-binding domain
  misc_feature (1)..(446): Homolog of NCBI NO: 30680909 NR Description: (bHLH015) putative bHLH transcription factor thaliana] >gi|26051284|gb|AAN78308.1| putative bHLH transcription
  misc_feature (1)..(445): Homolog of NCBI NO: 25411969 NR Description: hypothetical protein At2g20180 [imported] - thaliana >gi|4580456|gb|AAD24380.1| unknown protein [Arabidopsis
  misc_feature (40)..(446): Homolog of NCBI NO: 30680903 NR Description: (bHLH015) putative bHLH transcription factor
  misc_feature (1)..(368): Homolog of NCBI NO: 7485527 NR Description: hypothetical protein F16A16.100 - Arabidopsis >gi|4218119|emb|CAA22973.1| putative protein [Arabidopsis >gi|7269734|emb|CAB81467.1| putative protein [Arabidopsis
  misc_feature (265)..(435): Homolog of NCBI NO: 26185713 NR Description: putative bHLH transcription factor [Arabidopsis
  misc_feature (1)..(306): Homolog of NCBI NO: 30688111 NR Description: expressed protein [Arabidopsis thaliana]
  misc_feature (234)..(350): Homolog of NCBI NO: 33111973 NR Description: putative bHLH127 transcription factor
  misc_feature (1)..(102): Homolog of NCBI NO: 33111973 NR Description: putative bHLH127 transcription factor
  misc_feature (4)..(427): Homolog of NCBI NO: 15235427 NR Description: hypothetical protein [Arabidopsis thaliana]
  misc_feature (5)..(354): Homolog of NCBI NO: 30689218 NR Description: transcription factor (BHLH9) -related

SEQ ID NO: 98177 - protein, 439 aa, Arabidopsis thaliana; identical to SEQ ID NO: 88105
  peptide (1)..(439): Ceres Seq. ID no. 13580756
  misc_feature (246)..(295): Pfam Name: Helix-loop-helix DNA-binding domain Pfam Description: Helix-loop-helix DNA-binding domain
  misc_feature (1)..(439): Homolog of NCBI NO: 30680909 NR Description: (bHLH015) putative bHLH transcription factor thaliana] >gi|26051284|gb|AAN78308.1| putative bHLH transcription
  misc_feature (1)..(438): Homolog of NCBI NO: 25411969 NR Description: hypothetical protein At2g20180 [imported] - thaliana >gi|4580456|gb|AAD24380.1| unknown protein [Arabidopsis
  misc_feature (33)..(439): Homolog of NCBI NO: 30680903 NR Description: (bHLH015) putative bHLH transcription factor
  misc_feature (1)..(361): Homolog of NCBI NO: 7485527 NR Description: hypothetical protein F16A16.100 - Arabidopsis >gi|4218119|emb|CAA22973.1| putative protein [Arabidopsis >gi|7269734|emb|CAB81467.1| putative protein [Arabidopsis
  misc_feature (258)..(428): Homolog of NCBI NO: 26185713 NR Description: putative bHLH transcription factor [Arabidopsis
  misc_feature (1)..(299): Homolog of NCBI NO: 30688111 NR Description: expressed protein [Arabidopsis thaliana]
  misc_feature (227)..(343): Homolog of NCBI NO: 33111973 NR Description: putative bHLH127 transcription factor
  misc_feature (1)..(95): Homolog of NCBI NO: 33111973 NR Description: putative bHLH127 transcription factor
  misc_feature (1)..(420): Homolog of NCBI NO: 15235427 NR Description: hypothetical protein [Arabidopsis thaliana]
  misc_feature (1)..(347): Homolog of NCBI NO: 30689218 NR Description: transcription factor (BHLH9) -related

SEQ ID NO: 98178 - DNA, 1438 bp, Arabidopsis thaliana
  misc_feature (1)..(1438): Ceres Seq. ID no. 13580769
  misc_feature: MA Experiment ID: 108462 Result: Up-regulated in Transcription
  misc_feature: MA Experiment 108462 PARAMETER Experiment Name: At_Germinating_Seeds_cDNA_P Parameter: Age (day) Value: 2 vs. 0
  misc_feature: MA Experiment 108462 PARAMETER Experiment Name: At_Germinating_Seeds_cDNA_P Parameter: Tissue Value: Germinating Seeds
  misc_feature: MA Experiment ID: 108463 Result: Up-regulated in Transcription
  misc_feature: MA Experiment 108463 PARAMETER Experiment Name: At_Germinating_Seeds_cDNA_P Parameter: Age (day) Value: 3 vs. 0
  misc_feature: MA Experiment 108463 PARAMETER Experiment Name: At_Germinating_Seeds_cDNA_P Parameter: Tissue Value: Germinating Seeds
  misc_feature: MA Experiment ID: 108573 Result: Up-regulated in Transcription
  misc_feature: MA Experiment 108573 PARAMETER Experiment Name: At_Drought_cDNA_P Parameter: Timepoint (hr) Value: 6
  misc_feature: MA Experiment 108573 PARAMETER Experiment Name: At_Drought_cDNA_P Parameter: Tissue Value: Aerial
  misc_feature: MA Experiment 108573 PARAMETER Experiment Name: At_Drought_cDNA_P Parameter: Treatment Value: Drought vs. No Drought
  misc_feature: MA Experiment ID: 108607 Result: Up-regulated in Transcription
  misc_feature: MA Experiment 108607 PARAMETER Experiment Name: At_100uM_ABA_cDNA_P Parameter: Timepoint (hr) Value: 4
  misc_feature: MA Experiment 108607 PARAMETER Experiment Name: At_100uM_ABA_cDNA_P Parameter: Tissue Value: Aerial
  misc_feature: MA Experiment 108607 PARAMETER Experiment Name: At_100uM_ABA_cDNA_P Parameter: Treatment Value: 100uM ABA vs. No Treatment
  misc_feature: MA Experiment ID: 20000437 Result: Up-regulated in Transcription
  misc_feature: MA Experiment 20000437 PARAMETER Experiment Name: At_Drought_P Parameter: Age (day) Value: 8
  misc_feature: MA Experiment 20000437 PARAMETER Experiment Name: At_Drought_P Parameter: Organism Value: A. thaliana
  misc_feature: MA Experiment 20000437 PARAMETER Experiment Name: At_Drought_P Parameter: Plant Line Value: WS
  misc_feature: MA Experiment 20000437 PARAMETER Experiment Name: At_Drought_P Parameter: Timepoint (hr) Value: 24
  misc_feature: MA Experiment 20000437 PARAMETER Experiment Name: At_Drought_P Parameter: Tissue Value: Whole Plant
  misc_feature: MA Experiment 20000437 PARAMETER Experiment Name: At_Drought_P Parameter: Treatment Value: Drought vs. No Drought
cttcttcttcgtcgtcgtcctcaacaagctcttctttctgactcataacccaaatttctgagaatcagagccttattcaagagaacaccaagagtttggtggaagttgttgaaattcgaagccgatcgcggactcgtttgctcttgattacgtcgcaatccgtacgattttccgatcaaacttaagagtgaaggagatagatttgtagaaaaaggaagagaataagagtgagcttgtggccaaaaaagggatgcctttgaacttaggcaacgatggcgatgggtcttcccggattattttgactgagcctcgcggatctactgctgaggtgcttctatttggaggacaagtcatttcttggaaaaatgaaaggagggaagaactgctttatatgagcagcaaggctcaatataagccacccaaggcgatcagaggaggaatacctgtttgctttccacagtttggaaactttggtggacttgagcgacatggatttgcccggaacaaattctggtcacatgatgaagatccttcgcctctacctcctgctaacaaacaatcatctgttgatctgatattgaagtccacagaagatgacttgaagacctggccgcatagttttgaactccgtattcgcatttctattagccctgggaagcttactttgatccctcgtgtgaggaacattgactcaaaggcattctcctttatgtttgcactgcgaaactacttatatgtatctgacataagtgaagttcgagttgagggtttggagacactggattatctagacaacttgattggtaaagaaagattcactgagcaagcagacgcgattacctttgacggggaggtcgatagagtgtacttgaacacaccaacaaagattgcggtcatagatcatgagcgaaagaggaccatcgagttgcgaaaggaaggcatgcccaatgcagttgtgtggaacccctgggacaaaaaggcaaagaccatagctgatatgggagatgaagattacaaaacaatgctttgtgtagattctggagtaatcgaacctctggtattgttaaagcctcgtgaagagtggaaaggcagacaagaactatccatcgtctcatcaagttactgcagcggacagcttgatccacgcaaggttctttacggagatatctgatccttttgggggtttatcttacttagtaaaaaaacagtaataagccatgatctcattatcactaccacccagaaacaactctctaagagtcttgtcttgaacttggagattttatccttttgacttgtgttttgagtgagttctgattgttgttgttacacagagaggtcacggtaatattttgtaacgttgactctgtgtttgaccgtcaaacagtgtatcggtttctttgttcggaaatttagtagaatatatcatcaatttagt

SEQ ID NO: 98179 - protein, 306 aa, Arabidopsis thaliana; identical to SEQ ID NO: 37477
  peptide (1)..(306): Ceres Seq. ID no. 13580770
  misc_feature (13)..(285): Pfam Name: Aldose 1-epimerase Pfam Description: Aldose 1-epimerase
  misc_feature (1)..(306): Homolog of NCBI NO: 18395868 NR Description: aldose 1-epimerase family [Arabidopsis thaliana]
  misc_feature (1)..(306): Homolog of NCBI NO: 16612258 NR Description: AT3g01590/F4P13_13 [Arabidopsis thaliana]
  misc_feature (1)..(305): Homolog of NCBI NO: 11281678 NR Description: hypothetical protein F18O22.290 - Arabidopsis >gi|7573475|emb|CAB87789.1| putative protein [Arabidopsis
  misc_feature (1)..(305): Homolog of NCBI NO: 28393808 NR Description: unknown protein [Arabidopsis thaliana]
  misc_feature (1)..(305): Homolog of NCBI NO: 18417396 NR Description: aldose 1-epimerase family [Arabidopsis thaliana]
  misc_feature (10)..(302): Homolog of NCBI NO: 15242099 NR Description: aldose 1-epimerase family [Arabidopsis thaliana]
  misc_feature (11)..(304): Homolog of NCBI NO: 38344152 NR Description: OSJNBa0041A02.19 [Oryza sativa (japonica
  misc_feature (6)..(304): Homolog of NCBI NO: 40253263 NR Description: putative Aldose 1-epimerase [Oryza sativa
  misc_feature (11)..(304): Homolog of NCBI NO: 2501555 NR Description: POSSIBLE APOSPORY-ASSOCIATED PROTEIN C
  misc_feature (10)..(302): Homolog of NCBI NO: 19387263 NR Description: putative apospory-associated protein C [Oryza

SEQ ID NO: 98180 - protein, 259 aa, Arabidopsis thaliana; identical to SEQ ID NO: 37478
  peptide (1)..(259): Ceres Seq. ID no. 13580771
  misc_feature (1)..(238): Pfam Name: Aldose 1-epimerase Pfam Description: Aldose 1-epimerase
  misc_feature (1)..(259): Homolog of NCBI NO: 18395868 NR Description: aldose 1-epimerase family [Arabidopsis thaliana]
  misc_feature (1)..(259): Homolog of NCBI NO: 16612258 NR Description: AT3g01590/F4P13_13 [Arabidopsis thaliana]
  misc_feature (1)..(258): Homolog of NCBI NO: 11281678 NR Description: hypothetical protein F18O22.290 - Arabidopsis >gi|7573475|emb|CAB87789.1| putative protein [Arabidopsis
  misc_feature (1)..(258): Homolog of NCBI NO: 28393808 NR Description: unknown protein [Arabidopsis thaliana]
  misc_feature (1)..(258): Homolog of NCBI NO: 18417396 NR Description: aldose 1-epimerase family [Arabidopsis thaliana]
  misc_feature (1)..(255): Homolog of NCBI NO: 15242099 NR Description: aldose 1-epimerase family [Arabidopsis thaliana]
  misc_feature (1)..(257): Homolog of NCBI NO: 38344152 NR Description: OSJNBa0041A02.19 [Oryza sativa (japonica
  misc_feature (1)..(257): Homolog of NCBI NO: 40253263 NR Description: putative Aldose 1-epimerase [Oryza sativa
  misc_feature (1)..(257): Homolog of NCBI NO: 2501555 NR Description: POSSIBLE APOSPORY-ASSOCIATED PROTEIN C
  misc_feature (1)..(255): Homolog of NCBI NO: 19387263 NR Description: putative apospory-associated protein C [Oryza

SEQ ID NO: 98181 - protein, 153 aa, Arabidopsis thaliana; identical to SEQ ID NO: 37479
  peptide (1)..(153): Ceres Seq. ID no. 13580772
  misc_feature (1)..(132): Pfam Name: Aldose 1-epimerase Pfam Description: Aldose 1-epimerase
  misc_feature (1)..(153): Homolog of NCBI NO: 18395868 NR Description: aldose 1-epimerase family [Arabidopsis thaliana]
  misc_feature (1)..(153): Homolog of NCBI NO: 16612258 NR Description: AT3g01590/F4P13_13 [Arabidopsis thaliana]
  misc_feature (1)..(152): Homolog of NCBI NO: 11281678 NR Description: hypothetical protein F18O22.290 - Arabidopsis >gi|7573475|emb|CAB87789.1| putative protein [Arabidopsis
  misc_feature (1)..(152): Homolog of NCBI NO: 28393808 NR Description: unknown protein [Arabidopsis thaliana]
  misc_feature (1)..(152): Homolog of NCBI NO: 18417396 NR Description: aldose 1-epimerase family [Arabidopsis thaliana]
  misc_feature (1)..(149): Homolog of NCBI NO: 15242099 NR Description: aldose 1-epimerase family [Arabidopsis thaliana]
  misc_feature (1)..(151): Homolog of NCBI NO: 38344152 NR Description: OSJNBa0041A02.19 [Oryza sativa (japonica
  misc_feature (1)..(151): Homolog of NCBI NO: 40253263 NR Description: putative Aldose 1-epimerase [Oryza sativa
  misc_feature (1)..(151): Homolog of NCBI NO: 2501555 NR Description: POSSIBLE APOSPORY-ASSOCIATED PROTEIN C
  misc_feature (1)..(149): Homolog of NCBI NO: 19387263 NR Description: putative apospory-associated protein C [Oryza

SEQ ID NO: 98182 - DNA, 786 bp, Arabidopsis thaliana
  misc_feature (1)..(786): Ceres Seq. ID no. 13580773
  misc_feature: MA Experiment ID: 108462 Result: Up-regulated in Transcription
  misc_feature: MA Experiment 108462 PARAMETER Experiment Name: At_Germinating_Seeds_cDNA_P Parameter: Age (day) Value: 2 vs. 0
  misc_feature: MA Experiment 108462 PARAMETER Experiment Name: At_Germinating_Seeds_cDNA_P Parameter: Tissue Value: Germinating Seeds
  misc_feature: MA Experiment ID: 108464 Result: Up-regulated in Transcription
  misc_feature: MA Experiment 108464 PARAMETER Experiment Name: At_Germinating_Seeds_cDNA_P Parameter: Age (day) Value: 4 vs. 0
  misc_feature: MA Experiment 108464 PARAMETER Experiment Name: At_Germinating_Seeds_cDNA_P Parameter: Tissue Value: Germinating Seeds
  misc_feature: MA Experiment ID: 20000113 Result: Up-regulated in Transcription
  misc_feature: MA Experiment 20000113 PARAMETER Experiment Name: At_42deg_Heat_cDNA_P Parameter: Temperature (deg C) Value: 42 vs. 22
  misc_feature: MA Experiment 20000113 PARAMETER Experiment Name: At_42deg_Heat_cDNA_P Parameter: Timepoint (hr) Value: 8
  misc_feature: MA Experiment 20000113 PARAMETER Experiment Name: At_42deg_Heat_cDNA_P Parameter: Tissue Value: Aerial
  misc_feature: MA Experiment ID: 20000355 Result: Down-regulated in Transcription
  misc_feature: MA Experiment 20000355 PARAMETER Experiment Name: At_Siliques_Sub_P Parameter: Age (day) Value: 21
  misc_feature: MA Experiment 20000355 PARAMETER Experiment Name: At_Siliques_Sub_P Parameter: Organism Value: A. thaliana
  misc_feature: MA Experiment 20000355 PARAMETER Experiment Name: At_Siliques_Sub_P Parameter: Plant Line Value: WS
  misc_feature: MA Experiment 20000355 PARAMETER Experiment Name: At_Siliques_Sub_P Parameter: Tissue Value: Less Than 5mm Siliques vs. Whole Plant
ccgtttcttaaagcataaaaaccaaaactttctctttcgttttgctttcttccaatcatctgcaggagtgaatcgcaaaaccaaatttggaggattctttctgaggggtttctcagtgagaaaatggcttcgaaacggatcttgaaggagctgaaggatctccagaaagaccctccaacctcctgcagtgcaggtccagttgctgaagacatgtttcattggcaagctacaattatgggtcctgcagagagtccgtattcaggcggtgtgtttctcgttaccattcacttccctccggactatccattcaaaccaccaaaggttgcatttaggacgaaggtgtttcaccctaatatcaacagcaacggaagcatttgccttgacattttgaaagaacaatggagccctgccctcaccatttccaaggtgttgctctcgatatgttcgctgttaacagatccaaatccagatgaccctttggtaccagagattgcacacatgtacaaaaccgacagagccaaatacgaggctactgcaagaaactggactcagaagtatgccatgggctaaacaaagattcgtatgcttcagcacctgtttatgttttcatgtctgtttctttcttcttcttgttttaactttaataaaaatgtctaaaatatcaactttttcgtctgtactatatatgtttatgggttttattatcatcatctttatctgaaatttgaagatggaattctaaagcttgaaggttatttgttaaagtttatttactagtgagtgatg

SEQ ID NO: 98183 - protein, 148 aa, Arabidopsis thaliana
  peptide (1)..(148): Ceres Seq. ID no. 13580774
  misc_feature (1)..(148): Homolog of NCBI NO: 30693863 NR Description: ubiquitin-conjugating enzyme 8 (UBC8)
  misc_feature (1)..(148): Homolog of NCBI NO: 21553796 NR Description: E2, ubiquitin-conjugating enzyme UBC8
  misc_feature (1)..(148): Homolog of NCBI NO: 30693871 NR Description: ubiquitin-conjugating enzyme 8 (UBC8)
  misc_feature (1)..(148): Homolog of NCBI NO: 18408001 NR Description: ubiquitin-conjugating enzyme [Arabidopsis >gi|14326529|gb|AAK60309.1|AF385718_1 At1g64230/F22C12_17 thaliana] >gi|20136192|gb|AAM11574.1|AF480945_1 ubiquitin
  misc_feature (1)..(148): Homolog of NCBI NO: 11762186 NR Description: AT4g27960 [Arabidopsis thaliana]
  misc_feature (1)..(148): Homolog of NCBI NO: 18417097 NR Description: ubiquitin-conjugating enzyme 9 (UBC9)
MASKRILKELKDLQKDPPTSCSAGPVAEDMFHWQATIMGPAESPYSGGVFLVTIHFPPDYPFKPPKVAFRTKVFHPNINSNGSICLDILKEQWSPALTISKVLLSICSLLTDPNPDDPLVPEIAHMYKTDRAKYEATARNWTQKYAMG

SEQ ID NO: 98184 - protein, 119 aa, Arabidopsis thaliana
  peptide (1)..(119): Ceres Seq. ID no. 13580775
  misc_feature (1)..(119): Homolog of NCBI NO: 30693863 NR Description: ubiquitin-conjugating enzyme 8 (UBC8)
  misc_feature (1)..(119): Homolog of NCBI NO: 21553796 NR Description: E2, ubiquitin-conjugating enzyme UBC8
  misc_feature (1)..(119): Homolog of NCBI NO: 30693871 NR Description: ubiquitin-conjugating enzyme 8 (UBC8)
  misc_feature (1)..(119): Homolog of NCBI NO: 18408001 NR Description: ubiquitin-conjugating enzyme [Arabidopsis >gi|14326529|gb|AAK60309.1|AF385718_1 At1g64230/F22C12_17 thaliana] >gi|20136192|gb|AAM11574.1|AF480945_1 ubiquitin
  misc_feature (1)..(119): Homolog of NCBI NO: 11762186 NR Description: AT4g27960 [Arabidopsis thaliana]
  misc_feature (1)..(119): Homolog of NCBI NO: 18417097 NR Description: ubiquitin-conjugating enzyme 9 (UBC9)
MFHWQATIMGPAESPYSGGVFLVTIHFPPDYPFKPPKVAFRTKVFHPNINSNGSICLDILKEQWSPALTISKVLLSICSLLTDPNPDDPLVPEIAHMYKTDRAKYEATARNWTQKYAMG

SEQ ID NO: 98185 - protein, 111 aa, Arabidopsis thaliana
  peptide (1)..(111): Ceres Seq. ID no. 13580776
  misc_feature (1)..(111): Homolog of NCBI NO: 30693863 NR Description: ubiquitin-conjugating enzyme 8 (UBC8)
  misc_feature (1)..(111): Homolog of NCBI NO: 21553796 NR Description: E2, ubiquitin-conjugating enzyme UBC8
  misc_feature (1)..(111): Homolog of NCBI NO: 30693871 NR Description: ubiquitin-conjugating enzyme 8 (UBC8)
  misc_feature (1)..(111): Homolog of NCBI NO: 18408001 NR Description: ubiquitin-conjugating enzyme [Arabidopsis >gi|14326529|gb|AAK60309.1|AF385718_1 At1g64230/F22C12_17 thaliana] >gi|20136192|gb|AAM11574.1|AF480945_1 ubiquitin
  misc_feature (1)..(111): Homolog of NCBI NO: 11762186 NR Description: AT4g27960 [Arabidopsis thaliana]
  misc_feature (1)..(111): Homolog of NCBI NO: 18417097 NR Description: ubiquitin-conjugating enzyme 9 (UBC9)
MGPAESPYSGGVFLVTIHFPPDYPFKPPKVAFRTKVFHPNINSNGSICLDILKEQWSPALTISKVLLSICSLLTDPNPDDPLVPEIAHMYKTDRAKYEATARNWTQKYAMG

SEQ ID NO: 98186 - DNA, 639 bp, Arabidopsis thaliana
  misc_feature (1)..(639): Ceres Seq. ID no. 13580783
  misc_feature: MA Experiment ID: 108434 Result: Down-regulated in Transcription
  misc_feature: MA Experiment 108434 PARAMETER Experiment Name: At_Root_Tips_cDNA_P Parameter: Tissue Value: Root Tips
  misc_feature: MA Experiment ID: 20001557 Result: Down-regulated in Transcription
  misc_feature: MA Experiment 20001557 PARAMETER Experiment Name: At_Drought_Soil_Dry_P Parameter: Age (day) Value: 27
  misc_feature: MA Experiment 20001557 PARAMETER Experiment Name: At_Drought_Soil_Dry_P Parameter: Organism Value: A. thaliana
  misc_feature: MA Experiment 20001557 PARAMETER Experiment Name: At_Drought_Soil_Dry_P Parameter: Plant Line Value: WS
  misc_feature: MA Experiment 20001557 PARAMETER Experiment Name: At_Drought_Soil_Dry_P Parameter: Post Timepoint (hr) Value: 3
  misc_feature: MA Experiment 20001557 PARAMETER Experiment Name: At_Drought_Soil_Dry_P Parameter: Post-Treatment Value: Re-Water vs. No Drought
  misc_feature: MA Experiment 20001557 PARAMETER Experiment Name: At_Drought_Soil_Dry_P Parameter: Timepoint (day) Value: 13
  misc_feature: MA Experiment 20001557 PARAMETER Experiment Name: At_Drought_Soil_Dry_P Parameter: Treatment Value: Drought vs. No Drought
  misc_feature: MA Experiment ID: 20001558 Result: Down-regulated in Transcription
  misc_feature: MA Experiment 20001558 PARAMETER Experiment Name: At_Drought_Soil_Dry_P Parameter: Age (day) Value: 27
  misc_feature: MA Experiment 20001558 PARAMETER Experiment Name: At_Drought_Soil_Dry_P Parameter: Organism Value: A. thaliana
  misc_feature: MA Experiment 20001558 PARAMETER Experiment Name: At_Drought_Soil_Dry_P Parameter: Plant Line Value: WS
  misc_feature: MA Experiment 20001558 PARAMETER Experiment Name: At_Drought_Soil_Dry_P Parameter: Post Timepoint (hr) Value: 6
  misc_feature: MA Experiment 20001558 PARAMETER Experiment Name: At_Drought_Soil_Dry_P Parameter: Post-Treatment Value: Re-Water vs. No Drought
  misc_feature: MA Experiment 20001558 PARAMETER Experiment Name: At_Drought_Soil_Dry_P Parameter: Timepoint (day) Value: 13
  misc_feature: MA Experiment 20001558 PARAMETER Experiment Name: At_Drought_Soil_Dry_P Parameter: Treatment Value: Drought vs. No Drought
  misc_feature: MA Experiment ID: 20001560 Result: Down-regulated in Transcription
  misc_feature: MA Experiment 20001560 PARAMETER Experiment Name: At_Drought_Soil_Dry_P Parameter: Age (day) Value: 28
  misc_feature: MA Experiment 20001560 PARAMETER Experiment Name: At_Drought_Soil_Dry_P Parameter: Organism Value: A. thaliana
  misc_feature: MA Experiment 20001560 PARAMETER Experiment Name: At_Drought_Soil_Dry_P Parameter: Plant Line Value: WS
  misc_feature: MA Experiment 20001560 PARAMETER Experiment Name: At_Drought_Soil_Dry_P Parameter: Post Timepoint (hr) Value: None
  misc_feature: MA Experiment 20001560 PARAMETER Experiment Name: At_Drought_Soil_Dry_P Parameter: Post-Treatment Value: None
  misc_feature: MA Experiment 20001560 PARAMETER Experiment Name: At_Drought_Soil_Dry_P Parameter: Timepoint (day) Value: 14
  misc_feature: MA Experiment 20001560 PARAMETER Experiment Name: At_Drought_Soil_Dry_P Parameter: Treatment Value: Drought vs. No Drought
  misc_feature: MA Experiment ID: 20001911 Result: Up-regulated in Transcription
  misc_feature: MA Experiment 20001911 PARAMETER Experiment Name: At_Drought_Reproduction_P Parameter: Age (day) Value: 40
  misc_feature: MA Experiment 20001911 PARAMETER Experiment Name: At_Drought_Reproduction_P Parameter: Organism Value: A. thaliana
  misc_feature: MA Experiment 20001911 PARAMETER Experiment Name: At_Drought_Reproduction_P Parameter: Plant Line Value: WS
  misc_feature: MA Experiment 20001911 PARAMETER Experiment Name: At_Drought_Reproduction_P Parameter: Timepoint (day) Value: 10
  misc_feature: MA Experiment 20001911 PARAMETER Experiment Name: At_Drought_Reproduction_P Parameter: Tissue Value: Flowers
  misc_feature: MA Experiment 20001911 PARAMETER Experiment Name: At_Drought_Reproduction_P Parameter: Treatment Value: Drought vs. No Drought
catttgcattaaaatataataaaaagatgtaagattctctccgcctccttctctctataagaaccgacacagagacgaagaagaataatcactcgaaaactcatcaaatcaaaaatcaaacacagagaagagaaaatggccgcagaaggagaagttatcgcttgccacaccgttgaagattggaccgagaagctcaaagccgccaacgaatccaagaaactgattgtgatagacttcactgcaacatggtgcccaccttgccgtttcattgcacccgtctttgctgacttagccaagaagcacctcgacgtagtcttcttcaaggtcgatgttgacgaattgaacactgttgctgaggagtttaaagttcaggcaatgccaacgtttatcttcatgaaagaaggagagatcaaggagactgtggttggtgctgctaaagaagaaatcattgccaatctcgagaagcacaagacagttgttgctgctgcttgatttgcttttctctcttacctattttgctaaaatatgtttggtgttttaataaatcctttgttcgcccgagtcttttcaccttaaatgtgctcttatgtgtggtggtgaataaatgttgttgcaaacttgattactcgcagctatgct

SEQ ID NO: 98187 - protein, 118 aa, Arabidopsis thaliana; identical to SEQ ID NO: 29115
  peptide (1)..(118): Ceres Seq. ID no. 13580784
  misc_feature (1)..(118): Homolog of NCBI NO: 15239136 NR Description: thioredoxin H-type 3 (TRX-H-3) [Arabidopsis
  misc_feature (1)..(118): Homolog of NCBI NO: 1388084 NR Description: thioredoxin h
  misc_feature (1)..(118): Homolog of NCBI NO: 15219537 NR Description: thioredoxin H-type 5 (TRX-H-5) [Arabidopsis
  misc_feature (5)..(117): Homolog of NCBI NO: 11135277 NR Description: Thioredoxin H-type 1 (TRX-H-1) (Pollen coat
  misc_feature (5)..(117): Homolog of NCBI NO: 11494247 NR Description: thioredoxin-h-like protein 1 [Brassica oleracea
  misc_feature (5)..(117): Homolog of NCBI NO: 11135129 NR Description: Thioredoxin H-type (TRX-H) >gi|7430841|pir||T14379
  misc_feature (29)..(111): Homolog of NCBI NO: 25405885 NR Description: protein F27F5.21 [imported] - Arabidopsis >gi|7767672|gb|AAF69169.1|AC007915_21 F27F5.21 [Arabidopsis
  misc_feature (1)..(29): Homolog of NCBI NO: 25405885 NR Description: protein F27F5.21 [imported] - Arabidopsis >gi|7767672|gb|AAF69169.1|AC007915_21 F27F5.21 [Arabidopsis
  misc_feature (3)..(111): Homolog of NCBI NO: 12082335 NR Description: thioredoxin h [Oryza sativa (japonica
  misc_feature (1)..(111): Homolog of NCBI NO: 15230385 NR Description: thioredoxin H-type 1 (TRX-H-1) [Arabidopsis

SEQ ID NO: 98188 - DNA, 890 bp, Arabidopsis thaliana
  misc_feature (1)..(890): Ceres Seq. ID no. 13580791
  misc_feature: MA Experiment ID: 108461 Result: Up-regulated in Transcription
  misc_feature: MA Experiment 108461 PARAMETER Experiment Name: At_Germinating_Seeds_cDNA_P Parameter: Age (day) Value: 1 vs. 0
  misc_feature: MA Experiment 108461 PARAMETER Experiment Name: At_Germinating_Seeds_cDNA_P Parameter: Tissue Value: Germinating Seeds
  misc_feature: MA Experiment ID: 108462 Result: Up-regulated in Transcription
  misc_feature: MA Experiment 108462 PARAMETER Experiment Name: At_Germinating_Seeds_cDNA_P Parameter: Age (day) Value: 2 vs. 0
  misc_feature: MA Experiment 108462 PARAMETER Experiment Name: At_Germinating_Seeds_cDNA_P Parameter: Tissue Value: Germinating Seeds
  misc_feature: MA Experiment ID: 108463 Result: Up-regulated in Transcription
  misc_feature: MA Experiment 108463 PARAMETER Experiment Name: At_Germinating_Seeds_cDNA_P Parameter: Age (day) Value: 3 vs. 0
  misc_feature: MA Experiment 108463 PARAMETER Experiment Name: At_Germinating_Seeds_cDNA_P Parameter: Tissue Value: Germinating Seeds
  misc_feature: MA Experiment ID: 108473 Result: Down-regulated in Transcription
  misc_feature: MA Experiment 108473 PARAMETER Experiment Name: At_Drought_Flowers_cDNA_P Parameter: Timepoint (hr) Value: 7 d
  misc_feature: MA Experiment 108473 PARAMETER Experiment Name: At_Drought_Flowers_cDNA_P Parameter: Tissue Value: Flower
  misc_feature: MA Experiment 108473 PARAMETER Experiment Name: At_Drought_Flowers_cDNA_P Parameter: Treatment Value: Drought vs. No Drought
  misc_feature: MA Experiment ID: 108489 Result: Down-regulated in Transcription
  misc_feature: MA Experiment ID: 108576 Result: Down-regulated in Transcription
  misc_feature: MA Experiment 108576 PARAMETER Experiment Name: At_42deg_Heat_cDNA_P Parameter: Temperature (deg C) Value: 42 vs. 22
  misc_feature: MA Experiment 108576 PARAMETER Experiment Name: At_42deg_Heat_cDNA_P Parameter: Timepoint (hr) Value: 1
  misc_feature: MA Experiment 108576 PARAMETER Experiment Name: At_42deg_Heat_cDNA_P Parameter: Tissue Value: Aerial
  misc_feature: MA Experiment ID: 20000090 Result: Down-regulated in Transcription
  misc_feature: MA Experiment ID: 20000111 Result: Down-regulated in Transcription
  misc_feature: MA Experiment 20000111 PARAMETER Experiment Name: At_42deg_Heat_cDNA_P Parameter: Temperature (deg C) Value: 42 vs. 22
  misc_feature: MA Experiment 20000111 PARAMETER Experiment Name: At_42deg_Heat_cDNA_P Parameter: Timepoint (hr) Value: 6
  misc_feature: MA Experiment 20000111 PARAMETER Experiment Name: At_42deg_Heat_cDNA_P Parameter: Tissue Value: Aerial
  misc_feature: MA Experiment ID: 20000112 Result: Down-regulated in Transcription
  misc_feature: MA Experiment 20000112 PARAMETER Experiment Name: At_42deg_Heat_cDNA_P Parameter: Temperature (deg C) Value: 42 vs. 22
  misc_feature: MA Experiment 20000112 PARAMETER Experiment Name: At_42deg_Heat_cDNA_P Parameter: Timepoint (hr) Value: 2
  misc_feature: MA Experiment 20000112 PARAMETER Experiment Name: At_42deg_Heat_cDNA_P Parameter: Tissue Value: Aerial
  misc_feature: MA Experiment ID: 20000113 Result: Down-regulated in Transcription
  misc_feature: MA Experiment 20000113 PARAMETER Experiment Name: At_42deg_Heat_cDNA_P Parameter: Temperature (deg C) Value: 42 vs. 22
  misc_feature: MA Experiment 20000113 PARAMETER Experiment Name: At_42deg_Heat_cDNA_P Parameter: Timepoint (hr) Value: 8
  misc_feature: MA Experiment 20000113 PARAMETER Experiment Name: At_42deg_Heat_cDNA_P Parameter: Tissue Value: Aerial
  misc_feature: MA Experiment ID: 20000144 Result: Down-regulated in Transcription
  misc_feature: MA Experiment 20000144 PARAMETER Experiment Name: At_42deg_Heat_cDNA_P Parameter: Temperature (deg C) Value: 42 vs. 22
  misc_feature: MA Experiment 20000144 PARAMETER Experiment Name: At_42deg_Heat_cDNA_P Parameter: Timepoint (hr) Value: 1
  misc_feature: MA Experiment 20000144 PARAMETER Experiment Name: At_42deg_Heat_cDNA_P Parameter: Tissue Value: Aerial
  misc_feature: MA Experiment ID: 20000224 Result: Up-regulated in Transcription
  misc_feature: MA Experiment ID: 20000307 Result: Up-regulated in Transcription
  misc_feature: MA Experiment 20000307 PARAMETER Experiment Name: At_Germinating_Seeds_Sub_P Parameter: Age (hr) Value: 24 vs. 0
  misc_feature: MA Experiment 20000307 PARAMETER Experiment Name: At_Germinating_Seeds_Sub_P Parameter: Organism Value: A. thaliana
  misc_feature: MA Experiment 20000307 PARAMETER Experiment Name: At_Germinating_Seeds_Sub_P Parameter: Plant Line Value: WS
  misc_feature: MA Experiment 20000307 PARAMETER Experiment Name: At_Germinating_Seeds_Sub_P Parameter: Tissue Value: Germinating Seeds
  misc_feature: MA Experiment ID: 20000314 Result: Down-regulated in Transcription
  misc_feature: MA Experiment 20000314 PARAMETER Experiment Name: At_14day_Shoots-Roots_Sub_P Parameter: Age (day) Value: 14
  misc_feature: MA Experiment 20000314 PARAMETER Experiment Name: At_14day_Shoots-Roots_Sub_P Parameter: Organism Value: A. thaliana
  misc_feature: MA Experiment 20000314 PARAMETER Experiment Name: At_14day_Shoots-Roots_Sub_P Parameter: Plant Line Value: WS
  misc_feature: MA Experiment 20000314 PARAMETER Experiment Name: At_14day_Shoots-Roots_Sub_P Parameter: Tissue Value: Roots vs. Whole Plant
  misc_feature: MA Experiment ID: 20000327 Result: Down-regulated in Transcription
  misc_feature: MA Experiment 20000327 PARAMETER Experiment Name: At_42deg_Heat_Sub_P Parameter: Age (day) Value: 14
  misc_feature: MA Experiment 20000327 PARAMETER Experiment Name: At_42deg_Heat_Sub_P Parameter: Organism Value: A. thaliana
  misc_feature: MA Experiment 20000327 PARAMETER Experiment Name: At_42deg_Heat_Sub_P Parameter: Plant Line Value: WS
  misc_feature: MA Experiment 20000327 PARAMETER Experiment Name: At_42deg_Heat_Sub_P Parameter: Temperature (deg C) Value: 42 vs. 22
  misc_feature: MA Experiment 20000327 PARAMETER Experiment Name: At_42deg_Heat_Sub_P Parameter: Timepoint (hr) Value: 1
  misc_feature: MA Experiment 20000327 PARAMETER Experiment Name: At_42deg_Heat_Sub_P Parameter: Tissue Value: Aerial
  misc_feature: MA Experiment ID: 20000328 Result: Down-regulated in Transcription
  misc_feature: MA Experiment 20000328 PARAMETER Experiment Name: At_42deg_Heat_Sub_P Parameter: Age (day) Value: 14
  misc_feature: MA Experiment 20000328 PARAMETER Experiment Name: At_42deg_Heat_Sub_P Parameter: Organism Value: A. thaliana
  misc_feature: MA Experiment 20000328 PARAMETER Experiment Name: At_42deg_Heat_Sub_P Parameter: Plant Line Value: WS
  misc_feature: MA Experiment 20000328 PARAMETER Experiment Name: At_42deg_Heat_Sub_P Parameter: Temperature (deg C) Value: 42 vs. 22
  misc_feature: MA Experiment 20000328 PARAMETER Experiment Name: At_42deg_Heat_Sub_P Parameter: Timepoint (hr) Value: 6
  misc_feature: MA Experiment 20000328 PARAMETER Experiment Name: At_42deg_Heat_Sub_P Parameter: Tissue Value: Aerial
  misc_feature: MA Experiment ID: 20000355 Result: Up-regulated in Transcription
  misc_feature: MA Experiment 20000355 PARAMETER Experiment Name: At_Siliques_Sub_P Parameter: Age (day) Value: 21
  misc_feature: MA Experiment 20000355 PARAMETER Experiment Name: At_Siliques_Sub_P Parameter: Organism Value: A. thaliana
  misc_feature: MA Experiment 20000355 PARAMETER Experiment Name: At_Siliques_Sub_P Parameter: Plant Line Value: WS
  misc_feature: MA Experiment 20000355 PARAMETER Experiment Name: At_Siliques_Sub_P Parameter: Tissue Value: Less Than 5mm Siliques vs. Whole Plant
aacaaaattttgccttggcttgcgaaaaaaggagatcaagtgatcatatggaggaagaacaagtaagagcaattaagataatagtatttggagtcatctcatggggtgtggccttcattctcacccggagaatcttctcaagctactcattcagcttcagcaaccgtcttctctccacggctcacgcgactatcgctgtcactttagcaacactctctgttcaagatttgtcttgccctgtttgtccccttgcttctaagccatctcataaacagatggacgtgatggcgttttcgttgtcgtacatgatctacgatctaatatgttgtcatttcgatcaagtgtttagcattgataacgcggttcatcatttcgttagcattcttggttttatagctggacttgcataccaaaagtctggatctgagatcgtggctacactgtgggtagcagagatatcaagtccttttttccaccttagggagattctcaaagagattggatacaaagacaccaaactcaatctagctgccgatgtgtgttttgccactatattcacattggcgagaattgtgtgtggacctttcctcgtttacgtcagtctatcagctgataatcccatcttcatcaaggcaatgggatcaggattacaactcgtgagcatcttttggttctataaaattttcgggatgatgagatataaactttttaagaagccaaagtcaaacaaaaagtctacttagcttagttagagatatacaaaagctgattcaatccaaatatttttttcttatttttatttatggtcatttatctattttattaataaaataataataaaaaaataaaaaaaaaatggagagagacccactcgtgaaacaaccgacttt

SEQ ID NO: 98189 - protein, 246 aa, Arabidopsis thaliana; identical to SEQ ID NO: 76739
  peptide (1)..(246): Ceres Seq. ID no. 13580792
  misc_feature (16)..(246): Homolog of NCBI NO: 22330031 NR Description: expressed protein [Arabidopsis thaliana] unknown protein [Arabidopsis thaliana] unknown protein [Arabidopsis thaliana]
  misc_feature (16)..(245): Homolog of NCBI NO: 30693154 NR Description: expressed protein [Arabidopsis thaliana]
  misc_feature (16)..(210): Homolog of NCBI NO: 15219511 NR Description: hypothetical protein [Arabidopsis thaliana]
  misc_feature (16)..(186): Homolog of NCBI NO: 25518603 NR Description: hypothetical protein T32G9.28 - Arabidopsis >gi|12320960|gb|AAG50605.1|AC079605_10 hypothetical protein
  misc_feature (27)..(243): Homolog of NCBI NO: 34903030 NR Description: unnamed protein product [Oryza sativa (japonica group)] >gi|7228458|dbj|BAA92418.1| unnamed protein product
  misc_feature (16)..(91): Homolog of NCBI NO: 25405881 NR Description: protein F27F5.9 [imported] - Arabidopsis thaliana
  misc_feature (135)..(179): Homolog of NCBI NO: 25405881 NR Description: protein F27F5.9 [imported] - Arabidopsis thaliana
  misc_feature (27)..(238): Homolog of NCBI NO: 34535216 NR Description: unnamed protein product [Homo sapiens]
  misc_feature (49)..(240): Homolog of NCBI NO: 27661880 NR Description: hypothetical protein XP_236191 [Rattus norvegicus]

SEQ ID NO: 98190 - protein, 231 aa, Arabidopsis thaliana; identical to SEQ ID NO: 34728
  peptide (1)..(231): Ceres Seq. ID no. 13580793
  misc_feature (1)..(231): Homolog of NCBI NO: 22330031 NR Description: expressed protein [Arabidopsis thaliana] unknown protein [Arabidopsis thaliana] unknown protein [Arabidopsis thaliana]
  misc_feature (1)..(230): Homolog of NCBI NO: 30693154 NR Description: expressed protein [Arabidopsis thaliana]
  misc_feature (1)..(195): Homolog of NCBI NO: 15219511 NR Description: hypothetical protein [Arabidopsis thaliana]
  misc_feature (1)..(171): Homolog of NCBI NO: 25518603 NR Description: hypothetical protein T32G9.28 - Arabidopsis >gi|12320960|gb|AAG50605.1|AC079605_10 hypothetical protein
  misc_feature (12)..(228): Homolog of NCBI NO: 34903030 NR Description: unnamed protein product [Oryza sativa (japonica group)] >gi|7228458|dbj|BAA92418.1| unnamed protein product
  misc_feature (1)..(76): Homolog of NCBI NO: 25405881 NR Description: protein F27F5.9 [imported] - Arabidopsis thaliana
  misc_feature (120)..(164): Homolog of NCBI NO: 25405881 NR Description: protein F27F5.9 [imported] - Arabidopsis thaliana
  misc_feature (12)..(223): Homolog of NCBI NO: 34535216 NR Description: unnamed protein product [Homo sapiens]
  misc_feature (34)..(225): Homolog of NCBI NO: 27661880 NR Description: hypothetical protein XP_236191 [Rattus norvegicus]

SEQ ID NO: 98191 - protein, 155 aa, Arabidopsis thaliana; identical to SEQ ID NO: 34729
  peptide (1)..(155): Ceres Seq. ID no. 13580794
  misc_feature (1)..(155): Homolog of NCBI NO: 22330031 NR Description: expressed protein [Arabidopsis thaliana] unknown protein [Arabidopsis thaliana] unknown protein [Arabidopsis thaliana]
  misc_feature (1)..(154): Homolog of NCBI NO: 30693154 NR Description: expressed protein [Arabidopsis thaliana]
  misc_feature (1)..(119): Homolog of NCBI NO: 15219511 NR Description: hypothetical protein [Arabidopsis thaliana]
  misc_feature (1)..(95): Homolog of NCBI NO: 25518603 NR Description: hypothetical protein T32G9.28 - Arabidopsis >gi|12320960|gb|AAG50605.1|AC079605_10 hypothetical protein
  misc_feature (1)..(152): Homolog of NCBI NO: 34903030 NR Description: unnamed protein product [Oryza sativa (japonica group)] >gi|7228458|dbj|BAA92418.1| unnamed protein product
  misc_feature (44)..(88): Homolog of NCBI NO: 25405881 NR Description: protein F27F5.9 [imported] - Arabidopsis thaliana
  misc_feature (1)..(147): Homolog of NCBI NO: 34535216 NR Description: unnamed protein product [Homo sapiens]
  misc_feature (1)..(149): Homolog of NCBI NO: 27661880 NR Description: hypothetical protein XP_236191 [Rattus norvegicus]

SEQ ID NO: 98192 - DNA, 858 bp, Arabidopsis thaliana
  misc_feature (1)..(858): Ceres Seq. ID no. 13580795
  misc_feature: MA Experiment ID: 108434 Result: Up-regulated in Transcription
  misc_feature: MA Experiment 108434 PARAMETER Experiment Name: At_Root_Tips_cDNA_P Parameter: Tissue Value: Root Tips
  misc_feature: MA Experiment ID: 108461 Result: Down-regulated in Transcription
  misc_feature: MA Experiment 108461 PARAMETER Experiment Name: At_Germinating_Seeds_cDNA_P Parameter: Age (day) Value: 1 vs. 0
  misc_feature: MA Experiment 108461 PARAMETER Experiment Name: At_Germinating_Seeds_cDNA_P Parameter: Tissue Value: Germinating Seeds
  misc_feature: MA Experiment ID: 108462 Result: Down-regulated in Transcription
  misc_feature: MA Experiment 108462 PARAMETER Experiment Name: At_Germinating_Seeds_cDNA_P Parameter: Age (day) Value: 2 vs. 0
  misc_feature: MA Experiment 108462 PARAMETER Experiment Name: At_Germinating_Seeds_cDNA_P Parameter: Tissue Value: Germinating Seeds
  misc_feature: MA Experiment ID: 108463 Result: Down-regulated in Transcription
  misc_feature: MA Experiment 108463 PARAMETER Experiment Name: At_Germinating_Seeds_cDNA_P Parameter: Age (day) Value: 3 vs. 0
  misc_feature: MA Experiment 108463 PARAMETER Experiment Name: At_Germinating_Seeds_cDNA_P Parameter: Tissue Value: Germinating Seeds
  misc_feature: MA Experiment ID: 108464 Result: Down-regulated in Transcription
  misc_feature: MA Experiment 108464 PARAMETER Experiment Name: At_Germinating_Seeds_cDNA_P Parameter: Age (day) Value: 4 vs. 0
  misc_feature: MA Experiment 108464 PARAMETER Experiment Name: At_Germinating_Seeds_cDNA_P Parameter: Tissue Value: Germinating Seeds
  misc_feature: MA Experiment ID: 108488 Result: Up-regulated in Transcription
  misc_feature: MA Experiment ID: 108489 Result: Up-regulated in Transcription
  misc_feature: MA Experiment ID: 20000173 Result: Up-regulated in Transcription
  misc_feature: MA Experiment 20000173 PARAMETER Experiment Name: At_42deg_Heat_P Parameter: Age (day) Value: 14
  misc_feature: MA Experiment 20000173 PARAMETER Experiment Name: At_42deg_Heat_P Parameter: Organism Value: A. thaliana
  misc_feature: MA Experiment 20000173 PARAMETER Experiment Name: At_42deg_Heat_P Parameter: Plant Line Value: WS
  misc_feature: MA Experiment 20000173 PARAMETER Experiment Name: At_42deg_Heat_P Parameter: Temperature (deg C) Value: 42 vs. 22
  misc_feature: MA Experiment 20000173 PARAMETER Experiment Name: At_42deg_Heat_P Parameter: Timepoint (hr) Value: 6
  misc_feature: MA Experiment 20000173 PARAMETER Experiment Name: At_42deg_Heat_P Parameter: Tissue Value: Aerial
  misc_feature: MA Experiment ID: 20000184 Result: Up-regulated in Transcription
  misc_feature: MA Experiment 20000184 PARAMETER Experiment Name: At_Shoots__P Parameter: Age (day) Value: 7
  misc_feature: MA Experiment 20000184 PARAMETER Experiment Name: At_Shoots__P Parameter: Tissue Value: Shoots vs. Whole Plant
  misc_feature: MA Experiment ID: 20000794 Result: Down-regulated in Transcription
  misc_feature: MA Experiment 20000794 PARAMETER Experiment Name: At_Petals_P Parameter: Age (day) Value: 23-25 days
  misc_feature: MA Experiment 20000794 PARAMETER Experiment Name: At_Petals_P Parameter: Plant Line Value: WS
  misc_feature: MA Experiment 20000794 PARAMETER Experiment Name: At_Petals_P Parameter: Tissue Value: Petals vs. Whole plant
  misc_feature: MA Experiment ID: 20001560 Result: Up-regulated in Transcription
  misc_feature: MA Experiment 20001560 PARAMETER Experiment Name: At_Drought_Soil_Dry_P Parameter: Age (day) Value: 28
  misc_feature: MA Experiment 20001560 PARAMETER Experiment Name: At_Drought_Soil_Dry_P Parameter: Organism Value: A. thaliana
  misc_feature: MA Experiment 20001560 PARAMETER Experiment Name: At_Drought_Soil_Dry_P Parameter: Plant Line Value: WS
  misc_feature: MA Experiment 20001560 PARAMETER Experiment Name: At_Drought_Soil_Dry_P Parameter: Post Timepoint (hr) Value: None
  misc_feature: MA Experiment 20001560 PARAMETER Experiment Name: At_Drought_Soil_Dry_P Parameter: Post-Treatment Value: None
  misc_feature: MA Experiment 20001560 PARAMETER Experiment Name: At_Drought_Soil_Dry_P Parameter: Timepoint (day) Value: 14
  misc_feature: MA Experiment 20001560 PARAMETER Experiment Name: At_Drought_Soil_Dry_P Parameter: Treatment Value: Drought vs. No Drought
  misc_feature: MA Experiment ID: 20001757 Result: Up-regulated in Transcription
  misc_feature: MA Experiment 20001757 PARAMETER Experiment Name: At_50mM_NH4NO3_L-to-H_P Parameter: Timepoint (hr) Value: 6
  misc_feature: MA Experiment 20001757 PARAMETER Experiment Name: At_50mM_NH4NO3_L-to-H_P Parameter: Tissue Value: Leaf
  misc_feature: MA Experiment 20001757 PARAMETER Experiment Name: At_50mM_NH4NO3_L-to-H_P Parameter: Treatment Value: 50mM NH4NO3 vs 100mM Mannitol
tttagggtttattcttcattgcttgagcttccttctcttcttcttcttcaagccgcggctaaagatccctacttctctcgacacttatagagtttcagtcatggccgcctccgcagaaatcgacgctgagattcaacagcagcttaccaatgaggttaagctcttcaaccgttggagctttgatgacgtttcggttacggatattagtcttgtggactacattggtgttcagccatcgaagcacgcaacttttgttccccatactgctggacgatactctgtgaagaggttcagaaaggcgcagtgcccaattgttgagaggctcactaactctctcatgatgcacggaagaaacaatggtaagaagttgatggctgtcaggatcgtcaagcatgccatggagattatccacctcttgtctgacttgaacccgattcaagttatcattgatgccattgttaacagtggtccacgtgaagatgctaccaggattggatctgctggtgtggttaggaggcaggctgttgatatctctcctctaagacgtgtgaaccaagcgatcttcttgcttacaactggtgcacgtgaagctgcctttagaaacatcaagacaatcgctgagtgccttgctgatgaactcatcaatgctgcaaagggatcttccaacagctatgccatcaagaagaaagatgagattgagagagttgctaaggccaatcgttaagggatctccctttcctctaagtttgcattatatcaaagagtttttgtgttgtttccattagctttggatatgtttcagatgatctctctatctttaatgaaattttgacgcttataatcgacttgggatcttga

SEQ ID NO: 98193 - protein, 240 aa, Arabidopsis thaliana
  peptide (1)..(240): Ceres Seq. ID no. 13580796
  misc_feature (87)..(240): Pfam Name: Ribosomal protein S7p/S5e Pfam Description: Ribosomal protein S7p/S5e
  misc_feature (34)..(240): Homolog of NCBI NO: 15228111 NR Description: 40S ribosomal protein S5 (RPS5A) [Arabidopsis
  misc_feature (34)..(240): Homolog of NCBI NO: 21617886 NR Description: 40S ribosomal protein S5 [Arabidopsis thaliana]
  misc_feature (34)..(240): Homolog of NCBI NO: 15229897 NR Description: 40S ribosomal protein S5 (RPS5B) [Arabidopsis >gi|30681968|ref|NP_850564.1| 40S ribosomal protein S5 (RPS5B)
  misc_feature (51)..(240): Homolog of NCBI NO: 6831665 NR Description: 40S RIBOSOMAL PROTEIN S5
  misc_feature (42)..(240): Homolog of NCBI NO: 34893994 NR Description: putative 40S ribosomal protein S5 [Oryza sativa
  misc_feature (33)..(240): Homolog of NCBI NO: 40748265 NR Description: 40S ribosomal protein S5 [Capsicum annuum]
  misc_feature (49)..(240): Homolog of NCBI NO: 3717978 NR Description: 5S ribosomal protein [Mus musculus] unnamed protein product [Mus musculus] unnamed protein product [Mus musculus]
  misc_feature (49)..(240): Homolog of NCBI NO: 13904870 NR Description: ribosomal protein S5; 40S ribosomal protein S5 sapiens] >gi|22002064|sp|P46782|RS5_HUMAN 40S ribosomal protein >gi|15929961|gb|AAH15405.1|AAH15405 ribosomal protein S5 [Homo
  misc_feature (49)..(240): Homolog of NCBI NO: 34854534 NR Description: similar to ribosomal protein S5; 40S ribosomal
  misc_feature (49)..(240): Homolog of NCBI NO: 15294021 NR Description: 40S ribosomal protein S5 [Ictalurus punctatus]
LGFILHCLSFLLFFFFKPRLKIPTSLDTYRVSVMAASAEIDAEIQQQLTNEVKLFNRWSFDDVSVTDISLVDYIGVQPSKHATFVPHTAGRYSVKRFRKAQCPIVERLTNSLMMHGRNNGKKLMAVRIVKHAMEIIHLLSDLNPIQVIIDAIVNSGPREDATRIGSAGVVRRQAVDISPLRRVNQAIFLLTTGAREAAFRNIKTIAECLADELINAAKGSSNSYAIKKKDEIERVAKANR

SEQ ID NO: 98194 - protein, 207 aa, Arabidopsis thaliana [sequence omitted]

SEQ ID NO: 98195 - protein, 128 aa, Arabidopsis thaliana; identical to SEQ ID NO: 43944
  peptide (1)..(128): Ceres Seq. ID no. 13580798
  misc_feature (1)..(128): Pfam Name: Ribosomal protein S7p/S5e Pfam Description: Ribosomal protein S7p/S5e
  misc_feature (1)..(128): Homolog of NCBI NO: 15228111 NR Description: 40S ribosomal protein S5 (RPS5A) [Arabidopsis
  misc_feature (1)..(128): Homolog of NCBI NO: 21617886 NR Description: 40S ribosomal protein S5 [Arabidopsis thaliana]
  misc_feature (1)..(128): Homolog of NCBI NO: 15229897 NR Description: 40S ribosomal protein S5 (RPS5B) [Arabidopsis >gi|30681968|ref|NP_850564.1| 40S ribosomal protein S5 (RPS5B)
  misc_feature (1)..(128): Homolog of NCBI NO: 6831665 NR Description: 40S RIBOSOMAL PROTEIN S5
  misc_feature (1)..(128): Homolog of NCBI NO: 34893994 NR Description: putative 40S ribosomal protein S5 [Oryza sativa
  misc_feature (1)..(128): Homolog of NCBI NO: 40748265 NR Description: 40S ribosomal protein S5 [Capsicum annuum]
  misc_feature (1)..(128): Homolog of NCBI NO: 3717978 NR Description: 5S ribosomal protein [Mus musculus] unnamed protein product [Mus musculus] unnamed protein product [Mus musculus]
  misc_feature (1)..(128): Homolog of NCBI NO: 13904870 NR Description: ribosomal protein S5; 40S ribosomal protein S5 sapiens] >gi|22002064|sp|P46782|RS5_HUMAN 40S ribosomal protein >gi|15929961|gb|AAH15405.1|AAH15405 ribosomal protein S5 [Homo
  misc_feature (1)..(128): Homolog of NCBI NO: 34854534 NR Description: similar to ribosomal protein S5; 40S ribosomal
  misc_feature (1)..(128): Homolog of NCBI NO: 15294021 NR Description: 40S ribosomal protein S5 [Ictalurus punctatus]

SEQ ID NO: 98196 - DNA, 1605 bp, Arabidopsis thaliana
  misc_feature (1)..(1605): Ceres Seq. ID no. 13580806
  misc_feature: MA Experiment ID: 108434 Result: Up-regulated in Transcription
  misc_feature: MA Experiment 108434 PARAMETER Experiment Name: At_Root_Tips_cDNA_P Parameter: Tissue Value: Root Tips
  misc_feature: MA Experiment ID: 108461 Result: Up-regulated in Transcription
  misc_feature: MA Experiment 108461 PARAMETER Experiment Name: At_Germinating_Seeds_cDNA_P Parameter: Age (day) Value: 1 vs. 0
  misc_feature: MA Experiment 108461 PARAMETER Experiment Name: At_Germinating_Seeds_cDNA_P Parameter: Tissue Value: Germinating Seeds
  misc_feature: MA Experiment ID: 108462 Result: Up-regulated in Transcription
  misc_feature: MA Experiment 108462 PARAMETER Experiment Name: At_Germinating_Seeds_cDNA_P Parameter: Age (day) Value: 2 vs. 0
  misc_feature: MA Experiment 108462 PARAMETER Experiment Name: At_Germinating_Seeds_cDNA_P Parameter: Tissue Value: Germinating Seeds
  misc_feature: MA Experiment ID: 108463 Result: Up-regulated in Transcription
  misc_feature: MA Experiment 108463 PARAMETER Experiment Name: At_Germinating_Seeds_cDNA_P Parameter: Age (day) Value: 3 vs. 0
  misc_feature: MA Experiment 108463 PARAMETER Experiment Name: At_Germinating_Seeds_cDNA_P Parameter: Tissue Value: Germinating Seeds
  misc_feature: MA Experiment ID: 108464 Result: Up-regulated in Transcription
  misc_feature: MA Experiment 108464 PARAMETER Experiment Name: At_Germinating_Seeds_cDNA_P Parameter: Age (day) Value: 4 vs. 0
  misc_feature: MA Experiment 108464 PARAMETER Experiment Name: At_Germinating_Seeds_cDNA_P Parameter: Tissue Value: Germinating Seeds
  misc_feature: MA Experiment ID: 108561 Result: Down-regulated in Transcription
  misc_feature: MA Experiment 108561 PARAMETER Experiment Name: At_100uM_ABA_cDNA_P Parameter: Timepoint (hr) Value: 6
  misc_feature: MA Experiment 108561 PARAMETER Experiment Name: At_100uM_ABA_cDNA_P Parameter: Tissue Value: Aerial
  misc_feature: MA Experiment 108561 PARAMETER Experiment Name: At_100uM_ABA_cDNA_P Parameter: Treatment Value: 100uM ABA vs. No Treatment
  misc_feature: MA Experiment ID: 108577 Result: Down-regulated in Transcription
  misc_feature: MA Experiment 108577 PARAMETER Experiment Name: At_42deg_Heat_cDNA_P Parameter: Temperature (deg C) Value: 42 vs. 22
  misc_feature: MA Experiment 108577 PARAMETER Experiment Name: At_42deg_Heat_cDNA_P Parameter: Timepoint (hr) Value: 6
  misc_feature: MA Experiment 108577 PARAMETER Experiment Name: At_42deg_Heat_cDNA_P Parameter: Tissue Value: Aerial
  misc_feature: MA Experiment ID: 108585 Result: Down-regulated in Transcription
  misc_feature: MA Experiment 108585 PARAMETER Experiment Name: At_5mM_NaNP_cDNA_P Parameter: Timepoint (hr) Value: 6
  misc_feature: MA Experiment 108585 PARAMETER Experiment Name: At_5mM_NaNP_cDNA_P Parameter: Tissue Value: Aerial
  misc_feature: MA Experiment 108585 PARAMETER Experiment Name: At_5mM_NaNP_cDNA_P Parameter: Treatment Value: null
  misc_feature: MA Experiment ID: 20000069 Result: Down-regulated in Transcription
  misc_feature: MA Experiment 20000069 PARAMETER Experiment Name: At_100uM_ABA_Mutants_cDNA_P Parameter: Plant Line Value: CS23
  misc_feature: MA Experiment 20000069 PARAMETER Experiment Name: At_100uM_ABA_Mutants_cDNA_P Parameter: Timepoint (hr) Value: 6
  misc_feature: MA Experiment 20000069 PARAMETER Experiment Name: At_100uM_ABA_Mutants_cDNA_P Parameter: Tissue Value: Aerial
  misc_feature: MA Experiment 20000069 PARAMETER Experiment Name: At_100uM_ABA_Mutants_cDNA_P Parameter: Treatment Value: 100uM ABA vs. No Treatment
  misc_feature: MA Experiment ID: 20000071 Result: Down-regulated in Transcription
  misc_feature: MA Experiment 20000071 PARAMETER Experiment Name: At_100uM_ABA_Mutants_cDNA_P Parameter: Plant Line Value: CS8104
  misc_feature: MA Experiment 20000071 PARAMETER Experiment Name: At_100uM_ABA_Mutants_cDNA_P Parameter: Timepoint (hr) Value: 6
  misc_feature: MA Experiment 20000071 PARAMETER Experiment Name: At_100uM_ABA_Mutants_cDNA_P Parameter: Tissue Value: Aerial
  misc_feature: MA Experiment 20000071 PARAMETER Experiment Name: At_100uM_ABA_Mutants_cDNA_P Parameter: Treatment Value: 100uM ABA vs. No Treatment
  misc_feature: MA Experiment ID: 20000111 Result: Down-regulated in Transcription
  misc_feature: MA Experiment 20000111 PARAMETER Experiment Name: At_42deg_Heat_cDNA_P Parameter: Temperature (deg C) Value: 42 vs. 22
  misc_feature: MA Experiment 20000111 PARAMETER Experiment Name: At_42deg_Heat_cDNA_P Parameter: Timepoint (hr) Value: 6
  misc_feature: MA Experiment 20000111 PARAMETER Experiment Name: At_42deg_Heat_cDNA_P Parameter: Tissue Value: Aerial
  misc_feature: MA Experiment ID: 20000113 Result: Down-regulated in Transcription
  misc_feature: MA Experiment 20000113 PARAMETER Experiment Name: At_42deg_Heat_cDNA_P Parameter: Temperature (deg C) Value: 42 vs. 22
  misc_feature: MA Experiment 20000113 PARAMETER Experiment Name: At_42deg_Heat_cDNA_P Parameter: Timepoint (hr) Value: 8
  misc_feature: MA Experiment 20000113 PARAMETER Experiment Name: At_42deg_Heat_cDNA_P Parameter: Tissue Value: Aerial
  misc_feature: MA Experiment ID: 20000117 Result: Down-regulated in Transcription
  misc_feature: MA Experiment 20000117 PARAMETER Experiment Name: At_100uM_ABA_Mutants_cDNA_P Parameter: Plant Line Value: Columbia
  misc_feature: MA Experiment 20000117 PARAMETER Experiment Name: At_100uM_ABA_Mutants_cDNA_P Parameter: Timepoint (hr) Value: 6
  misc_feature: MA Experiment 20000117 PARAMETER Experiment Name: At_100uM_ABA_Mutants_cDNA_P Parameter: Tissue Value: Aerial
  misc_feature: MA Experiment 20000117 PARAMETER Experiment Name: At_100uM_ABA_Mutants_cDNA_P Parameter: Treatment Value: 100uM ABA vs. No Treatment
  misc_feature: MA Experiment ID: 20000144 Result: Down-regulated in Transcription
  misc_feature: MA Experiment 20000144 PARAMETER Experiment Name: At_42deg_Heat_cDNA_P Parameter: Temperature (deg C) Value: 42 vs. 22
  misc_feature: MA Experiment 20000144 PARAMETER Experiment Name: At_42deg_Heat_cDNA_P Parameter: Timepoint (hr) Value: 1
  misc_feature: MA Experiment 20000144 PARAMETER Experiment Name: At_42deg_Heat_cDNA_P Parameter: Tissue Value: Aerial
  misc_feature: MA Experiment ID: 20000224 Result: Up-regulated in Transcription
  misc_feature: MA Experiment ID: 20000307 Result: Up-regulated in Transcription
  misc_feature: MA Experiment 20000307 PARAMETER Experiment Name: At_Germinating_Seeds_Sub_P Parameter: Age (hr) Value: 24 vs. 0
  misc_feature: MA Experiment 20000307 PARAMETER Experiment Name: At_Germinating_Seeds_Sub_P Parameter: Organism Value: A. thaliana
  misc_feature: MA Experiment 20000307 PARAMETER Experiment Name: At_Germinating_Seeds_Sub_P Parameter: Plant Line Value: WS
  misc_feature: MA Experiment 20000307 PARAMETER Experiment Name: At_Germinating_Seeds_Sub_P Parameter: Tissue Value: Germinating Seeds
aaatcaatggcaaaaaattagcttttagaattccccaagaacaaaaacaaaaaatgtccgagagaaattagggaaaaacaaaacaaataaaatctgggtgtaggggagagagagctcgtgctcgtgattttgatatctatctcttcgttatcgattttgaacatccacattgttcttagatctgaagaaaaaaaacacgggttctgttattacgatttgctcggcgattttgacaccaggctttcaattcttttcgttggaggtgattcgatttcagatccatcggatctaatctcggcgagtcgattcgtggtcgacatttttcaaaaactgctcgcgtggatctgaagaagagacattgttgtcttttgtatatcggcactgaatttttctgggaatctgtgtaaagatggatccaatatcagcggttagcgaagagctggctgagatcgaaggacaaatcaatgacatcttccgtgctttatcaaatggattccagaagctggagaagatcaaagatgctaataggcagagtaggcagctggaagaactcactgacaaaatgcgtgactgtaagagccttattaaagatttcgatagggaaatcaaaagcttggaaagcggtaatgatgccagcactaaccggatgttgaacgatagacgacaatctatggttaaggaactcaactcatatgttgctcttaagaagaaatactcatcaaacctagcaagcaataacaagcgagtagatcttttcgatggacctggagaagaacacatggaagaaaatgtcttattagcttcaaacatgtccaatcaagagttaatggataaaggaaactcaatgatggatgacacagatcaagctattgagagagggaaaaagattgtacaagaaactataaatgtgggaacagatacttcagcagctctcaaggctcagaccgagcaaatgagtagagttgtcaatgagctcgattctattcatttctcactcaagaaagcctccaagctggtcaaggaaattggtaggcaggttgccactgacaaatgtattatggcatttcttttccttatcgtcattggtgtcatagcaatcatcatcgtcaagattgtgaacccaaacaacaaagacattcgcgacataccgggtgtgggcctagctccaccagccatgaacagacgtctgctctggaaccattactgaaaaaaaaatatctcattttcacaccattcaaaatactggtacgttgcacacttttttgtcccatacacatcttgatcctccccttagtcatgttgttgtagatgaaaccgcctcacttgagaaagtaaccagtttcgattcacatggctcttggctgctgcacatttgagcagtcacaggaatcaaattccctttcgttaaaaacccaggatcaaaaccatcttttttagctcatgtgtttgtataaggatgactcttttgtgttctatcatatgtacgtgtatttttaaaacgtcttctctgtttcatgttctggtaataaaaacttgtttcactggttcaaagttgtaactgagttgtatcatatccgatatatattagtatatgacttcactctc

SEQ ID NO: 98197 - protein, 265 aa, Arabidopsis thaliana; identical to SEQ ID NO: 22091
  peptide (1)..(265): Ceres Seq. ID no. 13580807
  misc_feature (78)..(213): Pfam Name: Vesicle transport v-SNARE protein Pfam Description: Vesicle transport v-SNARE protein
  misc_feature (1)..(265): Homolog of NCBI NO: 18403771 NR Description: expressed protein [Arabidopsis thaliana]
  misc_feature (1)..(265): Homolog of NCBI NO: 27805643 NR Description: Novel plant SNARE 11 (AtNPSN11) At2g35190/T4C15.14 [Arabidopsis thaliana]
  misc_feature (1)..(265): Homolog of NCBI NO: 25370780 NR Description: hypothetical protein At2g35190 [imported] -
  misc_feature (7)..(262): Homolog of NCBI NO: 18401508 NR Description: expressed protein [Arabidopsis thaliana] Novel plant SNARE 13 (AtNPSN13) >gi|11994682|dbj|BAB02920.1|
  misc_feature (7)..(261): Homolog of NCBI NO: 23237830 NR Description: contains ESTs to vesicle soluble NSF attachment protein receptor [Oryza sativa
  misc_feature (7)..(262): Homolog of NCBI NO: 22330102 NR Description: expressed protein [Arabidopsis thaliana] Novel plant SNARE 12 (AtNPSN12) F21D18.4 [Arabidopsis thaliana]
  misc_feature (7)..(262): Homolog of NCBI NO: 21536876 NR Description: unknown [Arabidopsis thaliana]
  misc_feature (7)..(261): Homolog of NCBI NO: 34896946 NR Description: putative vesicle soluble NSF attachment protein [Oryza sativa] >gi|12039356|gb|AAG46143.1| putative vesicle
  misc_feature (2)..(262): Homolog of NCBI NO: 25370781 NR Description: F11A17.20 [imported] - Arabidopsis thaliana
  misc_feature (7)..(210): Homolog of NCBI NO: 25370781 NR Description: F11A17.20 [imported] - Arabidopsis thaliana

SEQ ID NO: 98198 - protein, 214 aa, Arabidopsis thaliana; identical to SEQ ID NO: 22092
  peptide (1)..(214): Ceres Seq. ID no. 13580808
  misc_feature (27)..(162): Pfam Name: Vesicle transport v-SNARE protein Pfam Description: Vesicle transport v-SNARE protein
  misc_feature (1)..(214): Homolog of NCBI NO: 18403771 NR Description: expressed protein [Arabidopsis thaliana]
  misc_feature (1)..(214): Homolog of NCBI NO: 27805643 NR Description: Novel plant SNARE 11 (AtNPSN11) At2g35190/T4C15.14 [Arabidopsis thaliana]
  misc_feature (1)..(214): Homolog of NCBI NO: 25370780 NR Description: hypothetical protein At2g35190 [imported] -
  misc_feature (1)..(211): Homolog of NCBI NO: 18401508 NR Description: expressed protein [Arabidopsis thaliana] Novel plant SNARE 13 (AtNPSN13) >gi|11994682|dbj|BAB02920.1|
  misc_feature (1)..(210): Homolog of NCBI NO: 23237830 NR Description: contains ESTs to vesicle soluble NSF attachment protein receptor [Oryza sativa
  misc_feature (1)..(211): Homolog of NCBI NO: 22330102 NR Description: expressed protein [Arabidopsis thaliana] Novel plant SNARE 12 (AtNPSN12) F21D18.4 [Arabidopsis thaliana]
  misc_feature (1)..(211): Homolog of NCBI NO: 21536876 NR Description: unknown [Arabidopsis thaliana]
  misc_feature (1)..(210): Homolog of NCBI NO: 34896946 NR Description: putative vesicle soluble NSF attachment protein [Oryza sativa] >gi|12039356|gb|AAG46143.1| putative vesicle
  misc_feature (1)..(211): Homolog of NCBI NO: 25370781 NR Description: F11A17.20 [imported] - Arabidopsis thaliana
  misc_feature (1)..(159): Homolog of NCBI NO: 25370781 NR Description: F11A17.20 [imported] - Arabidopsis thaliana

SEQ ID NO: 98199 - protein, 186 aa, Arabidopsis thaliana; identical to SEQ ID NO: 22093
  peptide (1)..(186): Ceres Seq. ID no. 13580809
  misc_feature (1)..(134): Pfam Name: Vesicle transport v-SNARE protein Pfam Description: Vesicle transport v-SNARE protein
  misc_feature (1)..(186): Homolog of NCBI NO: 18403771 NR Description: expressed protein [Arabidopsis thaliana]
  misc_feature (1)..(186): Homolog of NCBI NO: 27805643 NR Description: Novel plant SNARE 11 (AtNPSN11) At2g35190/T4C15.14 [Arabidopsis thaliana]
  misc_feature (1)..(186): Homolog of NCBI NO: 25370780 NR Description: hypothetical protein At2g35190 [imported] -
  misc_feature (1)..(183): Homolog of NCBI NO: 18401508 NR Description: expressed protein [Arabidopsis thaliana] Novel plant SNARE 13 (AtNPSN13) >gi|11994682|dbj|BAB02920.1|
  misc_feature (1)..(182): Homolog of NCBI NO: 23237830 NR Description: contains ESTs to vesicle soluble NSF attachment protein receptor [Oryza sativa
  misc_feature (1)..(183): Homolog of NCBI NO: 22330102 NR Description: expressed protein [Arabidopsis thaliana] Novel plant SNARE 12 (AtNPSN12) F21D18.4 [Arabidopsis thaliana]
  misc_feature (1)..(183): Homolog of NCBI NO: 21536876 NR Description: unknown [Arabidopsis thaliana]
  misc_feature (1)..(182): Homolog of NCBI NO: 34896946 NR Description: putative vesicle soluble NSF attachment protein [Oryza sativa] >gi|12039356|gb|AAG46143.1| putative vesicle
  misc_feature (1)..(183): Homolog of NCBI NO: 25370781 NR Description: F11A17.20 [imported] - Arabidopsis thaliana
  misc_feature (1)..(131): Homolog of NCBI NO: 25370781 NR Description: F11A17.20 [imported] - Arabidopsis thaliana

SEQ ID NO: 98200 - DNA, 1756 bp, Arabidopsis thaliana
  misc_feature (1)..(1756): Ceres Seq. ID no. 13580810
  misc_feature: MA Experiment ID: 108434 Result: Up-regulated in Transcription
  misc_feature: MA Experiment 108434 PARAMETER Experiment Name: At_Root_Tips_cDNA_P Parameter: Tissue Value: Root Tips
  misc_feature: MA Experiment ID: 108435 Result: Up-regulated in Transcription
  misc_feature: MA Experiment 108435 PARAMETER Experiment Name: At_stm_Mutants_cDNA_P Parameter: Plant Line Value: wt Landsburg vs stm
  misc_feature: MA Experiment 108435 PARAMETER Experiment Name: At_stm_Mutants_cDNA_P Parameter: Tissue Value: Shoot Apical Meristem Region
  misc_feature: MA Experiment ID: 108462 Result: Down-regulated in Transcription
  misc_feature: MA Experiment 108462 PARAMETER Experiment Name: At_Germinating_Seeds_cDNA_P Parameter: Age (day) Value: 2 vs. 0
  misc_feature: MA Experiment 108462 PARAMETER Experiment Name: At_Germinating_Seeds_cDNA_P Parameter: Tissue Value: Germinating Seeds
  misc_feature: MA Experiment ID: 108463 Result: Down-regulated in Transcription
  misc_feature: MA Experiment 108463 PARAMETER Experiment Name: At_Germinating_Seeds_cDNA_P Parameter: Age (day) Value: 3 vs. 0
  misc_feature: MA Experiment 108463 PARAMETER Experiment Name: At_Germinating_Seeds_cDNA_P Parameter: Tissue Value: Germinating Seeds
  misc_feature: MA Experiment ID: 108576 Result: Down-regulated in Transcription
  misc_feature: MA Experiment 108576 PARAMETER Experiment Name: At_42deg_Heat_cDNA_P Parameter: Temperature (deg C) Value: 42 vs. 22
  misc_feature: MA Experiment 108576 PARAMETER Experiment Name: At_42deg_Heat_cDNA_P Parameter: Timepoint (hr) Value: 1
  misc_feature: MA Experiment 108576 PARAMETER Experiment Name: At_42deg_Heat_cDNA_P Parameter: Tissue Value: Aerial
  misc_feature: MA Experiment ID: 20000794 Result: Down-regulated in Transcription
  misc_feature: MA Experiment 20000794 PARAMETER Experiment Name: At_Petals_P Parameter: Age (day) Value: 23-25 days
  misc_feature: MA Experiment 20000794 PARAMETER Experiment Name: At_Petals_P Parameter: Plant Line Value: WS
  misc_feature: MA Experiment 20000794 PARAMETER Experiment Name: At_Petals_P Parameter: Tissue Value: Petals vs. Whole plant
  misc_feature: MA Experiment ID: 20001558 Result: Up-regulated in Transcription
  misc_feature: MA Experiment 20001558 PARAMETER Experiment Name: At_Drought_Soil_Dry_P Parameter: Age (day) Value: 27
  misc_feature: MA Experiment 20001558 PARAMETER Experiment Name: At_Drought_Soil_Dry_P Parameter: Organism Value: A. thaliana
  misc_feature: MA Experiment 20001558 PARAMETER Experiment Name: At_Drought_Soil_Dry_P Parameter: Plant Line Value: WS
  misc_feature: MA Experiment 20001558 PARAMETER Experiment Name: At_Drought_Soil_Dry_P Parameter: Post Timepoint (hr) Value: 6
  misc_feature: MA Experiment 20001558 PARAMETER Experiment Name: At_Drought_Soil_Dry_P Parameter: Post-Treatment Value: Re-Water vs. No Drought
  misc_feature: MA Experiment 20001558 PARAMETER Experiment Name: At_Drought_Soil_Dry_P Parameter: Timepoint (day) Value: 13
  misc_feature: MA Experiment 20001558 PARAMETER Experiment Name: At_Drought_Soil_Dry_P Parameter: Treatment Value: Drought vs. No Drought
  misc_feature: MA Experiment ID: 20001560 Result: Up-regulated in Transcription
  misc_feature: MA Experiment 20001560 PARAMETER Experiment Name: At_Drought_Soil_Dry_P Parameter: Age (day) Value: 28
  misc_feature: MA Experiment 20001560 PARAMETER Experiment Name: At_Drought_Soil_Dry_P Parameter: Organism Value: A. thaliana
  misc_feature: MA Experiment 20001560 PARAMETER Experiment Name: At_Drought_Soil_Dry_P Parameter: Plant Line Value: WS
  misc_feature: MA Experiment 20001560 PARAMETER Experiment Name: At_Drought_Soil_Dry_P Parameter: Post Timepoint (hr) Value: None
  misc_feature: MA Experiment 20001560 PARAMETER Experiment Name: At_Drought_Soil_Dry_P Parameter: Post-Treatment Value: None
  misc_feature: MA Experiment 20001560 PARAMETER Experiment Name: At_Drought_Soil_Dry_P Parameter: Timepoint (day) Value: 14
  misc_feature: MA Experiment 20001560 PARAMETER Experiment Name: At_Drought_Soil_Dry_P Parameter: Treatment Value: Drought vs. No Drought
atggcgagaacgagaattataacgaaccgatttgaatctcgctttttgattcgtttccttgaatctccgactctattcgcctcttgtttcacgagttccagatctcttcaaaccctagcctacgaagaagtccgaacctccggtgatcgggagtctgaatctacagctctcatccttcatggcctcctcggttccggtcgcaactggagatcgttttctcgctcccttgcatcatctctctccgtctcctctgcttctgattggaagatgatattggttgatctgaggaaccatgggagatctgcggaagtggaagggcttaatccgcctcatgatcttgtgaattcagctaaggatttagctgatttggttaaagcaagtggctggaattggcctgatgtggtcattggtcactctttgggaggtaaagtggcgttgcagttcatggagagttgtgctcgtggtgattttggtgaatctgcttctcctcctaaacagctatgggtactagactctgtccctggggaagtcaaggcagaaaaaagtgatggtgaagtagagaaagttctgaagactttgcagagtttaccttcatcaatcccttctcgcaagtggcttgttgatcgtatggtcgaacttgggttttcaagatcattatccgagtggattggcagcaatctcaagagatctggagactcagagacatggacctttaaccttgacggagctgtccaaatgttcaactcttacagagagacttcttactggtctttgctagagaacccgccaaaagagacagagataaattttgtgattgcagaaaagagtgaccgatgggacaacgatacaaccaagcggcttgaaacaatagctaaccagagacagaatgtagccgaagggaaggttgcgactcatcttcttcgtaactctggccattgggtacacacagacaatccaaagggactcctagagattactattaaagcaaattctgatccgtctctttcgctagctaaaggtaaaaggcggaacaacaaaagaaaccctagcttccctttgtacctctctctgttccaaaccatgtcgaagagaaagaccaaagagccaaaggttgagaatgtgactcttggaccagctgttcgtgaaggagagcaagtctttggagttgttcacgtctttgcttcattcaacgacactttcattcacgtgactgatttgtctggacgggaaacacttgttcgcatcactggtggaatgaaggtgaaagccgacagagatgagtcctcaccttatgctgctatgcttgcggcacaagatgttgctcagcgatgcaaggaacttggaatcactgccatacatgtgaaactccgtgccactggtggtaacaagaccaagacccctggacctggtgctcagtctgctctaagagcccttgcccgttctggcatgaaaattggtcgcattgaggatgtgactccaatcccaaccgacagtacccgcagaaagggtggaagaagaggaaggaggctctgagttatttggcctctcgttggatctccttatgtagctttctcaatgtttcattttgttttttcttagtttgaaaagagttttggaattactatgctttgttatagtctcaactctgaacagctttggatctttttctgtatgaccataagatattcaaaaattggtagtcattttatctcacaaaaaaaccttgaatttgtgctgtatgattttgtaaagtctt

SEQ ID NO: 98201 - protein, 510 aa, Arabidopsis thaliana
  peptide (1)..(510): Ceres Seq. ID no. 13580811
  misc_feature (88)..(325): Pfam Name: alpha/beta hydrolase fold Pfam Description: alpha/beta hydrolase fold
  misc_feature (1)..(325): Homolog of NCBI NO: 22331752 NR Description: expressed protein [Arabidopsis thaliana] AT3g52570/F22O6_50 [Arabidopsis thaliana]
  misc_feature (1)..(325): Homolog of NCBI NO: 7486010 NR Description: hypothetical protein F22O6.50 - Arabidopsis >gi|4886270|emb|CAB43409.1| putative protein [Arabidopsis
  misc_feature (167)..(327): Homolog of NCBI NO: 34908512 NR Description: P0679C12.26 [Oryza sativa (japonica
  misc_feature (32)..(167): Homolog of NCBI NO: 34908512 NR Description: P0679C12.26 [Oryza sativa (japonica
  misc_feature (361)..(510): Homolog of NCBI NO: 15231260 NR Description: 40S ribosomal protein S14 (RPS14C) [Arabidopsis
  misc_feature (361)..(510): Homolog of NCBI NO: 15229775 NR Description: 40S ribosomal protein S14 (RPS14B) [Arabidopsis
  misc_feature (361)..(510): Homolog of NCBI NO: 15227588 NR Description: 40S ribosomal protein S14 (RPS14A) [Arabidopsis
  misc_feature (361)..(510): Homolog of NCBI NO: 28436071 NR Description: cytoplasmic ribosomal protein S14 [Brassica napus]
  misc_feature (363)..(510): Homolog of NCBI NO: 38346327 NR Description: OJ000126_13.9 [Oryza sativa (japonica
  misc_feature (361)..(510): Homolog of NCBI NO: 131772 NR Description: 40S RIBOSOMAL PROTEIN S14 (CLONE MCH1)
MARTRIITNRFESRFLIRFLESPTLFASCFTSSRSLQTLAYEEVRTSGDRESESTALILHGLLGSGRNWRSFSRSLASSLSVSSASDWKMILVDLRNHGRSAEVEGLNPPHDLVNSAKDLADLVKASGWNWPDVVIGHSLGGKVALQFMESCARGDFGESASPPKQLWVLDSVPGEVKAEKSDGEVEKVLKTLQSLPSSIPSRKWLVDRMVELGFSRSLSEWIGSNLKRSGDSETWTFNLDGAVQMFNSYRETSYWSLLENPPKETEINFVIAEKSDRWDNDTTKRLETIANQRQNVAEGKVATHLLRNSGHWVHTDNPKGLLEITIKANSDPSLSLAKGKRRNNKRNPSFPLYLSLFQTMSKRKTKEPKVENVTLGPAVREGEQVFGVVHVFASFNDTFIHVTDLSGRETLVRITGGMKVKADRDESSPYAAMLAAQDVAQRCKELGITAIHVKLRATGGNKTKTPGPGAQSALRALARSGMKIGRIEDVTPIPTDSTRRKGGRRGRRL

SEQ ID NO: 98202 - protein, 421 aa, Arabidopsis thaliana
  peptide (1)..(421): Ceres Seq. ID no. 13580812
  misc_feature (1)..(236): Pfam Name: alpha/beta hydrolase fold Pfam Description: alpha/beta hydrolase fold
  misc_feature (1)..(236): Homolog of NCBI NO: 22331752 NR Description: expressed protein [Arabidopsis thaliana] AT3g52570/F22O6_50 [Arabidopsis thaliana]
  misc_feature (1)..(236): Homolog of NCBI NO: 7486010 NR Description: hypothetical protein F22O6.50 - Arabidopsis >gi|4886270|emb|CAB43409.1| putative protein [Arabidopsis
  misc_feature (78)..(238): Homolog of NCBI NO: 34908512 NR Description: P0679C12.26 [Oryza sativa (japonica
  misc_feature (1)..(78): Homolog of NCBI NO: 34908512 NR Description: P0679C12.26 [Oryza sativa (japonica
  misc_feature (272)..(421): Homolog of NCBI NO: 15231260 NR Description: 40S ribosomal protein S14 (RPS14C) [Arabidopsis
  misc_feature (272)..(421): Homolog of NCBI NO: 15229775 NR Description: 40S ribosomal protein S14 (RPS14B) [Arabidopsis
  misc_feature (272)..(421): Homolog of NCBI NO: 15227588 NR Description: 40S ribosomal protein S14 (RPS14A) [Arabidopsis
  misc_feature (272)..(421): Homolog of NCBI NO: 28436071 NR Description: cytoplasmic ribosomal protein S14 [Brassica napus]
  misc_feature (274)..(421): Homolog of NCBI NO: 38346327 NR Description: OJ000126_13.9 [Oryza sativa (japonica
  misc_feature (272)..(421): Homolog of NCBI NO: 131772 NR Description: 40S RIBOSOMAL PROTEIN S14 (CLONE MCH1)
MILVDLRNHGRSAEVEGLNPPHDLVNSAKDLADLVKASGWNWPDVVIGHSLGGKVALQFMESCARGDFGESASPPKQLWVLDSVPGEVKAEKSDGEVEKVLKTLQSLPSSIPSRKWLVDRMVELGFSRSLSEWIGSNLKRSGDSETWTFNLDGAVQMFNSYRETSYWSLLENPPKETEINFVIAEKSDRWDNDTTKRLETIANQRQNVAEGKVATHLLRNSGHWVHTDNPKGLLEITIKANSDPSLSLAKGKRRNNKRNPSFPLYLSLFQTMSKRKTKEPKVENVTLGPAVREGEQVFGVVHVFASFNDTFIHVTDLSGRETLVRITGGMKVKADRDESSPYAAMLAAQDVAQRCKELGITAIHVKLRATGGNKTKTPGPGAQSALRALARSGMKIGRIEDVTPIPTDSTRRKGGRRGRRL

SEQ ID NO: 98203 - protein, 362 aa, Arabidopsis thaliana
  peptide (1)..(362): Ceres Seq. ID no. 13580813
  misc_feature (1)..(177): Pfam Name: alpha/beta hydrolase fold Pfam Description: alpha/beta hydrolase fold
  misc_feature (1)..(177): Homolog of NCBI NO: 22331752 NR Description: expressed protein [Arabidopsis thaliana] AT3g52570/F22O6_50 [Arabidopsis thaliana]
  misc_feature (1)..(177): Homolog of NCBI NO: 7486010 NR Description: hypothetical protein F22O6.50 - Arabidopsis >gi|4886270|emb|CAB43409.1| putative protein [Arabidopsis
  misc_feature (19)..(179): Homolog of NCBI NO: 34908512 NR Description: P0679C12.26 [Oryza sativa (japonica
  misc_feature (1)..(19): Homolog of NCBI NO: 34908512 NR Description: P0679C12.26 [Oryza sativa (japonica
  misc_feature (213)..(362): Homolog of NCBI NO: 15231260 NR Description: 40S ribosomal protein S14 (RPS14C) [Arabidopsis
  misc_feature (213)..(362): Homolog of NCBI NO: 15229775 NR Description: 40S ribosomal protein S14 (RPS14B) [Arabidopsis
  misc_feature (213)..(362): Homolog of NCBI NO: 15227588 NR Description: 40S ribosomal protein S14 (RPS14A) [Arabidopsis
  misc_feature (213)..(362): Homolog of NCBI NO: 28436071 NR Description: cytoplasmic ribosomal protein S14 [Brassica napus]
  misc_feature (215)..(362): Homolog of NCBI NO: 38346327 NR Description: OJ000126_13.9 [Oryza sativa (japonica
  misc_feature (213)..(362): Homolog of NCBI NO: 131772 NR Description: 40S RIBOSOMAL PROTEIN S14 (CLONE MCH1)
MESCARGDFGESASPPKQLWVLDSVPGEVKAEKSDGEVEKVLKTLQSLPSSIPSRKWLVDRMVELGFSRSLSEWIGSNLKRSGDSETWTFNLDGAVQMFNSYRETSYWSLLENPPKETEINFVIAEKSDRWDNDTTKRLETIANQRQNVAEGKVATHLLRNSGHWVHTDNPKGLLEITIKANSDPSLSLAKGKRRNNKRNPSFPLYLSLFQTMSKRKTKEPKVENVTLGPAVREGEQVFGVVHVFASFNDTFIHVTDLSGRETLVRITGGMKVKADRDESSPYAAMLAAQDVAQRCKELGITAIHVKLRATGGNKTKTPGPGAQSALRALARSGMKIGRIEDVTPIPTDSTRRKGGRRGRRL

SEQ ID NO: 98204 - DNA, 1175 bp, Arabidopsis thaliana
  misc_feature (1)..(1175): Ceres Seq. ID no. 13580824
  misc_feature: MA Experiment ID: 108573 Result: Up-regulated in Transcription
  misc_feature: MA Experiment 108573 PARAMETER Experiment Name: At_Drought_cDNA_P Parameter: Timepoint (hr) Value: 6
  misc_feature: MA Experiment 108573 PARAMETER Experiment Name: At_Drought_cDNA_P Parameter: Tissue Value: Aerial
  misc_feature: MA Experiment 108573 PARAMETER Experiment Name: At_Drought_cDNA_P Parameter: Treatment Value: Drought vs. No Drought
  misc_feature: MA Experiment ID: 108579 Result: Up-regulated in Transcription
  misc_feature: MA Experiment 108579 PARAMETER Experiment Name: At_4deg_Cold_cDNA_P Parameter: Temperature (deg C) Value: 4 vs. 22
  misc_feature: MA Experiment 108579 PARAMETER Experiment Name: At_4deg_Cold_cDNA_P Parameter: Timepoint (hr) Value: 6
  misc_feature: MA Experiment 108579 PARAMETER Experiment Name: At_4deg_Cold_cDNA_P Parameter: Tissue Value: Aerial
  misc_feature: MA Experiment ID: 108585 Result: Up-regulated in Transcription
  misc_feature: MA Experiment 108585 PARAMETER Experiment Name: At_5mM_NaNP_cDNA_P Parameter: Timepoint (hr) Value: 6
  misc_feature: MA Experiment 108585 PARAMETER Experiment Name: At_5mM_NaNP_cDNA_P Parameter: Tissue Value: Aerial
  misc_feature: MA Experiment 108585 PARAMETER Experiment Name: At_5mM_NaNP_cDNA_P Parameter: Treatment Value: null
  misc_feature: MA Experiment ID: 108608 Result: Up-regulated in Transcription
  misc_feature: MA Experiment 108608 PARAMETER Experiment Name: At_100uM_ABA_cDNA_P Parameter: Timepoint (hr) Value: 1
  misc_feature: MA Experiment 108608 PARAMETER Experiment Name: At_100uM_ABA_cDNA_P Parameter: Tissue Value: Aerial
  misc_feature: MA Experiment 108608 PARAMETER Experiment Name: At_100uM_ABA_cDNA_P Parameter: Treatment Value: 100uM ABA vs. No Treatment
  misc_feature: MA Experiment ID: 108668 Result: Up-regulated in Transcription
  misc_feature: MA Experiment 108668 PARAMETER Experiment Name: At_2mM_SA_cDNA_P Parameter: Plant Line Value: WS
  misc_feature: MA Experiment 108668 PARAMETER Experiment Name: At_2mM_SA_cDNA_P Parameter: Timepoint (hr) Value: 6
  misc_feature: MA Experiment 108668 PARAMETER Experiment Name: At_2mM_SA_cDNA_P Parameter: Treatment Value: 2mM SA vs. No Treatment
  misc_feature: MA Experiment ID: 20000166 Result: Up-regulated in Transcription
  misc_feature: MA Experiment 20000166 PARAMETER Experiment Name: At_100uM_ABA_P Parameter: Age (day) Value: 14
  misc_feature: MA Experiment 20000166 PARAMETER Experiment Name: At_100uM_ABA_P Parameter: Organism Value: A. thaliana
  misc_feature: MA Experiment 20000166 PARAMETER Experiment Name: At_100uM_ABA_P Parameter: Plant Line Value: WS
  misc_feature: MA Experiment 20000166 PARAMETER Experiment Name: At_100uM_ABA_P Parameter: Timepoint (hr) Value: 1
  misc_feature: MA Experiment 20000166 PARAMETER Experiment Name: At_100uM_ABA_P Parameter: Tissue Value: Aerial
  misc_feature: MA Experiment 20000166 PARAMETER Experiment Name: At_100uM_ABA_P Parameter: Treatment Value: 100uM ABA vs. No Treatment
  misc_feature: MA Experiment ID: 20000173 Result: Up-regulated in Transcription
  misc_feature: MA Experiment 20000173 PARAMETER Experiment Name: At_42deg_Heat_P Parameter: Age (day) Value: 14
  misc_feature: MA Experiment 20000173 PARAMETER Experiment Name: At_42deg_Heat_P Parameter: Organism Value: A. thaliana
  misc_feature: MA Experiment 20000173 PARAMETER Experiment Name: At_42deg_Heat_P Parameter: Plant Line Value: WS
  misc_feature: MA Experiment 20000173 PARAMETER Experiment Name: At_42deg_Heat_P Parameter: Temperature (deg C) Value: 42 vs. 22
  misc_feature: MA Experiment 20000173 PARAMETER Experiment Name: At_42deg_Heat_P Parameter: Timepoint (hr) Value: 6
  misc_feature: MA Experiment 20000173 PARAMETER Experiment Name: At_42deg_Heat_P Parameter: Tissue Value: Aerial
  misc_feature: MA Experiment ID: 20000182 Result: Up-regulated in Transcription
  misc_feature: MA Experiment 20000182 PARAMETER Experiment Name: At_2mM_SA_P Parameter: Age (day) Value: 14
  misc_feature: MA Experiment 20000182 PARAMETER Experiment Name: At_2mM_SA_P Parameter: Organism Value: A. thaliana
  misc_feature: MA Experiment 20000182 PARAMETER Experiment Name: At_2mM_SA_P Parameter: Plant Line Value: WS
  misc_feature: MA Experiment 20000182 PARAMETER Experiment Name: At_2mM_SA_P Parameter: Timepoint (hr) Value: 6
  misc_feature: MA Experiment 20000182 PARAMETER Experiment Name: At_2mM_SA_P Parameter: Tissue Value: Aerial
  misc_feature: MA Experiment 20000182 PARAMETER Experiment Name: At_2mM_SA_P Parameter: Treatment Value: 2mM SA vs. No Treatment
  misc_feature: MA Experiment ID: 20000436 Result: Up-regulated in Transcription
  misc_feature: MA Experiment 20000436 PARAMETER Experiment Name: At_Drought_P Parameter: Age (day) Value: 7
  misc_feature: MA Experiment 20000436 PARAMETER Experiment Name: At_Drought_P Parameter: Organism Value: A. thaliana
  misc_feature: MA Experiment 20000436 PARAMETER Experiment Name: At_Drought_P Parameter: Plant Line Value: WS
  misc_feature: MA Experiment 20000436 PARAMETER Experiment Name: At_Drought_P Parameter: Timepoint (hr) Value: 12
  misc_feature: MA Experiment 20000436 PARAMETER Experiment Name: At_Drought_P Parameter: Tissue Value: Whole Plant
  misc_feature: MA Experiment 20000436 PARAMETER Experiment Name: At_Drought_P Parameter: Treatment Value: Drought vs. No Drought
  misc_feature: MA Experiment ID: 20000437 Result: Up-regulated in Transcription
  misc_feature: MA Experiment 20000437 PARAMETER Experiment Name: At_Drought_P Parameter: Age (day) Value: 8
  misc_feature: MA Experiment 20000437 PARAMETER Experiment Name: At_Drought_P Parameter: Organism Value: A. thaliana
  misc_feature: MA Experiment 20000437 PARAMETER Experiment Name: At_Drought_P Parameter: Plant Line Value: WS
  misc_feature: MA Experiment 20000437 PARAMETER Experiment Name: At_Drought_P Parameter: Timepoint (hr) Value: 24
  misc_feature: MA Experiment 20000437 PARAMETER Experiment Name: At_Drought_P Parameter: Tissue Value: Whole Plant
  misc_feature: MA Experiment 20000437 PARAMETER Experiment Name: At_Drought_P Parameter: Treatment Value: Drought vs. No Drought
  misc_feature: MA Experiment ID: 20001905 Result: Up-regulated in Transcription
  misc_feature: MA Experiment 20001905 PARAMETER Experiment Name: At_Drought_Reproduction_P Parameter: Age (day) Value: 40
  misc_feature: MA Experiment 20001905 PARAMETER Experiment Name: At_Drought_Reproduction_P Parameter: Organism Value: A. thaliana
  misc_feature: MA Experiment 20001905 PARAMETER Experiment Name: At_Drought_Reproduction_P Parameter: Plant Line Value: WS
  misc_feature: MA Experiment 20001905 PARAMETER Experiment Name: At_Drought_Reproduction_P Parameter: Timepoint (day) Value: 10
  misc_feature: MA Experiment 20001905 PARAMETER Experiment Name: At_Drought_Reproduction_P Parameter: Tissue Value: Rosettes
  misc_feature: MA Experiment 20001905 PARAMETER Experiment Name: At_Drought_Reproduction_P Parameter: Treatment Value: Drought vs. No Drought
  misc_feature: MA Experiment ID: 20001911 Result: Up-regulated in Transcription
  misc_feature: MA Experiment 20001911 PARAMETER Experiment Name: At_Drought_Reproduction_P Parameter: Age (day) Value: 40
  misc_feature: MA Experiment 20001911 PARAMETER Experiment Name: At_Drought_Reproduction_P Parameter: Organism Value: A. thaliana
  misc_feature: MA Experiment 20001911 PARAMETER Experiment Name: At_Drought_Reproduction_P Parameter: Plant Line Value: WS
  misc_feature: MA Experiment 20001911 PARAMETER Experiment Name: At_Drought_Reproduction_P Parameter: Timepoint (day) Value: 10
  misc_feature: MA Experiment 20001911 PARAMETER Experiment Name: At_Drought_Reproduction_P Parameter: Tissue Value: Flowers
  misc_feature: MA Experiment 20001911 PARAMETER Experiment Name: At_Drought_Reproduction_P Parameter: Treatment Value: Drought vs. No Drought
aaaaggtaaaaactttgggaagcagctaaaatactgtgttctttgtttcttccatcgaaatcgaaaaaagctaagatctttgcgttttgaaacgatggcggaagaacataagcatgatgaatctgtgatcgctcctgagccagctgttgaggttgtggagagagaatcgttgatggataagatatcggagaagatccatcacggtggtgattcttcttcgtcttcttcatcttctgatgatgaagacgagaagaagaagactaagaagccctcttctccttcgtcttctatgaaatcgaaagtttaccgcttgttcggacgagagcagcctgttcataaggttctcggcggtggaaagccggctgatatattcatgtggaagaacaagaagatgtctggtggtgtacttggtggtgctacagctgcttgggttgtgtttgaattgatggagtaccatcttctcactctgctttgccacgtgatgattgttgttctcgctgtgctgtttttgtggtctaatgccactatgttcattaacaagtcccctccaaagattcctgaagttcatatccctgaagaacctattcttcagcttgcgtctgggctcagaatcgagatcaaccgtggattctcttctctccgtgaaattgcatcaggaagggatctcaagaaattcctcattgctattgccgggttatgggttctctcaatcttgggcggttgcttcaacttcttgacattggcatacatagctcttgtgttgctcttcacggttcctcttgcctacgacaagtatgaagacaaagtcgacccattaggtgagaaagcaatgatcgagctcaagaagcagtatgcagtgttggatgagaaggtgttgagcaagatcccacttgggccgttgaagaacaagaagaaagattaggggtttacacaaggttgtccgtggctagcaaaacgggtgttgtgaaatggtatcgaagtaatgtgttttgggcgtttttttaggtggctctttcggttatgtgaatgaacttggaattttcctgactggtttgttctgttgtttatgtcattgttgatcagcgtcgagggataaaagtagtgatatttcttctctctctaagcctctatataactaagaatttcaagatatttgaattttgcaatctcgtggt

SEQ ID NO: 98205 - protein, 306 aa, Arabidopsis thaliana
  peptide (1)..(306): Ceres Seq. ID no. 13580825
  misc_feature (32)..(306): Homolog of NCBI NO: 15236556 NR Description: expressed protein [Arabidopsis thaliana]
  misc_feature (32)..(306): Homolog of NCBI NO: 15237093 NR Description: expressed protein [Arabidopsis thaliana]
  misc_feature (55)..(306): Homolog of NCBI NO: 15238125 NR Description: expressed protein [Arabidopsis thaliana] contains similarity to 24 kDa seed maturation [Arabidopsis thaliana] >gi|14334530|gb|AAK59673.1| unknown
  misc_feature (53)..(304): Homolog of NCBI NO: 34909318 NR Description: OSJNBb0021A09.5 [Oryza sativa (japonica
  misc_feature (48)..(306): Homolog of NCBI NO: 15222616 NR Description: expressed protein [Arabidopsis thaliana] F22C12.15 [Arabidopsis thaliana] >gi|17381218|gb|AAL36421.1| protein [Arabidopsis thaliana] >gi|21436435|gb|AAM51418.1|
  misc_feature (55)..(304): Homolog of NCBI NO: 34904202 NR Description: P0492F05.25 [Oryza sativa (japonica
  misc_feature (43)..(305): Homolog of NCBI NO: 18406991 NR Description: expressed protein [Arabidopsis thaliana]
  misc_feature (46)..(296): Homolog of NCBI NO: 15234108 NR Description: hypothetical protein [Arabidopsis thaliana]
  misc_feature (43)..(303): Homolog of NCBI NO: 15233147 NR Description: hypothetical protein [Arabidopsis thaliana]
  misc_feature (84)..(306): Homolog of NCBI NO: 34897094 NR Description: unknown protein [Oryza sativa (japonica
KGKNFGKQLKYCVLCFFHRNRKKLRSLRFETMAEEHKHDESVIAPEPAVEVVERESLMDKISEKIHHGGDSSSSSSSSDDEDEKKKTKKPSSPSSSMKSKVYRLFGREQPVHKVLGGGKPADIFMWKNKKMSGGVLGGATAAWVVFELMEYHLLTLLCHVMIVVLAVLFLWSNATMFINKSPPKIPEVHIPEEPILQLASGLRIEINRGFSSLREIASGRDLKKFLIAIAGLWVLSILGGCFNFLTLAYIALVLLFTVPLAYDKYEDKVDPLGEKAMIELKKQYAVLDEKVLSKIPLGPLKNKKKD

SEQ ID NO: 98206 - protein, 275 aa, Arabidopsis thaliana; identical to SEQ ID NO: 24857
  peptide (1)..(275): Ceres Seq. ID no. 13580826
  misc_feature (1)..(275): Homolog of NCBI NO: 15236556 NR Description: expressed protein [Arabidopsis thaliana]
  misc_feature (1)..(275): Homolog of NCBI NO: 15237093 NR Description: expressed protein [Arabidopsis thaliana]
  misc_feature (24)..(275): Homolog of NCBI NO: 15238125 NR Description: expressed protein [Arabidopsis thaliana] contains similarity to 24 kDa seed maturation [Arabidopsis thaliana] >gi|14334530|gb|AAK59673.1| unknown
  misc_feature (22)..(273): Homolog of NCBI NO: 34909318 NR Description: OSJNBb0021A09.5 [Oryza sativa (japonica
  misc_feature (17)..(275): Homolog of NCBI NO: 15222616 NR Description: expressed protein [Arabidopsis thaliana] F22C12.15 [Arabidopsis thaliana] >gi|17381218|gb|AAL36421.1| protein [Arabidopsis thaliana] >gi|21436435|gb|AAM51418.1|
  misc_feature (24)..(273): Homolog of NCBI NO: 34904202 NR Description: P0492F05.25 [Oryza sativa (japonica
  misc_feature (12)..(274): Homolog of NCBI NO: 18406991 NR Description: expressed protein [Arabidopsis thaliana]
  misc_feature (15)..(265): Homolog of NCBI NO: 15234108 NR Description: hypothetical protein [Arabidopsis thaliana]
  misc_feature (12)..(272): Homolog of NCBI NO: 15233147 NR Description: hypothetical protein [Arabidopsis thaliana]
  misc_feature (53)..(275): Homolog of NCBI NO: 34897094 NR Description: unknown protein [Oryza sativa (japonica

SEQ ID NO: 98207 - protein, 249 aa, Arabidopsis thaliana; identical to SEQ ID NO: 24858
  peptide (1)..(249): Ceres Seq. ID no. 13580827
  misc_feature (1)..(249): Homolog of NCBI NO: 15236556 NR Description: expressed protein [Arabidopsis thaliana]
  misc_feature (1)..(249): Homolog of NCBI NO: 15237093 NR Description: expressed protein [Arabidopsis thaliana]
  misc_feature (1)..(249): Homolog of NCBI NO: 15238125 NR Description: expressed protein [Arabidopsis thaliana] contains similarity to 24 kDa seed maturation [Arabidopsis thaliana] >gi|14334530|gb|AAK59673.1| unknown
  misc_feature (1)..(247): Homolog of NCBI NO: 34909318 NR Description: OSJNBb0021A09.5 [Oryza sativa (japonica
  misc_feature (1)..(249): Homolog of NCBI NO: 15222616 NR Description: expressed protein [Arabidopsis thaliana] F22C12.15 [Arabidopsis thaliana] >gi|17381218|gb|AAL36421.1| protein [Arabidopsis thaliana] >gi|21436435|gb|AAM51418.1|
  misc_feature (1)..(247): Homolog of NCBI NO: 34904202 NR Description: P0492F05.25 [Oryza sativa (japonica
  misc_feature (1)..(248): Homolog of NCBI NO: 18406991 NR Description: expressed protein [Arabidopsis thaliana]
  misc_feature (1)..(239): Homolog of NCBI NO: 15234108 NR Description: hypothetical protein [Arabidopsis thaliana]
  misc_feature (1)..(246): Homolog of NCBI NO: 15233147 NR Description: hypothetical protein [Arabidopsis thaliana]
  misc_feature (27)..(249): Homolog of NCBI NO: 34897094 NR Description: unknown protein [Oryza sativa (japonica

SEQ ID NO: 98208 - DNA, 1830 bp, Arabidopsis thaliana
  misc_feature (1)..(1830): Ceres Seq. ID no. 13580828
  misc_feature: MA Experiment ID: 108469 Result: Up-regulated in Transcription
  misc_feature: MA Experiment ID: 108573 Result: Up-regulated in Transcription
  misc_feature: MA Experiment 108573 PARAMETER Experiment Name: At_Drought_cDNA_P Parameter: Timepoint (hr) Value: 6
  misc_feature: MA Experiment 108573 PARAMETER Experiment Name: At_Drought_cDNA_P Parameter: Tissue Value: Aerial
  misc_feature: MA Experiment 108573 PARAMETER Experiment Name: At_Drought_cDNA_P Parameter: Treatment Value: Drought vs. No Drought
  misc_feature: MA Experiment ID: 108585 Result: Up-regulated in Transcription
  misc_feature: MA Experiment 108585 PARAMETER Experiment Name: At_5mM_NaNP_cDNA_P Parameter: Timepoint (hr) Value: 6
  misc_feature: MA Experiment 108585 PARAMETER Experiment Name: At_5mM_NaNP_cDNA_P Parameter: Tissue Value: Aerial
  misc_feature: MA Experiment 108585 PARAMETER Experiment Name: At_5mM_NaNP_cDNA_P Parameter: Treatment Value: null
  misc_feature: MA Experiment ID: 20000182 Result: Up-regulated in Transcription
  misc_feature: MA Experiment 20000182 PARAMETER Experiment Name: At_2mM_SA_P Parameter: Age (day) Value: 14
  misc_feature: MA Experiment 20000182 PARAMETER Experiment Name: At_2mM_SA_P Parameter: Organism Value: A. thaliana
  misc_feature: MA Experiment 20000182 PARAMETER Experiment Name: At_2mM_SA_P Parameter: Plant Line Value: WS
  misc_feature: MA Experiment 20000182 PARAMETER Experiment Name: At_2mM_SA_P Parameter: Timepoint (hr) Value: 6
  misc_feature: MA Experiment 20000182 PARAMETER Experiment Name: At_2mM_SA_P Parameter: Tissue Value: Aerial
  misc_feature: MA Experiment 20000182 PARAMETER Experiment Name: At_2mM_SA_P Parameter: Treatment Value: 2mM SA vs. No Treatment
  misc_feature: MA Experiment ID: 20000794 Result: Down-regulated in Transcription
  misc_feature: MA Experiment 20000794 PARAMETER Experiment Name: At_Petals_P Parameter: Age (day) Value: 23-25 days
  misc_feature: MA Experiment 20000794 PARAMETER Experiment Name: At_Petals_P Parameter: Plant Line Value: WS
  misc_feature: MA Experiment 20000794 PARAMETER Experiment Name: At_Petals_P Parameter: Tissue Value: Petals vs. Whole plant
aaggtgaccttcgtctttggttgaccatcaaaaactacaacgctctttctccgtaggaaaggggaagcaaataaattatcgaagcccactggtttcggagctgatcggtctctatttctctcttcatacatatctcaagcagataaagttgatcggatactagaatgggaggaggatttagagttttgcatttggtgaggccattcttggcttttctgcctgaggttcagagtgctgataggaaggttccattcagagagaaggttatctacactgtcatctctctcttcatctttcttgtctgcagtcagcttcctctttatggaatccattccaccaccggtgcggatccattctattggatgcgtgtcattcttgcgtccaaccgtggaactgtcatggagctcggtattactcctattgttacatctggacttgtgatgcaactcttggctggttccaagattattgaggttgacaacaatgttcgtgaggatcgtgccctcttgaatggtgctcagaagcttctaggtattctgattgccattggtgaggctgttgcatatgttctttctggaatgtatggtcccgttggacagcttggtgttggaaatgccattctgatcatccttcagcttttctttgctggaatcattgttatctgccttgatgaactccttcagaagggatatggtctcggatcaggaatctcccttttcattgccaccaacatttgtgaaagcattatctggaaggcatttagcccaactaccatcaacaccgggcgtggagctgagtttgaaggtgctgttattgcactgttccatatgctgataaccaagtccaacaaggttgcggctctccgccaagctttctaccggcaaaaccttccaaatgttaccaacttgcttgccacagtcttgatcttcctgattgtgatctacttccaaggtttccgtgtggttttgcctgtgagatcaaagaatgcccgtggacaacagggttcttacccaatcaagctgttctacacctctaacatgcccatcatcctccaatccgccctcgtctcaaatctttacttcatttctcagcttctctaccggaagttcagcggaaatttctttgtaaaccttttgggacaatggaaagaatctgagtacagtggacaatctattccagttagtggtctggcttacctcatcacagctccagcaagtttctctgacatggcagctcacccgttccatgcactgttctacatcgtcttcatgctcactgcttgtgctcttttctcaaagacatggattgaagtctctggatcttctgctagggatgtagctaagcagctaaaggaacaacaaatggtgatgccaggacacagagaatcaaacttacagaaggaactgaacagatacatcccaacagcagcagcttttggaggagtttgtatcggtgcacttaccgttttggctgatttcatgggagccatcgggtcgggaaccggaattctgttggcggtcacgatcatataccagtatttcgagacctttgagaaggaaaaagccagtgaactcggcttcttcgggttctaagttagcttaaagaaggtgtaaactttgcctgaggcaaaaaagcagagcagaagaggctttagcttctgtgcccacctcaaacacagacaatttgtggtggcacttgggttagactacttttttttgttgttgttgaaacgaaattttctctttagtcatttatgtttttttgttactttttacaagttaaaaaacttatgtgatagacgcttttctaatgtatgtttctaggaatttc

SEQ ID NO: 98209 - protein, 475 aa, Arabidopsis thaliana; identical to SEQ ID NO: 26949
  peptide (1)..(475): Ceres Seq. ID no. 13580829
  misc_feature (77)..(461): Pfam Name: eubacterial secY protein Pfam Description: eubacterial secY protein
  misc_feature (1)..(475): Homolog of NCBI NO: 15226261 NR Description: protein transport protein SEC61 alpha subunit [Arabidopsis thaliana] >gi|7446500|pir||T02313 endoplasmic
  misc_feature (1)..(475): Homolog of NCBI NO: 20260296 NR Description: putative protein transport protein SEC61 alpha
  misc_feature (1)..(475): Homolog of NCBI NO: 15218887 NR Description: flower pigmentation protein ATAN11 [Arabidopsis
  misc_feature (1)..(475): Homolog of NCBI NO: 21593089 NR Description: putative protein transport protein SEC61 alpha
  misc_feature (1)..(475): Homolog of NCBI NO: 6581004 NR Description: putative integral membrane protein [Phaseolus
  misc_feature (1)..(475): Homolog of NCBI NO: 8886324 NR Description: Sec61p [Triticum aestivum]
  misc_feature (1)..(475): Homolog of NCBI NO: 15375074 NR Description: Sec61 alpha subunit [Hordeum vulgare]
  misc_feature (1)..(474): Homolog of NCBI NO: 15219158 NR Description: protein transport protein sec61 alpha subunit [Arabidopsis thaliana] >gi|25307853|pir||B96816 hypothetical
  misc_feature (4)..(474): Homolog of NCBI NO: 23429003 NR Description: Sec61-alpha [Pagothenia borchgrevinki]
  misc_feature (4)..(474): Homolog of NCBI NO: 13517985 NR Description: Sec61 alpha form A [Oncorhynchus mykiss]

SEQ ID NO: 98210 - protein, 409 aa, Arabidopsis thaliana; identical to SEQ ID NO: 26950
  peptide (1)..(409): Ceres Seq. ID no. 13580830
  misc_feature (11)..(395): Pfam Name: eubacterial secY protein Pfam Description: eubacterial secY protein
  misc_feature (1)..(409): Homolog of NCBI NO: 15226261 NR Description: protein transport protein SEC61 alpha subunit [Arabidopsis thaliana] >gi|7446500|pir||T02313 endoplasmic
  misc_feature (1)..(409): Homolog of NCBI NO: 20260296 NR Description: putative protein transport protein SEC61 alpha
  misc_feature (1)..(409): Homolog of NCBI NO: 15218887 NR Description: flower pigmentation protein ATAN11 [Arabidopsis
  misc_feature (1)..(409): Homolog of NCBI NO: 21593089 NR Description: putative protein transport protein SEC61 alpha
  misc_feature (1)..(409): Homolog of NCBI NO: 6581004 NR Description: putative integral membrane protein [Phaseolus
  misc_feature (1)..(409): Homolog of NCBI NO: 8886324 NR Description: Sec61p [Triticum aestivum]
  misc_feature (1)..(409): Homolog of NCBI NO: 15375074 NR Description: Sec61 alpha subunit [Hordeum vulgare]
  misc_feature (1)..(408): Homolog of NCBI NO: 15219158 NR Description: protein transport protein sec61 alpha subunit [Arabidopsis thaliana] >gi|25307853|pir||B96816 hypothetical
  misc_feature (1)..(408): Homolog of NCBI NO: 23429003 NR Description: Sec61-alpha [Pagothenia borchgrevinki]
  misc_feature (1)..(408): Homolog of NCBI NO: 13517985 NR Description: Sec61 alpha form A [Oncorhynchus mykiss]

SEQ ID NO: 98211 - protein, 397 aa, Arabidopsis thaliana; identical to SEQ ID NO: 26951
  peptide (1)..(397): Ceres Seq. ID no. 13580831
  misc_feature (1)..(383): Pfam Name: eubacterial secY protein Pfam Description: eubacterial secY protein
  misc_feature (1)..(397): Homolog of NCBI NO: 15226261 NR Description: protein transport protein SEC61 alpha subunit [Arabidopsis thaliana] >gi|7446500|pir||T02313 endoplasmic
  misc_feature (1)..(397): Homolog of NCBI NO: 20260296 NR Description: putative protein transport protein SEC61 alpha
  misc_feature (1)..(397): Homolog of NCBI NO: 15218887 NR Description: flower pigmentation protein ATAN11 [Arabidopsis
  misc_feature (1)..(397): Homolog of NCBI NO: 21593089 NR Description: putative protein transport protein SEC61 alpha
  misc_feature (1)..(397): Homolog of NCBI NO: 6581004 NR Description: putative integral membrane protein [Phaseolus
  misc_feature (1)..(397): Homolog of NCBI NO: 8886324 NR Description: Sec61p [Triticum aestivum]
  misc_feature (1)..(397): Homolog of NCBI NO: 15375074 NR Description: Sec61 alpha subunit [Hordeum vulgare]
  misc_feature (1)..(396): Homolog of NCBI NO: 15219158 NR Description: protein transport protein sec61 alpha subunit [Arabidopsis thaliana] >gi|25307853|pir||B96816 hypothetical
  misc_feature (1)..(396): Homolog of NCBI NO: 23429003 NR Description: Sec61-alpha [Pagothenia borchgrevinki]
  misc_feature (1)..(396): Homolog of NCBI NO: 13517985 NR Description: Sec61 alpha form A [Oncorhynchus mykiss]

SEQ ID NO: 98212 - DNA, 754 bp, Arabidopsis thaliana
  misc_feature (1)..(754): Ceres Seq. ID no. 13580838
  misc_feature: MA Experiment ID: 20000496 Result: Down-regulated in Transcription
  misc_feature: MA Experiment 20000496 PARAMETER Experiment Name: At_Guard_Cells_P Parameter: Harvest Date Value: 7/19/2002
  misc_feature: MA Experiment 20000496 PARAMETER Experiment Name: At_Guard_Cells_P Parameter: Organism Value: Canola
  misc_feature: MA Experiment 20000496 PARAMETER Experiment Name: At_Guard_Cells_P Parameter: Tissue Value: Guard Cells vs. Leaves
aagtctacaaaccaaaagcacgctacagaagaagaggaagaagaagaagaagcagagacaacaagaagaagaagaaacagtctcatctcgccggagaagaagaaagatgtcgtggcaatcatacgtcgatgaccatctcatgtgcgaggtcgaaggcaaccacctcacacacgccgccatcttcggccaagacggcagtgtctgggctcagagctcagctttccctcagttgaagcctgcagagatagcaggaatcaacaaagactttgaagaagccggacatcttgccccaaccgggctattccttggcggtgagaagtacatggttgtccaaggtgaggctggagccgtcatccgagggaaaaagggacctggtggagtcactatcaagaagactactcaagctctagtctttggtatctatgatgaaccgatgaccggagggcaatgcaacttggtcgtggagaggctcggcgattaccttatcgagtctggtctctaagttcactcaaagtgcttcaaacaaatttcatttttcgggttctttcttcactagagaagcacccttctgccatgtattgtgatttgattgttgttgtgcatcaaacaaagttattatactcttaaaaagaacaaagaaacaatcatatttgttatggttttgatcctctcctatgatggctcttatgtttttctcttgtactgtatttcgtaatgtataattacgctttggaataaaaatttgagtttgtga

SEQ ID NO: 98213 - protein, 166 aa, Arabidopsis thaliana; identical to SEQ ID NO: 36054
  peptide (1)..(166): Ceres Seq. ID no. 13580839
  misc_feature (37)..(161): Pfam Name: Profilin Pfam Description: Profilin
  misc_feature (36)..(166): Homolog of NCBI NO: 15233538 NR Description: profilin 2 [Arabidopsis thaliana]
  misc_feature (36)..(166): Homolog of NCBI NO: 21554627 NR Description: profilin 2 [Arabidopsis thaliana]
  misc_feature (36)..(166): Homolog of NCBI NO: 9965571 NR Description: profilin [Arabidopsis thaliana]
  misc_feature (36)..(166): Homolog of NCBI NO: 15224838 NR Description: profilin 1 [Arabidopsis thaliana]
  misc_feature (37)..(166): Homolog of NCBI NO: 2781152 NR Description: Profilin I From Arabidopsis Thaliana
  misc_feature (36)..(166): Homolog of NCBI NO: 1346802 NR Description: PROFILIN 1 >gi|1076516|pir||S49351 profilin 1 -
  misc_feature (36)..(166): Homolog of NCBI NO: 12230421 NR Description: Profilin 1 >gi|3694872|gb|AAC62482.1| profilin
  misc_feature (36)..(166): Homolog of NCBI NO: 15809696 NR Description: profilin [Litchi chinensis]
  misc_feature (36)..(166): Homolog of NCBI NO: 34922934 NR Description: Profilin (Allergen Pru p 4.02)
  misc_feature (36)..(166): Homolog of NCBI NO: 16555785 NR Description: profilin [Capsicum annuum]

SEQ ID NO: 98214 - protein, 131 aa, Arabidopsis thaliana; identical to SEQ ID NO: 30808
  peptide (1)..(131): Ceres Seq. ID no. 13580840
  misc_feature (2)..(126): Pfam Name: Profilin Pfam Description: Profilin
  misc_feature (1)..(131): Homolog of NCBI NO: 15233538 NR Description: profilin 2 [Arabidopsis thaliana]
  misc_feature (1)..(131): Homolog of NCBI NO: 21554627 NR Description: profilin 2 [Arabidopsis thaliana]
  misc_feature (1)..(131): Homolog of NCBI NO: 9965571 NR Description: profilin [Arabidopsis thaliana]
  misc_feature (1)..(131): Homolog of NCBI NO: 15224838 NR Description: profilin 1 [Arabidopsis thaliana]
  misc_feature (2)..(131): Homolog of NCBI NO: 2781152 NR Description: Profilin I From Arabidopsis Thaliana
  misc_feature (1)..(131): Homolog of NCBI NO: 1346802 NR Description: PROFILIN 1 >gi|1076516|pir||S49351 profilin 1 -
  misc_feature (1)..(131): Homolog of NCBI NO: 12230421 NR Description: Profilin 1 >gi|3694872|gb|AAC62482.1| profilin
  misc_feature (1)..(131): Homolog of NCBI NO: 15809696 NR Description: profilin [Litchi chinensis]
  misc_feature (1)..(131): Homolog of NCBI NO: 34922934 NR Description: Profilin (Allergen Pru p 4.02)
  misc_feature (1)..(131): Homolog of NCBI NO: 16555785 NR Description: profilin [Capsicum annuum]

SEQ ID NO: 98215 - protein, 120 aa, Arabidopsis thaliana; identical to SEQ ID NO: 30809
  peptide (1)..(120): Ceres Seq. ID no. 13580841
  misc_feature (1)..(115): Pfam Name: Profilin Pfam Description: Profilin
  misc_feature (1)..(120): Homolog of NCBI NO: 15233538 NR Description: profilin 2 [Arabidopsis thaliana]
  misc_feature (1)..(120): Homolog of NCBI NO: 21554627 NR Description: profilin 2 [Arabidopsis thaliana]
  misc_feature (1)..(120): Homolog of NCBI NO: 9965571 NR Description: profilin [Arabidopsis thaliana]
  misc_feature (1)..(120): Homolog of NCBI NO: 15224838 NR Description: profilin 1 [Arabidopsis thaliana]
  misc_feature (1)..(120): Homolog of NCBI NO: 2781152 NR Description: Profilin I From Arabidopsis Thaliana
  misc_feature (1)..(120): Homolog of NCBI NO: 1346802 NR Description: PROFILIN 1 >gi|1076516|pir||S49351 profilin 1 -
  misc_feature (1)..(120): Homolog of NCBI NO: 12230421 NR Description: Profilin 1 >gi|3694872|gb|AAC62482.1| profilin
  misc_feature (1)..(120): Homolog of NCBI NO: 15809696 NR Description: profilin [Litchi chinensis]
  misc_feature (1)..(120): Homolog of NCBI NO: 34922934 NR Description: Profilin (Allergen Pru p 4.02)
  misc_feature (1)..(120): Homolog of NCBI NO: 16555785 NR Description: profilin [Capsicum annuum]

SEQ ID NO: 98216 - DNA, 1908 bp, Arabidopsis thaliana
  misc_feature (1)..(1908): Ceres Seq. ID no. 13588938
  misc_feature: MA Experiment ID: 20000173 Result: Down-regulated in Transcription
  misc_feature: MA Experiment 20000173 PARAMETER Experiment Name: At_42deg_Heat_P Parameter: Age (day) Value: 14
  misc_feature: MA Experiment 20000173 PARAMETER Experiment Name: At_42deg_Heat_P Parameter: Organism Value: A. thaliana
  misc_feature: MA Experiment 20000173 PARAMETER Experiment Name: At_42deg_Heat_P Parameter: Plant Line Value: WS
  misc_feature: MA Experiment 20000173 PARAMETER Experiment Name: At_42deg_Heat_P Parameter: Temperature (deg C) Value: 42 vs. 22
  misc_feature: MA Experiment 20000173 PARAMETER Experiment Name: At_42deg_Heat_P Parameter: Timepoint (hr) Value: 6
  misc_feature: MA Experiment 20000173 PARAMETER Experiment Name: At_42deg_Heat_P Parameter: Tissue Value: Aerial
  misc_feature: MA Experiment ID: 20000180 Result: Up-regulated in Transcription
  misc_feature: MA Experiment 20000180 PARAMETER Experiment Name: At_Germinating_Seeds_P Parameter: Age (hr) Value: 24 vs. 0
  misc_feature: MA Experiment 20000180 PARAMETER Experiment Name: At_Germinating_Seeds_P Parameter: Tissue Value: Germinating Seeds
  misc_feature: MA Experiment ID: 20000185 Result: Up-regulated in Transcription
  misc_feature: MA Experiment 20000185 PARAMETER Experiment Name: At_Roots__P Parameter: Age (day) Value: 7 vs. 21
  misc_feature: MA Experiment 20000185 PARAMETER Experiment Name: At_Roots__P Parameter: Organism Value: A. thaliana
  misc_feature: MA Experiment 20000185 PARAMETER Experiment Name: At_Roots__P Parameter: Tissue Value: Roots vs. Whole Plant
  misc_feature: MA Experiment ID: 20000234 Result: Up-regulated in Transcription
  misc_feature: MA Experiment 20000234 PARAMETER Experiment Name: At_Siliques_P Parameter: Age (day) Value: 21
  misc_feature: MA Experiment 20000234 PARAMETER Experiment Name: At_Siliques_P Parameter: Organism Value: A. thaliana
  misc_feature: MA Experiment 20000234 PARAMETER Experiment Name: At_Siliques_P Parameter: Plant Line Value: WS
  misc_feature: MA Experiment 20000234 PARAMETER Experiment Name: At_Siliques_P Parameter: Tissue Value: Less Than 5mm Siliques vs. Whole Plant
  misc_feature: MA Experiment ID: 20000235 Result: Up-regulated in Transcription
  misc_feature: MA Experiment 20000235 PARAMETER Experiment Name: At_Siliques_P Parameter: Age (day) Value: 21
  misc_feature: MA Experiment 20000235 PARAMETER Experiment Name: At_Siliques_P Parameter: Organism Value: A. thaliana
  misc_feature: MA Experiment 20000235 PARAMETER Experiment Name: At_Siliques_P Parameter: Plant Line Value: WS
  misc_feature: MA Experiment 20000235 PARAMETER Experiment Name: At_Siliques_P Parameter: Tissue Value: 5-10mm Siliques vs. Whole Plant
  misc_feature: MA Experiment ID: 20000437 Result: Down-regulated in Transcription
  misc_feature: MA Experiment 20000437 PARAMETER Experiment Name: At_Drought_P Parameter: Age (day) Value: 8
  misc_feature: MA Experiment 20000437 PARAMETER Experiment Name: At_Drought_P Parameter: Organism Value: A. thaliana
  misc_feature: MA Experiment 20000437 PARAMETER Experiment Name: At_Drought_P Parameter: Plant Line Value: WS
  misc_feature: MA Experiment 20000437 PARAMETER Experiment Name: At_Drought_P Parameter: Timepoint (hr) Value: 24
  misc_feature: MA Experiment 20000437 PARAMETER Experiment Name: At_Drought_P Parameter: Tissue Value: Whole Plant
  misc_feature: MA Experiment 20000437 PARAMETER Experiment Name: At_Drought_P Parameter: Treatment Value: Drought vs. No Drought
  misc_feature: MA Experiment ID: 20000794 Result: Up-regulated in Transcription
  misc_feature: MA Experiment 20000794 PARAMETER Experiment Name: At_Petals_P Parameter: Age (day) Value: 23-25 days
  misc_feature: MA Experiment 20000794 PARAMETER Experiment Name: At_Petals_P Parameter: Plant Line Value: WS
  misc_feature: MA Experiment 20000794 PARAMETER Experiment Name: At_Petals_P Parameter: Tissue Value: Petals vs. Whole plant
  misc_feature: MA Experiment ID: 20001555 Result: Down-regulated in Transcription
  misc_feature: MA Experiment 20001555 PARAMETER Experiment Name: At_Drought_Soil_Dry_P Parameter: Age (day) Value: 24
  misc_feature: MA Experiment 20001555 PARAMETER Experiment Name: At_Drought_Soil_Dry_P Parameter: Organism Value: A. thaliana
  misc_feature: MA Experiment 20001555 PARAMETER Experiment Name: At_Drought_Soil_Dry_P Parameter: Plant Line Value: WS
  misc_feature: MA Experiment 20001555 PARAMETER Experiment Name: At_Drought_Soil_Dry_P Parameter: Post Timepoint (hr) Value: None
  misc_feature: MA Experiment 20001555 PARAMETER Experiment Name: At_Drought_Soil_Dry_P Parameter: Post-Treatment Value: None
  misc_feature: MA Experiment 20001555 PARAMETER Experiment Name: At_Drought_Soil_Dry_P Parameter: Timepoint (day) Value: 10
  misc_feature: MA Experiment 20001555 PARAMETER Experiment Name: At_Drought_Soil_Dry_P Parameter: Treatment Value: Drought vs. No Drought
  misc_feature: MA Experiment ID: 20001911 Result: Down-regulated in Transcription
  misc_feature: MA Experiment 20001911 PARAMETER Experiment Name: At_Drought_Reproduction_P Parameter: Age (day) Value: 40
  misc_feature: MA Experiment 20001911 PARAMETER Experiment Name: At_Drought_Reproduction_P Parameter: Organism Value: A. thaliana
  misc_feature: MA Experiment 20001911 PARAMETER Experiment Name: At_Drought_Reproduction_P Parameter: Plant Line Value: WS
  misc_feature: MA Experiment 20001911 PARAMETER Experiment Name: At_Drought_Reproduction_P Parameter: Timepoint (day) Value: 10
  misc_feature: MA Experiment 20001911 PARAMETER Experiment Name: At_Drought_Reproduction_P Parameter: Tissue Value: Flowers
  misc_feature: MA Experiment 20001911 PARAMETER Experiment Name: At_Drought_Reproduction_P Parameter: Treatment Value: Drought vs. No Drought
gaaaagaaagatcattagtttctgaggggataaccatttttttttcttcttaaaaagtttttttttttgtcaattggtcttcttcttcctcatccgctcgcttatatttaatttaataataataaaaatcggtgttcatttttatataaaagtataaattttgtgtttggttgatccatccgtagtcgtagtagatctacaagctctgaaattccacgcccacatctcctccgtcctcttgagatccttctcttcattcattttcttgctcaacttgagttgcttccaacatcttgcaagattgtctttgagttcattcaggtcttgaagaagagcactcttttaagctgtgtgaaacttgcgccgttcctgtgaagaactacttttggcattgcagatttcagagagctgtgatttgtgctatcttaaaaacggacaagttctatgttgtggcggatgagatgagggatgctatctgggttgatgaattttctgaatgcctgtctctggccacggtcagatcagcaggctcgttctgcctcagattctggtggccgccaagagggtttgctctggttcagagactccggccagcacgtctttggtgacttctccatggccgtcgttcaagccaacagcttgctagaggaccagagccagctcgagtctggctctcttagctcccacgactctggtccctttggcacctttgttggcgtctacgacggccacggtgggcctgagacatctcgcttcatcaatgatcatatgttccaccacctcaagaggtttactgcagagcaacagtgtatgtcatcagaggtgataaaaaaagcgttccaagccactgaagaaggcttcttatccatagttacaaatcaatttcaaactagacctcagatagccacagtgggatcatgctgtcttgtaagtgtcatctgcgatgggaagctatacgtggccaacgcaggggactcacgggccgttctgggacaagtcatgagggtaacaggtgaagctcatgccactcagctctcagcagagcacaacgcatctatagagtcagtgagacgggaacttcaggccctgcatccggatcatccagatattgtggttctgaaacataacgtctggcgagtaaaaggcatcattcaggtttcaagatccattggtgatgtgtatttgaaaaggtcagagttcaacagggaaccactgtatgcaaaattccggctgaggtcaccgttcagcaagccattactgagtgcagagccggcgatcacggtgcatacactggagccgcacgatcagttcattatatgtgcatcagatggactgtgggaacatatgagcaaccaagaagcagtagacatagtccagaatcatccgcgaaacgggatagcaaagcggctggtgaaagtagcgctacaagaagcggcaaagaagagagagatgagatactcagacctgaaaaagatagacagaggagtgaggagacatttccacgatgacataacagtgattgttgtcttctttgatacaaacctagtgagcagaggaagtatgttgagaggaccagccgtgtcagtgagaggagcgggtgtgaatctacctcacaacaccctggcgccttgcaccacgcccactcaagctgctgctgctggcgcctcctgactattgaatttttacggtgtccttaaaattctttccaagatccttcctgtaactatatataaatatatatatttgattattattatcattgactgggaaaggatatatcatcatcaagtgggaaaggatatatcataatcaagtggttagttttgtttgttccctttgttagctgtgtactggagaaagaaaggtgacaagaattcttcttcttcttcattaattttcattgcttgc

SEQ ID NO: 98217 - protein, 400 aa, Arabidopsis thaliana
  peptide (1)..(400): Ceres Seq. ID no. 13588939
  misc_feature (45)..(327): Pfam Name: Protein phosphatase 2C Pfam Description: Protein phosphatase 2C
  misc_feature (1)..(400): Homolog of NCBI NO: 22329238 NR Description: protein phosphatase-2c -related [Arabidopsis
  misc_feature (1)..(400): Homolog of NCBI NO: 17064756 NR Description: putative protein phosphatase-2c [Arabidopsis
  misc_feature (6)..(400): Homolog of NCBI NO: 7485891 NR Description: hypothetical protein F20M13.80 - Arabidopsis
  misc_feature (1)..(393): Homolog of NCBI NO: 11282004 NR Description: protein phosphatase 2C homolog [imported] - ice plant >gi|4206122|gb|AAD11430.1| protein phosphatase 2C
  misc_feature (1)..(396): Homolog of NCBI NO: 7768153 NR Description: protein phosphatase 2C (PP2C) [Fagus sylvatica]
  misc_feature (1)..(381): Homolog of NCBI NO: 15239244 NR Description: protein phosphatase 2C-related protein
  misc_feature (1)..(387): Homolog of NCBI NO: 18855039 NR Description: putative protein phosphatase [Oryza sativa]
  misc_feature (1)..(381): Homolog of NCBI NO: 11282001 NR Description: protein phosphatase 2C-like protein - Arabidopsis
  misc_feature (1)..(381): Homolog of NCBI NO: 20340237 NR Description: protein phosphatase 2c-like protein
  misc_feature (1)..(392): Homolog of NCBI NO: 37536574 NR Description: putative protein phosphatase 2C [Oryza sativa
MLSGLMNFLNACLWPRSDQQARSASDSGGRQEGLLWFRDSGQHVFGDFSMAVVQANSLLEDQSQLESGSLSSHDSGPFGTFVGVYDGHGGPETSRFINDHMFHHLKRFTAEQQCMSSEVIKKAFQATEEGFLSIVTNQFQTRPQIATVGSCCLVSVICDGKLYVANAGDSRAVLGQVMRVTGEAHATQLSAEHNASIESVRRELQALHPDHPDIVVLKHNVWRVKGIIQVSRSIGDVYLKRSEFNREPLYAKFRLRSPFSKPLLSAEPAITVHTLEPHDQFIICASDGLWEHMSNQEAVDIVQNHPRNGIAKRLVKVALQEAAKKREMRYSDLKKIDRGVRRHFHDDITVIVVFFDTNLVSRGSMLRGPAVSVRGAGVNLPHNTLAPCTTPTQAAAAGAS

SEQ ID NO: 98218 - protein, 395 aa, Arabidopsis thaliana
  peptide (1)..(395): Ceres Seq. ID no. 13588940
  misc_feature (40)..(322): Pfam Name: Protein phosphatase 2C Pfam Description: Protein phosphatase 2C
  misc_feature (1)..(395): Homolog of NCBI NO: 22329238 NR Description: protein phosphatase-2c -related [Arabidopsis
  misc_feature (1)..(395): Homolog of NCBI NO: 17064756 NR Description: putative protein phosphatase-2c [Arabidopsis
  misc_feature (1)..(395): Homolog of NCBI NO: 7485891 NR Description: hypothetical protein F20M13.80 - Arabidopsis
  misc_feature (1)..(388): Homolog of NCBI NO: 11282004 NR Description: protein phosphatase 2C homolog [imported] - ice plant >gi|4206122|gb|AAD11430.1| protein phosphatase 2C
  misc_feature (1)..(391): Homolog of NCBI NO: 7768153 NR Description: protein phosphatase 2C (PP2C) [Fagus sylvatica]
  misc_feature (1)..(376): Homolog of NCBI NO: 15239244 NR Description: protein phosphatase 2C-related protein
  misc_feature (1)..(382): Homolog of NCBI NO: 18855039 NR Description: putative protein phosphatase [Oryza sativa]
  misc_feature (1)..(376): Homolog of NCBI NO: 11282001 NR Description: protein phosphatase 2C-like protein - Arabidopsis
  misc_feature (1)..(376): Homolog of NCBI NO: 20340237 NR Description: protein phosphatase 2c-like protein
  misc_feature (1)..(387): Homolog of NCBI NO: 37536574 NR Description: putative protein phosphatase 2C [Oryza sativa
MNFLNACLWPRSDQQARSASDSGGRQEGLLWFRDSGQHVFGDFSMAVVQANSLLEDQSQLESGSLSSHDSGPFGTFVGVYDGHGGPETSRFINDHMFHHLKRFTAEQQCMSSEVIKKAFQATEEGFLSIVTNQFQTRPQIATVGSCCLVSVICDGKLYVANAGDSRAVLGQVMRVTGEAHATQLSAEHNASIESVRRELQALHPDHPDIVVLKHNVWRVKGIIQVSRSIGDVYLKRSEFNREPLYAKFRLRSPFSKPLLSAEPAITVHTLEPHDQFIICASDGLWEHMSNQEAVDIVQNHPRNGIAKRLVKVALQEAAKKREMRYSDLKKIDRGVRRHFHDDITVIVVFFDTNLVSRGSMLRGPAVSVRGAGVNLPHNTLAPCTTPTQAAAAGAS

SEQ ID NO: 98219 - protein, 351 aa, Arabidopsis thaliana
  peptide (1)..(351): Ceres Seq. ID no. 13588941
  misc_feature (1)..(278): Pfam Name: Protein phosphatase 2C Pfam Description: Protein phosphatase 2C
  misc_feature (1)..(351): Homolog of NCBI NO: 22329238 NR Description: protein phosphatase-2c -related [Arabidopsis
  misc_feature (1)..(351): Homolog of NCBI NO: 17064756 NR Description: putative protein phosphatase-2c [Arabidopsis
  misc_feature (1)..(351): Homolog of NCBI NO: 7485891 NR Description: hypothetical protein F20M13.80 - Arabidopsis
  misc_feature (1)..(344): Homolog of NCBI NO: 11282004 NR Description: protein phosphatase 2C homolog [imported] - ice plant >gi|4206122|gb|AAD11430.1| protein phosphatase 2C
  misc_feature (1)..(347): Homolog of NCBI NO: 7768153 NR Description: protein phosphatase 2C (PP2C) [Fagus sylvatica]
  misc_feature (1)..(332): Homolog of NCBI NO: 15239244 NR Description: protein phosphatase 2C-related protein
  misc_feature (1)..(338): Homolog of NCBI NO: 18855039 NR Description: putative protein phosphatase [Oryza sativa]
  misc_feature (1)..(332): Homolog of NCBI NO: 11282001 NR Description: protein phosphatase 2C-like protein - Arabidopsis
  misc_feature (1)..(332): Homolog of NCBI NO: 20340237 NR Description: protein phosphatase 2c-like protein
  misc_feature (1)..(343): Homolog of NCBI NO: 37536574 NR Description: putative protein phosphatase 2C [Oryza sativa
MAVVQANSLLEDQSQLESGSLSSHDSGPFGTFVGVYDGHGGPETSRFINDHMFHHLKRFTAEQQCMSSEVIKKAFQATEEGFLSIVTNQFQTRPQIATVGSCCLVSVICDGKLYVANAGDSRAVLGQVMRVTGEAHATQLSAEHNASIESVRRELQALHPDHPDIVVLKHNVWRVKGIIQVSRSIGDVYLKRSEFNREPLYAKFRLRSPFSKPLLSAEPAITVHTLEPHDQFIICASDGLWEHMSNQEAVDIVQNHPRNGIAKRLVKVALQEAAKKREMRYSDLKKIDRGVRRHFHDDITVIVVFFDTNLVSRGSMLRGPAVSVRGAGVNLPHNTLAPCTTPTQAAAAGAS

SEQ ID NO: 98220 - DNA, 1381 bp, Arabidopsis thaliana
  misc_feature (1)..(1381): Ceres Seq. ID no. 13591537
  misc_feature: MA Experiment ID: 20000171 Result: Up-regulated in Transcription
  misc_feature: MA Experiment 20000171 PARAMETER Experiment Name: At_42deg_Heat_P Parameter: Age (day) Value: 14
  misc_feature: MA Experiment 20000171 PARAMETER Experiment Name: At_42deg_Heat_P Parameter: Organism Value: A. thaliana
  misc_feature: MA Experiment 20000171 PARAMETER Experiment Name: At_42deg_Heat_P Parameter: Plant Line Value: WS
  misc_feature: MA Experiment 20000171 PARAMETER Experiment Name: At_42deg_Heat_P Parameter: Temperature (deg C) Value: 42 vs. 22
  misc_feature: MA Experiment 20000171 PARAMETER Experiment Name: At_42deg_Heat_P Parameter: Timepoint (hr) Value: 1
  misc_feature: MA Experiment 20000171 PARAMETER Experiment Name: At_42deg_Heat_P Parameter: Tissue Value: Aerial
  misc_feature: MA Experiment ID: 20000184 Result: Down-regulated in Transcription
  misc_feature: MA Experiment 20000184 PARAMETER Experiment Name: At_Shoots__P Parameter: Age (day) Value: 7
  misc_feature: MA Experiment 20000184 PARAMETER Experiment Name: At_Shoots__P Parameter: Tissue Value: Shoots vs. Whole Plant
atcggaaaaaattaaaaaccctaatttgagcagatctttccaattgaaagcgaaccgtgaattttgagtctctttaccggcggcgaaaaaatgcttggtggattatacggagatcttcctccaccgaccgatgatgagaaacccagtggaaactcctcttccgtctggtcaagcagtaccaaaatggctccacctacacttcgcaaaccaccagcttttgctcccccgcaaacaatcttaagacctctcaacaaacctaaacctatcgtttcggctccgtacaagcctcctcctccttcgaattcatcgcaatcggtgcttattccggcgaacgaatcagcaccttcgcatcagcctgcattggttggtgtgacttcatcggtgattgaagagtacgatccagcgagacctaacgattacgaggagtataagagggagaagaagaggaaagctacggaagctgagatgaaacgagagatggataagagaaggcaagaggatgaggaaagagataagagagaaagagaagagagggagaaggagagagagagagataacagtgatccgtctcggttgaatatctccggtgaggaagcgtggaagagacgcgctgctatgagtggtggtggaagtggtgggaagggaagatcttcgtctccgccggggaatgttgatgggtttagtattgggaaatcggagacgagtgggttaggagtaggagcaggtggacagatgacagctgctcagaggatgatggcgaagatgggatggaaacaaggacaagggcttgggaaatcagagcaagggattactacgccattgatggctaagaagactgatcgtagagctggtgtcattgtcaatgctagtgagaataaatcttcttcggcggagaagaaggttgttaagagtgttaatatcaatggtgaaccaaccagggttttgcttcttagaaacatggttgggccaggacaagtagatgatgagctagaagatgaggtaggaggcgagtgtggcaaatacggtacagtcactcgtgtactgatattcgagatcactgaaccgaacttccctgtacacgaagcagtaagaatctttgttcagttttcaagacccgaggaaacaactaaagcccttgtagacctcgatgggagatactttggaggaagaaccgtacgtgcaacgttctatgatgaagagaaattcagtaagaacgagttggctccagttccaggtgaaatccctggctattaataactcctaagacaaagaagaaacttcatcttctaggagattcttgttagagaaagaaaccatagatgaggttttaaaaacatttgtaaagtacttagaaatcttgggattatctctttattgttgt

SEQ ID NO: 98221 - protein, 387 aa, Arabidopsis thaliana; identical to SEQ ID NO: 45982
  peptide (1)..(387): Ceres Seq. ID no. 13591538
  misc_feature (285)..(364): Pfam Name: RNA recognition motif. (a.k.a. RRM, RBD, or RNP domain) Pfam Description: RNA recognition motif. (a.k.a. RRM, RBD, or RNP
  misc_feature (1)..(387): Homolog of NCBI NO: 15220757 NR Description: DNA damage repair protein -related [Arabidopsis
  misc_feature (1)..(387): Homolog of NCBI NO: 421829 NR Description: DNA-damage repair protein DRT111 precursor -
  misc_feature (44)..(387): Homolog of NCBI NO: 34913374 NR Description: putative DNA damage repair protein [Oryza sativa
  misc_feature (1)..(271): Homolog of NCBI NO: 34913374 NR Description: putative DNA damage repair protein [Oryza sativa
  misc_feature (58)..(378): Homolog of NCBI NO: 14290573 NR Description: Unknown (protein for IMAGE:3868191) [Homo sapiens]
  misc_feature (58)..(378): Homolog of NCBI NO: 14249678 NR Description: splicing factor (45kD) [Homo sapiens] Similar to splicing factor (45kD) [Homo sapiens]
  misc_feature (51)..(378): Homolog of NCBI NO: 22779924 NR Description: RIKEN cDNA 2700027J02 [Mus musculus]
  misc_feature (99)..(383): Homolog of NCBI NO: 21666567 NR Description: DNA repair enzyme [Toxoplasma gondii]
  misc_feature (15)..(261): Homolog of NCBI NO: 30923530 NR Description: CG17540-PA.3 [Drosophila melanogaster]
  misc_feature (281)..(372): Homolog of NCBI NO: 30923530 NR Description: CG17540-PA.3 [Drosophila melanogaster]

SEQ ID NO: 98222 - protein, 356 aa, Arabidopsis thaliana; identical to SEQ ID NO: 45983
  peptide (1)..(356): Ceres Seq. ID no. 13591539
  misc_feature (254)..(333): Pfam Name: RNA recognition motif. (a.k.a. RRM, RBD, or RNP domain) Pfam Description: RNA recognition motif. (a.k.a. RRM, RBD, or RNP
  misc_feature (1)..(356): Homolog of NCBI NO: 15220757 NR Description: DNA damage repair protein -related [Arabidopsis
  misc_feature (1)..(356): Homolog of NCBI NO: 421829 NR Description: DNA-damage repair protein DRT111 precursor -
  misc_feature (13)..(356): Homolog of NCBI NO: 34913374 NR Description: putative DNA damage repair protein [Oryza sativa
  misc_feature (1)..(240): Homolog of NCBI NO: 34913374 NR Description: putative DNA damage repair protein [Oryza sativa
  misc_feature (27)..(347): Homolog of NCBI NO: 14290573 NR Description: Unknown (protein for IMAGE:3868191) [Homo sapiens]
  misc_feature (27)..(347): Homolog of NCBI NO: 14249678 NR Description: splicing factor (45kD) [Homo sapiens] Similar to splicing factor (45kD) [Homo sapiens]
  misc_feature (20)..(347): Homolog of NCBI NO: 22779924 NR Description: RIKEN cDNA 2700027J02 [Mus musculus]
  misc_feature (68)..(352): Homolog of NCBI NO: 21666567 NR Description: DNA repair enzyme [Toxoplasma gondii]
  misc_feature (1)..(230): Homolog of NCBI NO: 30923530 NR Description: CG17540-PA.3 [Drosophila melanogaster]
  misc_feature (250)..(341): Homolog of NCBI NO: 30923530 NR Description: CG17540-PA.3 [Drosophila melanogaster]

SEQ ID NO: 98223 - protein, 262 aa, Arabidopsis thaliana; identical to SEQ ID NO: 45984
  peptide (1)..(262): Ceres Seq. ID no. 13591540
  misc_feature (160)..(239): Pfam Name: RNA recognition motif. (a.k.a. RRM, RBD, or RNP domain) Pfam Description: RNA recognition motif. (a.k.a. RRM, RBD, or RNP
  misc_feature (1)..(262): Homolog of NCBI NO: 15220757 NR Description: DNA damage repair protein -related [Arabidopsis
  misc_feature (1)..(262): Homolog of NCBI NO: 421829 NR Description: DNA-damage repair protein DRT111 precursor -
  misc_feature (1)..(262): Homolog of NCBI NO: 34913374 NR Description: putative DNA damage repair protein [Oryza sativa
  misc_feature (1)..(146): Homolog of NCBI NO: 34913374 NR Description: putative DNA damage repair protein [Oryza sativa
  misc_feature (1)..(253): Homolog of NCBI NO: 14290573 NR Description: Unknown (protein for IMAGE:3868191) [Homo sapiens]
  misc_feature (1)..(253): Homolog of NCBI NO: 14249678 NR Description: splicing factor (45kD) [Homo sapiens] Similar to splicing factor (45kD) [Homo sapiens]
  misc_feature (1)..(253): Homolog of NCBI NO: 22779924 NR Description: RIKEN cDNA 2700027J02 [Mus musculus]
  misc_feature (1)..(258): Homolog of NCBI NO: 21666567 NR Description: DNA repair enzyme [Toxoplasma gondii]
  misc_feature (1)..(136): Homolog of NCBI NO: 30923530 NR Description: CG17540-PA.3 [Drosophila melanogaster]
  misc_feature (156)..(247): Homolog of NCBI NO: 30923530 NR Description: CG17540-PA.3 [Drosophila melanogaster]

SEQ ID NO: 98224 - DNA, 1755 bp, Arabidopsis thaliana
  misc_feature (1)..(1755): Ceres Seq. ID no. 13591919
  misc_feature: MA Experiment ID: 20000171 Result: Down-regulated in Transcription
  misc_feature: MA Experiment 20000171 PARAMETER Experiment Name: At_42deg_Heat_P Parameter: Age (day) Value: 14
  misc_feature: MA Experiment 20000171 PARAMETER Experiment Name: At_42deg_Heat_P Parameter: Organism Value: A. thaliana
  misc_feature: MA Experiment 20000171 PARAMETER Experiment Name: At_42deg_Heat_P Parameter: Plant Line Value: WS
  misc_feature: MA Experiment 20000171 PARAMETER Experiment Name: At_42deg_Heat_P Parameter: Temperature (deg C) Value: 42 vs. 22
  misc_feature: MA Experiment 20000171 PARAMETER Experiment Name: At_42deg_Heat_P Parameter: Timepoint (hr) Value: 1
  misc_feature: MA Experiment 20000171 PARAMETER Experiment Name: At_42deg_Heat_P Parameter: Tissue Value: Aerial
  misc_feature: MA Experiment ID: 20000173 Result: Down-regulated in Transcription
  misc_feature: MA Experiment 20000173 PARAMETER Experiment Name: At_42deg_Heat_P Parameter: Age (day) Value: 14
  misc_feature: MA Experiment 20000173 PARAMETER Experiment Name: At_42deg_Heat_P Parameter: Organism Value: A. thaliana
  misc_feature: MA Experiment 20000173 PARAMETER Experiment Name: At_42deg_Heat_P Parameter: Plant Line Value: WS
  misc_feature: MA Experiment 20000173 PARAMETER Experiment Name: At_42deg_Heat_P Parameter: Temperature (deg C) Value: 42 vs. 22
  misc_feature: MA Experiment 20000173 PARAMETER Experiment Name: At_42deg_Heat_P Parameter: Timepoint (hr) Value: 6
  misc_feature: MA Experiment 20000173 PARAMETER Experiment Name: At_42deg_Heat_P Parameter: Tissue Value: Aerial
  misc_feature: MA Experiment ID: 20000180 Result: Up-regulated in Transcription
  misc_feature: MA Experiment 20000180 PARAMETER Experiment Name: At_Germinating_Seeds_P Parameter: Age (hr) Value: 24 vs. 0
  misc_feature: MA Experiment 20000180 PARAMETER Experiment Name: At_Germinating_Seeds_P Parameter: Tissue Value: Germinating Seeds
  misc_feature: MA Experiment ID: 20000234 Result: Up-regulated in Transcription
  misc_feature: MA Experiment 20000234 PARAMETER Experiment Name: At_Siliques_P Parameter: Age (day) Value: 21
  misc_feature: MA Experiment 20000234 PARAMETER Experiment Name: At_Siliques_P Parameter: Organism Value: A. thaliana
  misc_feature: MA Experiment 20000234 PARAMETER Experiment Name: At_Siliques_P Parameter: Plant Line Value: WS
  misc_feature: MA Experiment 20000234 PARAMETER Experiment Name: At_Siliques_P Parameter: Tissue Value: Less Than 5mm Siliques vs. Whole Plant
  misc_feature: MA Experiment ID: 20000265 Result: Up-regulated in Transcription
  misc_feature: MA Experiment 20000265 PARAMETER Experiment Name: At_Open_Flower_P Parameter: Age (day) Value: 21
  misc_feature: MA Experiment 20000265 PARAMETER Experiment Name: At_Open_Flower_P Parameter: Plant Line Value: WS
  misc_feature: MA Experiment 20000265 PARAMETER Experiment Name: At_Open_Flower_P Parameter: Tissue Value: Closed Flower vs. Whole Plant
  misc_feature: MA Experiment ID: 20000286 Result: Up-regulated in Transcription
  misc_feature: MA Experiment 20000286 PARAMETER Experiment Name: At_Open_Flower_P Parameter: Age (day) Value: 21
  misc_feature: MA Experiment 20000286 PARAMETER Experiment Name: At_Open_Flower_P Parameter: Plant Line Value: WS
  misc_feature: MA Experiment 20000286 PARAMETER Experiment Name: At_Open_Flower_P Parameter: Tissue Value: Half Open vs. Whole Plant
  misc_feature: MA Experiment ID: 20000794 Result: Up-regulated in Transcription
  misc_feature: MA Experiment 20000794 PARAMETER Experiment Name: At_Petals_P Parameter: Age (day) Value: 23-25 days
  misc_feature: MA Experiment 20000794 PARAMETER Experiment Name: At_Petals_P Parameter: Plant Line Value: WS
  misc_feature: MA Experiment 20000794 PARAMETER Experiment Name: At_Petals_P Parameter: Tissue Value: Petals vs. Whole plant
acagttagaaccaaagcaaaaaaaactaaaaagctcaagaagaaaaggatagagacgacaaaactccattgaagaacttattagagaagaagaacaacaacaaggaagataacgaaagtcactaaaatctttcaagacccatgaactctcaaatcactcttttcttcttcttcttctcaatcctctccctctcccaaatctcaaattcatcatcactactaaaaccacacccatgtccaattttacccctcccatcctcccaacagctccaatggcaactcggatccatggccatgttcctccattttggacccaacactttcaccgactccgaatggggcaccggaaaagctaacccatccattttcaacccgacccatctcaacgcaagtcaatgggtccaaatcgctaaagactcaggcttttcccgcgttatcctcacagctaagcaccatgatggattctgtctctggcctagcgaatacactgattactccgtcaaatctagccaatggagaaacggagccggcgatgtagtggctgaactagcttctgcggcaaaggaagctggaattggacttggtctttacctttctccatgggatcgacatgaacagtgttatggcaagacattggagtataacgagttctatctgagtcaaatgaccgagttactaacaaagtatggagagattaaggaagtttggttagatggagctaaaggagacggagagaaagatatggaatatttctttgatacttggtttagtttgatccatcagcttcagcctaaagctgttatattctctgacgctggtcctgatgtcaggtggattggtgatgaagctggtctagctggctctacttgctggtcactctttaacagaaccaatgcaaagattggtgacactgagccttcgtattctcaagaaggtgatggctatgggcaagattgggtaccagcggaatgtgatgtatcgattcgacccggttggttttggcatgcgtcggagtcgcctaaaccggctgttcagcttttggatatatactataactcagttggaagaaactgtctcttcttgcttaatgtacctcctaattcttcaggattgatatctgagcaagacattaaggttcttgaagagttcagcgaaatgaagaactccattttctcgaacaatctcgcccgtaaagcattcgttaactcgagcagtattcgtggcgatcaaagttcacagtttggtcctaagaatgttttggaagaaggattagacaagtactgggcgccagaagagaatcaaaacgaatgggtgttatacttagagtttaaagatttggttagcttcaatgtgttggagattcgagaaccaatccatatgggtcaaaggatcgcatctttccatctcgagacacggaagactggaagcggtgagtgggagagagttgtgagcggcacgacggttggtaacaaaaggcttttacggtttctgaatgttgttgagtcgcggtctctaaagcttgtggtggacaaagcgaggaccgacccacttatatcgtacctcggactctacatggataagttttcgggttctagtagaaacacaacaaagataacaatcacaaggacactaaaggaagagcagcaactacatgatttgtaagaaataactctcaaggattcatcacataagtgttaggtattcttgagaatatctatgtgcatcaagtcatatatgtgtcactatcaattcttgc

SEQ ID NO: 98225 - protein, 506 aa, Arabidopsis thaliana; identical to SEQ ID NO: 72670
  peptide (1)..(506): Ceres Seq. ID no. 13591920
  misc_feature (44)..(341): Pfam Name: Alpha-L-fucosidase Pfam Description: Alpha-L-fucosidase
  misc_feature (1)..(506): Homolog of NCBI NO: 30683758 NR Description: glycosyl hydrolase family 29 (alpha-L-fucosidase)
  misc_feature (1)..(506): Homolog of NCBI NO: 26453078 NR Description: unknown protein [Arabidopsis thaliana]
  misc_feature (29)..(482): Homolog of NCBI NO: 38345843 NR Description: OSJNBa0084K11.7 [Oryza sativa (japonica
  misc_feature (37)..(477): Homolog of NCBI NO: 18310858 NR Description: conserved hypothetical protein [Clostridium >gi|18145540|dbj|BAB81582.1| conserved hypothetical protein
  misc_feature (1)..(181): Homolog of NCBI NO: 25407953 NR Description: hypothetical protein At2g28100 [imported] - thaliana >gi|4063748|gb|AAC98456.1| unknown protein [Arabidopsis
  misc_feature (27)..(486): Homolog of NCBI NO: 15901959 NR Description: conserved hypothetical protein [Streptococcus TIGR4] >gi|25389606|pir||B95251 conserved hypothetical protein
  misc_feature (27)..(486): Homolog of NCBI NO: 15903995 NR Description: Hypothetical protein [Streptococcus pneumoniae R6]
  misc_feature (162)..(471): Homolog of NCBI NO: 38109219 NR Description: hypothetical protein MG06780.4 [Magnaporthe
  misc_feature (13)..(157): Homolog of NCBI NO: 38109219 NR Description: hypothetical protein MG06780.4 [Magnaporthe
  misc_feature (61)..(477): Homolog of NCBI NO: 29350121 NR Description: conserved hypothetical protein [Bacteroides

SEQ ID NO: 98226 - protein, 457 aa, Arabidopsis thaliana; identical to SEQ ID NO: 72671
  peptide (1)..(457): Ceres Seq. ID no. 13591921
  misc_feature (1)..(292): Pfam Name: Alpha-L-fucosidase Pfam Description: Alpha-L-fucosidase
  misc_feature (1)..(457): Homolog of NCBI NO: 30683758 NR Description: glycosyl hydrolase family 29 (alpha-L-fucosidase)
  misc_feature (1)..(457): Homolog of NCBI NO: 26453078 NR Description: unknown protein [Arabidopsis thaliana]
  misc_feature (1)..(433): Homolog of NCBI NO: 38345843 NR Description: OSJNBa0084K11.7 [Oryza sativa (japonica
  misc_feature (1)..(428): Homolog of NCBI NO: 18310858 NR Description: conserved hypothetical protein [Clostridium >gi|18145540|dbj|BAB81582.1| conserved hypothetical protein
  misc_feature (1)..(132): Homolog of NCBI NO: 25407953 NR Description: hypothetical protein At2g28100 [imported] - thaliana >gi|4063748|gb|AAC98456.1| unknown protein [Arabidopsis
  misc_feature (1)..(437): Homolog of NCBI NO: 15901959 NR Description: conserved hypothetical protein [Streptococcus TIGR4] >gi|25389606|pir||B95251 conserved hypothetical protein
  misc_feature (1)..(437): Homolog of NCBI NO: 15903995 NR Description: Hypothetical protein [Streptococcus pneumoniae R6]
  misc_feature (113)..(422): Homolog of NCBI NO: 38109219 NR Description: hypothetical protein MG06780.4 [Magnaporthe
  misc_feature (1)..(108): Homolog of NCBI NO: 38109219 NR Description: hypothetical protein MG06780.4 [Magnaporthe
  misc_feature (12)..(428): Homolog of NCBI NO: 29350121 NR Description: conserved hypothetical protein [Bacteroides

SEQ ID NO: 98227 - protein, 455 aa, Arabidopsis thaliana; identical to SEQ ID NO: 72672
  peptide (1)..(455): Ceres Seq. ID no. 13591922
  misc_feature (1)..(290): Pfam Name: Alpha-L-fucosidase Pfam Description: Alpha-L-fucosidase
  misc_feature (1)..(455): Homolog of NCBI NO: 30683758 NR Description: glycosyl hydrolase family 29 (alpha-L-fucosidase)
  misc_feature (1)..(455): Homolog of NCBI NO: 26453078 NR Description: unknown protein [Arabidopsis thaliana]
  misc_feature (1)..(431): Homolog of NCBI NO: 38345843 NR Description: OSJNBa0084K11.7 [Oryza sativa (japonica
  misc_feature (1)..(426): Homolog of NCBI NO: 18310858 NR Description: conserved hypothetical protein [Clostridium >gi|18145540|dbj|BAB81582.1| conserved hypothetical protein
  misc_feature (1)..(130): Homolog of NCBI NO: 25407953 NR Description: hypothetical protein At2g28100 [imported] - thaliana >gi|4063748|gb|AAC98456.1| unknown protein [Arabidopsis
  misc_feature (1)..(435): Homolog of NCBI NO: 15901959 NR Description: conserved hypothetical protein [Streptococcus TIGR4] >gi|25389606|pir||B95251 conserved hypothetical protein
  misc_feature (1)..(435): Homolog of NCBI NO: 15903995 NR Description: Hypothetical protein [Streptococcus pneumoniae R6]
  misc_feature (111)..(420): Homolog of NCBI NO: 38109219 NR Description: hypothetical protein MG06780.4 [Magnaporthe
  misc_feature (1)..(106): Homolog of NCBI NO: 38109219 NR Description: hypothetical protein MG06780.4 [Magnaporthe
  misc_feature (10)..(426): Homolog of NCBI NO: 29350121 NR Description: conserved hypothetical protein [Bacteroides

SEQ ID NO: 98228 - DNA, 1556 bp, Arabidopsis thaliana
  misc_feature (1)..(1556): Ceres Seq. ID no. 13592516
gaaaccacatgacacatgtgctccctaaacgtcgccgtgaccagatagctccggtcagagtcattatctctctctcgctcgctctctccatcttcatctctcttgctgaaaaatggcgaactcgagaactgtcttaatcttgtgcggtgactacatggaagactacgaggtgatggttccgttccaagctttacaagctttcggaatcaccgtccacaccgtctgccccggaaagaaagctggtgactcttgccccaccgccgttcacgatttttgtggccaccagacatattttgagtcacgaggtcacaatttcacgctcaatgcaacgtttgatgaagttgaccttagcaagtatgatggattggttataccaggaggacgtgctccagaatacctggccttgactgcatctgttgttgagctggttaaagagttctcaagatctggcaagcccattgcctctatttgccatgggcagttgatattggcagctgcagacacagtcaatggtcgaaaatgtacagcttatgcaactgttggaccttcccttgttgctgcaggtgccaagtgggtcgaaccgataactccggatgtctgtgttgttgatggtagtttgattactgcagctacatatgagggtcatcctgaatttatccagctttttgtcaaggctcttggcggtaaaataactggagcaaataaaaggatcttgtttctttgtggggattatatggaagactatgaagtcaaagtgcctttccagtcccttcaagctttgggatgtcaagttgatgcggtttgtccagagaagaaggctggtgatcgctgcccaactgcaatccatgactttgagggtgaccaaacttacagtgagaaaccaggccacacttttgctttaactactaactttgatgacctagtttcctcgagttatgatgctctggtcattcctggaggcagagcaccagaatatctggccttgaacgaacatgtccttaacatagttaaagagttcatgaattctgagaaaccagttgcgtctatttgccacggacaacagatcttagctgctgctggtgtcctcaagggaaggaaatgcactgcttatccagccgtgaaactgaacgtggtacttggaggaggaacttggctagaaccagatccaatcgacaggtgcttcactgacgggaatctagtaactggcgcagcatggcctggacacccggagtttgtttcacaactaatggctttgttgggcattcaggtttcattctaagttccatgttatgtaaacatcgttatcaagcagaacccatccaacacacttgtctactatggtatatgttactgccatcttttctatctcgtcttttgactagcttactgtcaagtcaatcacttgtgtttcataaagaaccccactgttgatgctttatgtaaagaatgaattctataagacttgtgctagttctcacaattgtaattcataactttcaaactatatccccaattaaaaatacaaacttgctagtgcacattgcaccgaatcttcc

SEQ ID NO: 98229 - protein, 388 aa, Arabidopsis thaliana
  peptide (1)..(388): Ceres Seq. ID no. 13592517
  misc_feature (1)..(388): Homolog of NCBI NO: 15232958 NR Description: protease-related [Arabidopsis thaliana] unknown protein [Arabidopsis thaliana]
  misc_feature (65)..(388): Homolog of NCBI NO: 21954064 NR Description: unknown protein [Arabidopsis thaliana]
  misc_feature (2)..(388): Homolog of NCBI NO: 30687679 NR Description: (YLS5) proteaseI (pfpI)-like protein, complete [Arabidopsis thaliana] >gi|25408625|pir||C84810 hypothetical
  misc_feature (2)..(388): Homolog of NCBI NO: 18404881 NR Description: (YLS5) proteaseI (pfpI)-like protein, complete [Arabidopsis thaliana] >gi|20197441|gb|AAC79625.2| expressed [Arabidopsis thaliana] >gi|21536875|gb|AAM61207.1| unknown
  misc_feature (5)..(388): Homolog of NCBI NO: 15232554 NR Description: expressed protein [Arabidopsis thaliana]
  misc_feature (194)..(386): Homolog of NCBI NO: 22978710 NR Description: hypothetical protein [Ralstonia metallidurans]
  misc_feature (193)..(382): Homolog of NCBI NO: 23040436 NR Description: hypothetical protein [Trichodesmium erythraeum
  misc_feature (2)..(194): Homolog of NCBI NO: 21954064 NR Description: unknown protein [Arabidopsis thaliana]
  misc_feature (190)..(387): Homolog of NCBI NO: 33595886 NR Description: conserved hypothetical protein [Bordetella >gi|33600417|ref|NP_887977.1| conserved hypothetical protein bronchiseptica] >gi|33565965|emb|CAE36516.1| conserved
  misc_feature (194)..(387): Homolog of NCBI NO: 17987076 NR Description: PROTEASE I [Brucella melitensis]
MANSRTVLILCGDYMEDYEVMVPFQALQAFGITVHTVCPGKKAGDSCPTAVHDFCGHQTYFESRGHNFTLNATFDEVDLSKYDGLVIPGGRAPEYLALTASVVELVKEFSRSGKPIASICHGQLILAAADTVNGRKCTAYATVGPSLVAAGAKWVEPITPDVCVVDGSLITAATYEGHPEFIQLFVKALGGKITGANKRILFLCGDYMEDYEVKVPFQSLQALGCQVDAVCPEKKAGDRCPTAIHDFEGDQTYSEKPGHTFALTTNFDDLVSSSYDALVIPGGRAPEYLALNEHVLNIVKEFMNSEKPVASICHGQQILAAAGVLKGRKCTAYPAVKLNVVLGGGTWLEPDPIDRCFTDGNLVTGAAWPGHPEFVSQLMALLGIQVSF

SEQ ID NO: 98230 - protein, 374 aa, Arabidopsis thaliana
  peptide (1)..(374): Ceres Seq. ID no. 13592518
  misc_feature (1)..(374): Homolog of NCBI NO: 15232958 NR Description: protease-related [Arabidopsis thaliana] unknown protein [Arabidopsis thaliana]
  misc_feature (51)..(374): Homolog of NCBI NO: 21954064 NR Description: unknown protein [Arabidopsis thaliana]
  misc_feature (1)..(374): Homolog of NCBI NO: 30687679 NR Description: (YLS5) proteaseI (pfpI)-like protein, complete [Arabidopsis thaliana] >gi|25408625|pir||C84810 hypothetical
  misc_feature (1)..(374): Homolog of NCBI NO: 18404881 NR Description: (YLS5) proteaseI (pfpI)-like protein, complete [Arabidopsis thaliana] >gi|20197441|gb|AAC79625.2| expressed [Arabidopsis thaliana] >gi|21536875|gb|AAM61207.1| unknown
  misc_feature (1)..(374): Homolog of NCBI NO: 15232554 NR Description: expressed protein [Arabidopsis thaliana]
  misc_feature (180)..(372): Homolog of NCBI NO: 22978710 NR Description: hypothetical protein [Ralstonia metallidurans]
  misc_feature (179)..(368): Homolog of NCBI NO: 23040436 NR Description: hypothetical protein [Trichodesmium erythraeum
  misc_feature (1)..(180): Homolog of NCBI NO: 21954064 NR Description: unknown protein [Arabidopsis thaliana]
  misc_feature (176)..(373): Homolog of NCBI NO: 33595886 NR Description: conserved hypothetical protein [Bordetella >gi|33600417|ref|NP_887977.1| conserved hypothetical protein bronchiseptica] >gi|33565965|emb|CAE36516.1| conserved
  misc_feature (180)..(373): Homolog of NCBI NO: 17987076 NR Description: PROTEASE I [Brucella melitensis]
MEDYEVMVPFQALQAFGITVHTVCPGKKAGDSCPTAVHDFCGHQTYFESRGHNFTLNATFDEVDLSKYDGLVIPGGRAPEYLALTASVVELVKEFSRSGKPIASICHGQLILAAADTVNGRKCTAYATVGPSLVAAGAKWVEPITPDVCVVDGSLITAATYEGHPEFIQLFVKALGGKITGANKRILFLCGDYMEDYEVKVPFQSLQALGCQVDAVCPEKKAGDRCPTAIHDFEGDQTYSEKPGHTFALTTNFDDLVSSSYDALVIPGGRAPEYLALNEHVLNIVKEFMNSEKPVASICHGQQILAAAGVLKGRKCTAYPAVKLNVVLGGGTWLEPDPIDRCFTDGNLVTGAAWPGHPEFVSQLMALLGIQVSF

SEQ ID NO: 98231 - protein, 368 aa, Arabidopsis thaliana
  peptide (1)..(368): Ceres Seq. ID no. 13592519
  misc_feature (1)..(368): Homolog of NCBI NO: 15232958 NR Description: protease-related [Arabidopsis thaliana] unknown protein [Arabidopsis thaliana]
  misc_feature (45)..(368): Homolog of NCBI NO: 21954064 NR Description: unknown protein [Arabidopsis thaliana]
  misc_feature (1)..(368): Homolog of NCBI NO: 30687679 NR Description: (YLS5) proteaseI (pfpI)-like protein, complete [Arabidopsis thaliana] >gi|25408625|pir||C84810 hypothetical
  misc_feature (1)..(368): Homolog of NCBI NO: 18404881 NR Description: (YLS5) proteaseI (pfpI)-like protein, complete [Arabidopsis thaliana] >gi|20197441|gb|AAC79625.2| expressed [Arabidopsis thaliana] >gi|21536875|gb|AAM61207.1| unknown
  misc_feature (1)..(368): Homolog of NCBI NO: 15232554 NR Description: expressed protein [Arabidopsis thaliana]
  misc_feature (174)..(366): Homolog of NCBI NO: 22978710 NR Description: hypothetical protein [Ralstonia metallidurans]
  misc_feature (173)..(362): Homolog of NCBI NO: 23040436 NR Description: hypothetical protein [Trichodesmium erythraeum
  misc_feature (1)..(174): Homolog of NCBI NO: 21954064 NR Description: unknown protein [Arabidopsis thaliana]
  misc_feature (170)..(367): Homolog of NCBI NO: 33595886 NR Description: conserved hypothetical protein [Bordetella >gi|33600417|ref|NP_887977.1| conserved hypothetical protein bronchiseptica] >gi|33565965|emb|CAE36516.1| conserved
  misc_feature (174)..(367): Homolog of NCBI NO: 17987076 NR Description: PROTEASE I [Brucella melitensis]
MVPFQALQAFGITVHTVCPGKKAGDSCPTAVHDFCGHQTYFESRGHNFTLNATFDEVDLSKYDGLVIPGGRAPEYLALTASVVELVKEFSRSGKPIASICHGQLILAAADTVNGRKCTAYATVGPSLVAAGAKWVEPITPDVCVVDGSLITAATYEGHPEFIQLFVKALGGKITGANKRILFLCGDYMEDYEVKVPFQSLQALGCQVDAVCPEKKAGDRCPTAIHDFEGDQTYSEKPGHTFALTTNFDDLVSSSYDALVIPGGRAPEYLALNEHVLNIVKEFMNSEKPVASICHGQQILAAAGVLKGRKCTAYPAVKLNVVLGGGTWLEPDPIDRCFTDGNLVTGAAWPGHPEFVSQLMALLGIQVSF

SEQ ID NO: 98232 - DNA, 3304 bp, Arabidopsis thaliana
  misc_feature (1)..(3304): Ceres Seq. ID no. 13592702
  misc_feature: MA Experiment ID: 108434 Result: Down-regulated in Transcription
  misc_feature: MA Experiment 108434 PARAMETER Experiment Name: At_Root_Tips_cDNA_P Parameter: Tissue Value: Root Tips
  misc_feature: MA Experiment ID: 108595 Result: Up-regulated in Transcription
  misc_feature: MA Experiment 108595 PARAMETER Experiment Name: At_Ler-pi_Ovule_cDNA_P Parameter: Plant Line Value: null
  misc_feature: MA Experiment ID: 20000180 Result: Up-regulated in Transcription
  misc_feature: MA Experiment 20000180 PARAMETER Experiment Name: At_Germinating_Seeds_P Parameter: Age (hr) Value: 24 vs. 0
  misc_feature: MA Experiment 20000180 PARAMETER Experiment Name: At_Germinating_Seeds_P Parameter: Tissue Value: Germinating Seeds
  misc_feature: MA Experiment ID: 20000185 Result: Down-regulated in Transcription
  misc_feature: MA Experiment 20000185 PARAMETER Experiment Name: At_Roots__P Parameter: Age (day) Value: 7 vs. 21
  misc_feature: MA Experiment 20000185 PARAMETER Experiment Name: At_Roots__P Parameter: Organism Value: A. thaliana
  misc_feature: MA Experiment 20000185 PARAMETER Experiment Name: At_Roots__P Parameter: Tissue Value: Roots vs. Whole Plant
  misc_feature: MA Experiment ID: 20000234 Result: Up-regulated in Transcription
  misc_feature: MA Experiment 20000234 PARAMETER Experiment Name: At_Siliques_P Parameter: Age (day) Value: 21
  misc_feature: MA Experiment 20000234 PARAMETER Experiment Name: At_Siliques_P Parameter: Organism Value: A. thaliana
  misc_feature: MA Experiment 20000234 PARAMETER Experiment Name: At_Siliques_P Parameter: Plant Line Value: WS
  misc_feature: MA Experiment 20000234 PARAMETER Experiment Name: At_Siliques_P Parameter: Tissue Value: Less Than 5mm Siliques vs. Whole Plant
  misc_feature: MA Experiment ID: 20000235 Result: Up-regulated in Transcription
  misc_feature: MA Experiment 20000235 PARAMETER Experiment Name: At_Siliques_P Parameter: Age (day) Value: 21
  misc_feature: MA Experiment 20000235 PARAMETER Experiment Name: At_Siliques_P Parameter: Organism Value: A. thaliana
  misc_feature: MA Experiment 20000235 PARAMETER Experiment Name: At_Siliques_P Parameter: Plant Line Value: WS
  misc_feature: MA Experiment 20000235 PARAMETER Experiment Name: At_Siliques_P Parameter: Tissue Value: 5-10mm Siliques vs. Whole Plant
  misc_feature: MA Experiment ID: 20000264 Result: Up-regulated in Transcription
  misc_feature: MA Experiment 20000264 PARAMETER Experiment Name: At_Open_Flower_P Parameter: Age (day) Value: 21
  misc_feature: MA Experiment 20000264 PARAMETER Experiment Name: At_Open_Flower_P Parameter: Plant Line Value: WS
  misc_feature: MA Experiment 20000264 PARAMETER Experiment Name: At_Open_Flower_P Parameter: Tissue Value: Open Flower vs. Whole Plant
  misc_feature: MA Experiment ID: 20000265 Result: Up-regulated in Transcription
  misc_feature: MA Experiment 20000265 PARAMETER Experiment Name: At_Open_Flower_P Parameter: Age (day) Value: 21
  misc_feature: MA Experiment 20000265 PARAMETER Experiment Name: At_Open_Flower_P Parameter: Plant Line Value: WS
  misc_feature: MA Experiment 20000265 PARAMETER Experiment Name: At_Open_Flower_P Parameter: Tissue Value: Closed Flower vs. Whole Plant
  misc_feature: MA Experiment ID: 20000286 Result: Up-regulated in Transcription
  misc_feature: MA Experiment 20000286 PARAMETER Experiment Name: At_Open_Flower_P Parameter: Age (day) Value: 21
  misc_feature: MA Experiment 20000286 PARAMETER Experiment Name: At_Open_Flower_P Parameter: Plant Line Value: WS
  misc_feature: MA Experiment 20000286 PARAMETER Experiment Name: At_Open_Flower_P Parameter: Tissue Value: Half Open vs. Whole Plant
  misc_feature: MA Experiment ID: 20000439 Result: Down-regulated in Transcription
  misc_feature: MA Experiment 20000439 PARAMETER Experiment Name: At_Roots__P Parameter: Age (day) Value: 14 vs. 21
  misc_feature: MA Experiment 20000439 PARAMETER Experiment Name: At_Roots__P Parameter: Organism Value: A. thaliana
  misc_feature: MA Experiment 20000439 PARAMETER Experiment Name: At_Roots__P Parameter: Tissue Value: Roots vs. Whole Plant
  misc_feature: MA Experiment ID: 20000495 Result: Up-regulated in Transcription
  misc_feature: MA Experiment 20000495 PARAMETER Experiment Name: At_Guard_Cells_P Parameter: Harvest Date Value: 8/2/2002
  misc_feature: MA Experiment 20000495 PARAMETER Experiment Name: At_Guard_Cells_P Parameter: Organism Value: A. thaliana
  misc_feature: MA Experiment 20000495 PARAMETER Experiment Name: At_Guard_Cells_P Parameter: Tissue Value: Guard Cells vs. Leaves
  misc_feature: MA Experiment ID: 20000496 Result: Up-regulated in Transcription
  misc_feature: MA Experiment 20000496 PARAMETER Experiment Name: At_Guard_Cells_P Parameter: Harvest Date Value: 7/19/2002
  misc_feature: MA Experiment 20000496 PARAMETER Experiment Name: At_Guard_Cells_P Parameter: Organism Value: Canola
  misc_feature: MA Experiment 20000496 PARAMETER Experiment Name: At_Guard_Cells_P Parameter: Tissue Value: Guard Cells vs. Leaves
  misc_feature: MA Experiment ID: 20000527 Result: Up-regulated in Transcription
  misc_feature: MA Experiment 20000527 PARAMETER Experiment Name: At_10percent_PEG_P Parameter: Age (day) Value: 20
  misc_feature: MA Experiment 20000527 PARAMETER Experiment Name: At_10percent_PEG_P Parameter: Organism Value: A. thaliana
  misc_feature: MA Experiment 20000527 PARAMETER Experiment Name: At_10percent_PEG_P Parameter: Plant Line Value: WS
  misc_feature: MA Experiment 20000527 PARAMETER Experiment Name: At_10percent_PEG_P Parameter: Timepoint (day) Value: 20
  misc_feature: MA Experiment 20000527 PARAMETER Experiment Name: At_10percent_PEG_P Parameter: Tissue Value: Whole Plant
  misc_feature: MA Experiment 20000527 PARAMETER Experiment Name: At_10percent_PEG_P Parameter: Treatment Value: 10percent PEG vs. No Treatment
  misc_feature: MA Experiment ID: 20000794 Result: Up-regulated in Transcription
  misc_feature: MA Experiment 20000794 PARAMETER Experiment Name: At_Petals_P Parameter: Age (day) Value: 23-25 days
  misc_feature: MA Experiment 20000794 PARAMETER Experiment Name: At_Petals_P Parameter: Plant Line Value: WS
  misc_feature: MA Experiment 20000794 PARAMETER Experiment Name: At_Petals_P Parameter: Tissue Value: Petals vs. Whole plant
  misc_feature: MA Experiment ID: 20001556 Result: Up-regulated in Transcription
  misc_feature: MA Experiment 20001556 PARAMETER Experiment Name: At_Drought_Soil_Dry_P Parameter: Age (day) Value: 26
  misc_feature: MA Experiment 20001556 PARAMETER Experiment Name: At_Drought_Soil_Dry_P Parameter: Organism Value: A. thaliana
  misc_feature: MA Experiment 20001556 PARAMETER Experiment Name: At_Drought_Soil_Dry_P Parameter: Plant Line Value: WS
  misc_feature: MA Experiment 20001556 PARAMETER Experiment Name: At_Drought_Soil_Dry_P Parameter: Post Timepoint (hr) Value: None
  misc_feature: MA Experiment 20001556 PARAMETER Experiment Name: At_Drought_Soil_Dry_P Parameter: Post-Treatment Value: None
  misc_feature: MA Experiment 20001556 PARAMETER Experiment Name: At_Drought_Soil_Dry_P Parameter: Timepoint (day) Value: 12
  misc_feature: MA Experiment 20001556 PARAMETER Experiment Name: At_Drought_Soil_Dry_P Parameter: Treatment Value: Drought vs. No Drought
  misc_feature: MA Experiment ID: 20001911 Result: Down-regulated in Transcription
  misc_feature: MA Experiment 20001911 PARAMETER Experiment Name: At_Drought_Reproduction_P Parameter: Age (day) Value: 40
  misc_feature: MA Experiment 20001911 PARAMETER Experiment Name: At_Drought_Reproduction_P Parameter: Organism Value: A. thaliana
  misc_feature: MA Experiment 20001911 PARAMETER Experiment Name: At_Drought_Reproduction_P Parameter: Plant Line Value: WS
  misc_feature: MA Experiment 20001911 PARAMETER Experiment Name: At_Drought_Reproduction_P Parameter: Timepoint (day) Value: 10
  misc_feature: MA Experiment 20001911 PARAMETER Experiment Name: At_Drought_Reproduction_P Parameter: Tissue Value: Flowers
  misc_feature: MA Experiment 20001911 PARAMETER Experiment Name: At_Drought_Reproduction_P Parameter: Treatment Value: Drought vs. No Drought
atcaatggagtcttcactcttttctccatcttcctcttcttactcttctctcttcactgcaaaacctacgcgtcttttatcaccaaaacccaaattcacattctccatcagatcctccattgagaaacccaaacccaaactcgagaccaattcatcgaaatcccaatcatgggtcagtcccgattggctcacaacactcactcgtaccctttcctcaggaaaaaacgacgagtcaggtataccaatcgcgaacgcgaagctcgacgatgtcgctgatctcctcggaggtgctctcttcttacctctctacaaatggatgaatgagtacggacccatttaccgtctcgctgctggtcctcgtaatttcgtaattgtgagcgacccagcgatagctaaacatgttttgaggaattatccaaagtacgctaaaggcttagtcgctgaagtctctgaatttctatttggttcgggtttcgctatcgctgaaggacctctttggacagcgaggcgtagagcggtggttccatcgcttcacaggaggtatttgtctgtgattgtggagagagtattctgcaaatgtgcagagaggcttgttgagaagttgcagccttatgcagaagacggaagtgctgtgaatatggaagcgaagttctctcagatgacacttgatgtcattgggttgtctctttttaactacaatttcgattctttgactactgatagtcctgtcattgaagctgtttacactgctcttaaagaagctgagcttcgttctactgatcttctgccatattggaagatcgatgcattgtgtaagatagtcccgagacaggtgaaagctgaaaaggctgtaactttgataagggaaactgttgaagaccttattgctaagtgtaaagaaattgtcgaaagagaaggcgaaagaatcaatgatgaggagtatgtaaatgatgctgacccaagtatcctgcgtttcttgcttgcaagcagagaagaggtatcaagtgtgcagttacgggatgatcttctctcaatgctcgtagcgggtcatgaaaccactggatctgtcctcacttggacactttatctcctaagtaagaactcatctgcattaaggaaagcacaagaagaagtagacagagtgttagaaggaagaaacccggctttcgaggatataaaggagttgaagtacatcactcgttgtataaacgagtcaatgcgtctctatcctcatcctcctgtcttgataagaagagctcaagttcctgacattcttcctgggaactataaggtcaataccggacaagacattatgatttcagtctataacatccatcgttcttccgaggtatgggaaaaagctgaggaatttctgcctgaacgattcgacatagatggcgcaatccctaacgaaacaaacactgatttcaaattcatcccattcagtggagggcctagaaaatgtgtaggcgatcagtttgcattgatggaggcaattgtggcactcgcggtgtttcttcagcggttaaacgttgagctggttcctgatcagaccattagcatgaccacaggagcaaccatacacaccaccaatggattgtatatgaaggtgagccaaaggtaaaaaccagaatttatgttttcatgataattgattggtgtgaatggacttgtttcatagtactcttgagaaataaccacaaaaaaatgaattatggaaaatagttgtaccatcggaaatgtgaattttgaacagtgagatgctagtaccattaaagtttggtaattgtgttatcatttcaaatcaaactttcatacagcttgtgtttgttctccatttttcagtaattacgaaaatcaaaattttatttttttttgaatttctaaataatagactaaggtctaaaaccatcccattccatatggaccacacgtaacattaaccttaaaaaccatataaaaccatataaaaccaatactagtgggttctatagcgatgtgtagtttcactttcacgtacgaggaagattaaaaaaaatggagaacgaaagctcagagagtagaaacagagctcgtcttgccattatggagcttgctaacatgattagcgttcccatgtctctcaatgccgccgtgcgactaggcattgccgacgccatttggaacggcggagccaattctcctctctctgccgccgagatcctccctcgcctccacctaccatctcacactaccattggtggcgaccccgagaatcttcagcgtatacttcggatgctcaccagctacggtgtcttctccgaacaccttgttggatccattgagaggaaatactctcttacggacgtcggaaaaactcttgtaaccgactccggcggcctctcttacgctgcctacgtcctccaacatcaccaggaggcgttgatgcgagcatggccactagttcacacggcagtggtggagccggagacagagccgtacgtgaaagcaaacggcgaggcggcatacgctcagtatgggaaaagtgaggagatgaatggtctaatgcaaaaggcaatgtctggcgtatctgtaccgttcatgaaagctatattagacggctacgatgggtttaaatcagtggatattttggttgacgtaggaggtagtgcaggggattgtctgcgtatgatccttcaacaatttcctaacgtccgtgaagggattaatttcgatttacctgaagttgttgccaaagcccccaatattcctggagtgactcacgtgggtggggatatgttccaatcagttcctagcgctgacgctatcttcatgaagtgggtgttaacgacatggacggatgaagaatgcaagcagataatgaagaattgctacaacgcgttaccagttggaggaaagctgattgcgtgtgagccggtcttgcctaaggaaaccgatgaaagtcaccggactcgtgccttgttagaaggtgacatctttgtcatgaccatctatagaaccaaaggtaagcatagaaccgaagaagagtttatagagcttggtctctccgcgggattccctacttttcgacctttctacattgattacttctacaccatcttagagtttcagaagtaatattcaagcatttttcttctcatatttctaaaagcttcaaaataatgaatcaaaagacctctttgttaattgagttgagatatctagtgaagacattaatattttcatcaagatgtaataatctaaagtctatattctaagtgcatccttaaaaggcattttccatatatataagtttcatctttcg

SEQ ID NO: 98233 - protein, 540 aa, Arabidopsis thaliana
  peptide (1)..(540): Ceres Seq. ID no. 13592703
  misc_feature (1)..(540): Homolog of NCBI NO: 20258842 NR Description: putative cytochrome P450 [Arabidopsis thaliana]
  misc_feature (2)..(540): Homolog of NCBI NO: 40218379 NR Description: chloroplast carotenoid epsilon-ring hydroxylase
  misc_feature (56)..(537): Homolog of NCBI NO: 37536604 NR Description: putative cytochrome P450 monooxygenase [Oryza
  misc_feature (165)..(540): Homolog of NCBI NO: 15231755 NR Description: cytochrome p450 family [Arabidopsis thaliana]
  misc_feature (2)..(271): Homolog of NCBI NO: 15231755 NR Description: cytochrome p450 family [Arabidopsis thaliana]
  misc_feature (76)..(540): Homolog of NCBI NO: 18398119 NR Description: cytochrome P450, putative [Arabidopsis thaliana] At1g31800/68069_m00159 [Arabidopsis thaliana] At1g31800/68069_m00159 [Arabidopsis thaliana]
  misc_feature (76)..(540): Homolog of NCBI NO: 25282642 NR Description: probable cytochrome P450 [imported] - Arabidopsis >gi|12321297|gb|AAG50718.1|AC079041_11 cytochrome P450, putative
SMESSLFSPSSSSYSSLFTAKPTRLLSPKPKFTFSIRSSIEKPKPKLETNSSKSQSWVSPDWLTTLTRTLSSGKNDESGIPIANAKLDDVADLLGGALFLPLYKWMNEYGPIYRLAAGPRNFVIVSDPAIAKHVLRNYPKYAKGLVAEVSEFLFGSGFAIAEGPLWTARRRAVVPSLHRRYLSVIVERVFCKCAERLVEKLQPYAEDGSAVNMEAKFSQMTLDVIGLSLFNYNFDSLTTDSPVIEAVYTALKEAELRSTDLLPYWKIDALCKIVPRQVKAEKAVTLIRETVEDLIAKCKEIVEREGERINDEEYVNDADPSILRFLLASREEVSSVQLRDDLLSMLVAGHETTGSVLTWTLYLLSKNSSALRKAQEEVDRVLEGRNPAFEDIKELKYITRCINESMRLYPHPPVLIRRAQVPDILPGNYKVNTGQDIMISVYNIHRSSEVWEKAEEFLPERFDIDGAIPNETNTDFKFIPFSGGPRKCVGDQFALMEAIVALAVFLQRLNVELVPDQTISMTTGATIHTTNGLYMKVSQR

SEQ ID NO: 98234 - protein, 539 aa, Arabidopsis thaliana; identical to SEQ ID NO: 25563
  peptide (1)..(539): Ceres Seq. ID no. 13592704
  misc_feature (1)..(539): Homolog of NCBI NO: 20258842 NR Description: putative cytochrome P450 [Arabidopsis thaliana]
  misc_feature (1)..(539): Homolog of NCBI NO: 40218379 NR Description: chloroplast carotenoid epsilon-ring hydroxylase
  misc_feature (55)..(536): Homolog of NCBI NO: 37536604 NR Description: putative cytochrome P450 monooxygenase [Oryza
  misc_feature (164)..(539): Homolog of NCBI NO: 15231755 NR Description: cytochrome p450 family [Arabidopsis thaliana]
  misc_feature (1)..(270): Homolog of NCBI NO: 15231755 NR Description: cytochrome p450 family [Arabidopsis thaliana]
  misc_feature (75)..(539): Homolog of NCBI NO: 18398119 NR Description: cytochrome P450, putative [Arabidopsis thaliana] At1g31800/68069_m00159 [Arabidopsis thaliana] At1g31800/68069_m00159 [Arabidopsis thaliana]
  misc_feature (75)..(539): Homolog of NCBI NO: 25282642 NR Description: probable cytochrome P450 [imported] - Arabidopsis >gi|12321297|gb|AAG50718.1|AC079041_11 cytochrome P450, putative

SEQ ID NO: 98235 - protein, 435 aa, Arabidopsis thaliana; identical to SEQ ID NO: 25564
  peptide (1)..(435): Ceres Seq. ID no. 13592705
  misc_feature (1)..(435): Homolog of NCBI NO: 20258842 NR Description: putative cytochrome P450 [Arabidopsis thaliana]
  misc_feature (1)..(435): Homolog of NCBI NO: 40218379 NR Description: chloroplast carotenoid epsilon-ring hydroxylase
  misc_feature (1)..(432): Homolog of NCBI NO: 37536604 NR Description: putative cytochrome P450 monooxygenase [Oryza
  misc_feature (60)..(435): Homolog of NCBI NO: 15231755 NR Description: cytochrome p450 family [Arabidopsis thaliana]
  misc_feature (1)..(166): Homolog of NCBI NO: 15231755 NR Description: cytochrome p450 family [Arabidopsis thaliana]
  misc_feature (1)..(435): Homolog of NCBI NO: 18398119 NR Description: cytochrome P450, putative [Arabidopsis thaliana] At1g31800/68069_m00159 [Arabidopsis thaliana] At1g31800/68069_m00159 [Arabidopsis thaliana]
  misc_feature (1)..(435): Homolog of NCBI NO: 25282642 NR Description: probable cytochrome P450 [imported] - Arabidopsis >gi|12321297|gb|AAG50718.1|AC079041_11 cytochrome P450, putative

SEQ ID NO: 98236 - DNA, 952 bp, Arabidopsis thaliana
  misc_feature (1)..(952): Ceres Seq. ID no. 13592727
  misc_feature: MA Experiment ID: 20001557 Result: Down-regulated in Transcription
  misc_feature: MA Experiment 20001557 PARAMETER Experiment Name: At_Drought_Soil_Dry_P Parameter: Age (day) Value: 27
  misc_feature: MA Experiment 20001557 PARAMETER Experiment Name: At_Drought_Soil_Dry_P Parameter: Organism Value: A. thaliana
  misc_feature: MA Experiment 20001557 PARAMETER Experiment Name: At_Drought_Soil_Dry_P Parameter: Plant Line Value: WS
  misc_feature: MA Experiment 20001557 PARAMETER Experiment Name: At_Drought_Soil_Dry_P Parameter: Post Timepoint (hr) Value: 3
  misc_feature: MA Experiment 20001557 PARAMETER Experiment Name: At_Drought_Soil_Dry_P Parameter: Post-Treatment Value: Re-Water vs. No Drought
  misc_feature: MA Experiment 20001557 PARAMETER Experiment Name: At_Drought_Soil_Dry_P Parameter: Timepoint (day) Value: 13
  misc_feature: MA Experiment 20001557 PARAMETER Experiment Name: At_Drought_Soil_Dry_P Parameter: Treatment Value: Drought vs. No Drought
ggtgaaggagaaggagaatgggagatctctacgctttggacttcgatggagttctctgtgatagttgtggagaaagctctctatctgctgttaaggcagccaaagtgagatggcctgatttgttcgaaggagttgattccgctttagaggaatggatcgtcgatcaaatgcatattgtgagacctgtggttgaaactggctatgaaaatcttctacttgtgcggctgttattggagaccaagataccgtctattcgaaaatcttcagttgcagaggggttgacggttgatgggatactggagagctgggcaaagtttaagcccgtgatcatggaagcttgggatgaagatagagatgctttggtagatttgtttggaaaagttagagatgattggattaacaaggacttgacaacttggattggtgccaatagattctacccaggagtttcagatgcactgaaatttgccagctcaaagatttatatcgttaccacgaaacagggccgctttgcagaagcgttactgcgtgaaatagcaggtgtaatcataccatcagaaaggatttatggtttgggttcagggccaaaggtggaagttctaaagctacttcaagataaaccagaacatcagggcttgacgctgcatttcgtggaagacagactcgcaacgctgaaaaatgtcataaaagagcctgaattagacaaatggagtttatacctaggaacctggggatacaacactgagaaagagagagctgaagcagcaggcattcccaggattcaggttattgagctctccacgtttagcaataagcttaaatgagtgcatatactcattggaaaagaaacaaagctttcctctttattgtattctacggcattcaacggaaactaaaaaccaaacatgtttaggtaagattcagtaaaagagttgaactttcagtactaccc

SEQ ID NO: 98237 - protein, 268 aa, Arabidopsis thaliana
  peptide (1)..(268): Ceres Seq. ID no. 13592728
  misc_feature (4)..(199): Pfam Name: haloacid dehalogenase-like hydrolase Pfam Description: haloacid dehalogenase-like hydrolase
  misc_feature (1)..(268): Homolog of NCBI NO: 18406942 NR Description: expressed protein [Arabidopsis thaliana]
  misc_feature (2)..(268): Homolog of NCBI NO: 22324441 NR Description: contains ESTs to Arabidopsis thaliana chromosome 2,At2g45990~unknown protein
  misc_feature (2)..(189): Homolog of NCBI NO: 38194220 NR Description: unknown protein [Oryza sativa (japonica
  misc_feature (81)..(229): Homolog of NCBI NO: 16660293 NR Description: hypothetical protein [Musa acuminata]
  misc_feature (4)..(264): Homolog of NCBI NO: 17231355 NR Description: hypothetical protein [Nostoc sp. PCC 7120]
  misc_feature (4)..(264): Homolog of NCBI NO: 23124072 NR Description: hypothetical protein [Nostoc punctiforme]
  misc_feature (6)..(263): Homolog of NCBI NO: 23040219 NR Description: hypothetical protein [Trichodesmium erythraeum
  misc_feature (4)..(264): Homolog of NCBI NO: 16331243 NR Description: unknown protein [Synechocystis sp. PCC 6803]
  misc_feature (3)..(265): Homolog of NCBI NO: 37521612 NR Description: hypothetical protein glr2043 [Gloeobacter
  misc_feature (4)..(263): Homolog of NCBI NO: 22299234 NR Description: ORF_ID:tlr1691~hypothetical protein
MGDLYALDFDGVLCDSCGESSLSAVKAAKVRWPDLFEGVDSALEEWIVDQMHIVRPVVETGYENLLLVRLLLETKIPSIRKSSVAEGLTVDGILESWAKFKPVIMEAWDEDRDALVDLFGKVRDDWINKDLTTWIGANRFYPGVSDALKFASSKIYIVTTKQGRFAEALLREIAGVIIPSERIYGLGSGPKVEVLKLLQDKPEHQGLTLHFVEDRLATLKNVIKEPELDKWSLYLGTWGYNTEKERAEAAGIPRIQVIELSTFSNKLK

SEQ ID NO: 98238 - protein, 218 aa, Arabidopsis thaliana
  peptide (1)..(218): Ceres Seq. ID no. 13592729
  misc_feature (1)..(149): Pfam Name: haloacid dehalogenase-like hydrolase Pfam Description: haloacid dehalogenase-like hydrolase
  misc_feature (1)..(218): Homolog of NCBI NO: 18406942 NR Description: expressed protein [Arabidopsis thaliana]
  misc_feature (1)..(218): Homolog of NCBI NO: 22324441 NR Description: contains ESTs to Arabidopsis thaliana chromosome 2,At2g45990~unknown protein
  misc_feature (1)..(139): Homolog of NCBI NO: 38194220 NR Description: unknown protein [Oryza sativa (japonica
  misc_feature (31)..(179): Homolog of NCBI NO: 16660293 NR Description: hypothetical protein [Musa acuminata]
  misc_feature (1)..(214): Homolog of NCBI NO: 17231355 NR Description: hypothetical protein [Nostoc sp. PCC 7120]
  misc_feature (1)..(214): Homolog of NCBI NO: 23124072 NR Description: hypothetical protein [Nostoc punctiforme]
  misc_feature (1)..(213): Homolog of NCBI NO: 23040219 NR Description: hypothetical protein [Trichodesmium erythraeum
  misc_feature (1)..(214): Homolog of NCBI NO: 16331243 NR Description: unknown protein [Synechocystis sp. PCC 6803]
  misc_feature (1)..(215): Homolog of NCBI NO: 37521612 NR Description: hypothetical protein glr2043 [Gloeobacter
  misc_feature (1)..(213): Homolog of NCBI NO: 22299234 NR Description: ORF_ID:tlr1691~hypothetical protein
MHIVRPVVETGYENLLLVRLLLETKIPSIRKSSVAEGLTVDGILESWAKFKPVIMEAWDEDRDALVDLFGKVRDDWINKDLTTWIGANRFYPGVSDALKFASSKIYIVTTKQGRFAEALLREIAGVIIPSERIYGLGSGPKVEVLKLLQDKPEHQGLTLHFVEDRLATLKNVIKEPELDKWSLYLGTWGYNTEKERAEAAGIPRIQVIELSTFSNKLK

SEQ ID NO: 98239 - protein, 164 aa, Arabidopsis thaliana
  peptide (1)..(164): Ceres Seq. ID no. 13592730
  misc_feature (1)..(95): Pfam Name: haloacid dehalogenase-like hydrolase Pfam Description: haloacid dehalogenase-like hydrolase
  misc_feature (1)..(164): Homolog of NCBI NO: 18406942 NR Description: expressed protein [Arabidopsis thaliana]
  misc_feature (1)..(164): Homolog of NCBI NO: 22324441 NR Description: contains ESTs to Arabidopsis thaliana chromosome 2,At2g45990~unknown protein
  misc_feature (1)..(85): Homolog of NCBI NO: 38194220 NR Description: unknown protein [Oryza sativa (japonica
  misc_feature (1)..(125): Homolog of NCBI NO: 16660293 NR Description: hypothetical protein [Musa acuminata]
  misc_feature (1)..(160): Homolog of NCBI NO: 17231355 NR Description: hypothetical protein [Nostoc sp. PCC 7120]
  misc_feature (1)..(160): Homolog of NCBI NO: 23124072 NR Description: hypothetical protein [Nostoc punctiforme]
  misc_feature (1)..(159): Homolog of NCBI NO: 23040219 NR Description: hypothetical protein [Trichodesmium erythraeum
  misc_feature (1)..(160): Homolog of NCBI NO: 16331243 NR Description: unknown protein [Synechocystis sp. PCC 6803]
  misc_feature (1)..(161): Homolog of NCBI NO: 37521612 NR Description: hypothetical protein glr2043 [Gloeobacter
  misc_feature (1)..(159): Homolog of NCBI NO: 22299234 NR Description: ORF_ID:tlr1691~hypothetical protein
MEAWDEDRDALVDLFGKVRDDWINKDLTTWIGANRFYPGVSDALKFASSKIYIVTTKQGRFAEALLREIAGVIIPSERIYGLGSGPKVEVLKLLQDKPEHQGLTLHFVEDRLATLKNVIKEPELDKWSLYLGTWGYNTEKERAEAAGIPRIQVIELSTFSNKLK

SEQ ID NO: 98240 - DNA, 848 bp, Arabidopsis thaliana
  misc_feature (1)..(848): Ceres Seq. ID no. 13592748
  misc_feature: MA Experiment ID: 20000180 Result: Up-regulated in Transcription
  misc_feature: MA Experiment 20000180 PARAMETER Experiment Name: At_Germinating_Seeds_P Parameter: Age (hr) Value: 24 vs. 0
  misc_feature: MA Experiment 20000180 PARAMETER Experiment Name: At_Germinating_Seeds_P Parameter: Tissue Value: Germinating Seeds
  misc_feature: MA Experiment ID: 20000185 Result: Up-regulated in Transcription
  misc_feature: MA Experiment 20000185 PARAMETER Experiment Name: At_Roots__P Parameter: Age (day) Value: 7 vs. 21
  misc_feature: MA Experiment 20000185 PARAMETER Experiment Name: At_Roots__P Parameter: Organism Value: A. thaliana
  misc_feature: MA Experiment 20000185 PARAMETER Experiment Name: At_Roots__P Parameter: Tissue Value: Roots vs. Whole Plant
  misc_feature: MA Experiment ID: 20000227 Result: Down-regulated in Transcription
  misc_feature: MA Experiment 20000227 PARAMETER Experiment Name: At_Root-Tips-vs-Tops_P Parameter: Tissue Value: Root Tips vs. Root Tops
  misc_feature: MA Experiment ID: 20000439 Result: Up-regulated in Transcription
  misc_feature: MA Experiment 20000439 PARAMETER Experiment Name: At_Roots__P Parameter: Age (day) Value: 14 vs. 21
  misc_feature: MA Experiment 20000439 PARAMETER Experiment Name: At_Roots__P Parameter: Organism Value: A. thaliana
  misc_feature: MA Experiment 20000439 PARAMETER Experiment Name: At_Roots__P Parameter: Tissue Value: Roots vs. Whole Plant
  misc_feature: MA Experiment ID: 20000460 Result: Down-regulated in Transcription
  misc_feature: MA Experiment 20000460 PARAMETER Experiment Name: At_10percent_PEG_P Parameter: Age (day) Value: 12
  misc_feature: MA Experiment 20000460 PARAMETER Experiment Name: At_10percent_PEG_P Parameter: Organism Value: A. thaliana
  misc_feature: MA Experiment 20000460 PARAMETER Experiment Name: At_10percent_PEG_P Parameter: Plant Line Value: WS
  misc_feature: MA Experiment 20000460 PARAMETER Experiment Name: At_10percent_PEG_P Parameter: Timepoint (day) Value: 12
  misc_feature: MA Experiment 20000460 PARAMETER Experiment Name: At_10percent_PEG_P Parameter: Tissue Value: Whole Plant
  misc_feature: MA Experiment 20000460 PARAMETER Experiment Name: At_10percent_PEG_P Parameter: Treatment Value: 10percent PEG vs. No Treatment
  misc_feature: MA Experiment ID: 20000527 Result: Down-regulated in Transcription
  misc_feature: MA Experiment 20000527 PARAMETER Experiment Name: At_10percent_PEG_P Parameter: Age (day) Value: 20
  misc_feature: MA Experiment 20000527 PARAMETER Experiment Name: At_10percent_PEG_P Parameter: Organism Value: A. thaliana
  misc_feature: MA Experiment 20000527 PARAMETER Experiment Name: At_10percent_PEG_P Parameter: Plant Line Value: WS
  misc_feature: MA Experiment 20000527 PARAMETER Experiment Name: At_10percent_PEG_P Parameter: Timepoint (day) Value: 20
  misc_feature: MA Experiment 20000527 PARAMETER Experiment Name: At_10percent_PEG_P Parameter: Tissue Value: Whole Plant
  misc_feature: MA Experiment 20000527 PARAMETER Experiment Name: At_10percent_PEG_P Parameter: Treatment Value: 10percent PEG vs. No Treatment
  misc_feature: MA Experiment ID: 20001554 Result: Down-regulated in Transcription
  misc_feature: MA Experiment 20001554 PARAMETER Experiment Name: At_Drought_Soil_Dry_P Parameter: Age (day) Value: 21
  misc_feature: MA Experiment 20001554 PARAMETER Experiment Name: At_Drought_Soil_Dry_P Parameter: Organism Value: A. thaliana
  misc_feature: MA Experiment 20001554 PARAMETER Experiment Name: At_Drought_Soil_Dry_P Parameter: Plant Line Value: WS
  misc_feature: MA Experiment 20001554 PARAMETER Experiment Name: At_Drought_Soil_Dry_P Parameter: Post Timepoint (hr) Value: None
  misc_feature: MA Experiment 20001554 PARAMETER Experiment Name: At_Drought_Soil_Dry_P Parameter: Post-Treatment Value: None
  misc_feature: MA Experiment 20001554 PARAMETER Experiment Name: At_Drought_Soil_Dry_P Parameter: Timepoint (day) Value: 7
  misc_feature: MA Experiment 20001554 PARAMETER Experiment Name: At_Drought_Soil_Dry_P Parameter: Treatment Value: Drought vs. No Drought
  misc_feature: MA Experiment ID: 20001555 Result: Down-regulated in Transcription
  misc_feature: MA Experiment 20001555 PARAMETER Experiment Name: At_Drought_Soil_Dry_P Parameter: Age (day) Value: 24
  misc_feature: MA Experiment 20001555 PARAMETER Experiment Name: At_Drought_Soil_Dry_P Parameter: Organism Value: A. thaliana
  misc_feature: MA Experiment 20001555 PARAMETER Experiment Name: At_Drought_Soil_Dry_P Parameter: Plant Line Value: WS
  misc_feature: MA Experiment 20001555 PARAMETER Experiment Name: At_Drought_Soil_Dry_P Parameter: Post Timepoint (hr) Value: None
  misc_feature: MA Experiment 20001555 PARAMETER Experiment Name: At_Drought_Soil_Dry_P Parameter: Post-Treatment Value: None
  misc_feature: MA Experiment 20001555 PARAMETER Experiment Name: At_Drought_Soil_Dry_P Parameter: Timepoint (day) Value: 10
  misc_feature: MA Experiment 20001555 PARAMETER Experiment Name: At_Drought_Soil_Dry_P Parameter: Treatment Value: Drought vs. No Drought
  misc_feature: MA Experiment ID: 20001556 Result: Down-regulated in Transcription
  misc_feature: MA Experiment 20001556 PARAMETER Experiment Name: At_Drought_Soil_Dry_P Parameter: Age (day) Value: 26
  misc_feature: MA Experiment 20001556 PARAMETER Experiment Name: At_Drought_Soil_Dry_P Parameter: Organism Value: A. thaliana
  misc_feature: MA Experiment 20001556 PARAMETER Experiment Name: At_Drought_Soil_Dry_P Parameter: Plant Line Value: WS
  misc_feature: MA Experiment 20001556 PARAMETER Experiment Name: At_Drought_Soil_Dry_P Parameter: Post Timepoint (hr) Value: None
  misc_feature: MA Experiment 20001556 PARAMETER Experiment Name: At_Drought_Soil_Dry_P Parameter: Post-Treatment Value: None
  misc_feature: MA Experiment 20001556 PARAMETER Experiment Name: At_Drought_Soil_Dry_P Parameter: Timepoint (day) Value: 12
  misc_feature: MA Experiment 20001556 PARAMETER Experiment Name: At_Drought_Soil_Dry_P Parameter: Treatment Value: Drought vs. No Drought
  misc_feature: MA Experiment ID: 20001557 Result: Down-regulated in Transcription
  misc_feature: MA Experiment 20001557 PARAMETER Experiment Name: At_Drought_Soil_Dry_P Parameter: Age (day) Value: 27
  misc_feature: MA Experiment 20001557 PARAMETER Experiment Name: At_Drought_Soil_Dry_P Parameter: Organism Value: A. thaliana
  misc_feature: MA Experiment 20001557 PARAMETER Experiment Name: At_Drought_Soil_Dry_P Parameter: Plant Line Value: WS
  misc_feature: MA Experiment 20001557 PARAMETER Experiment Name: At_Drought_Soil_Dry_P Parameter: Post Timepoint (hr) Value: 3
  misc_feature: MA Experiment 20001557 PARAMETER Experiment Name: At_Drought_Soil_Dry_P Parameter: Post-Treatment Value: Re-Water vs. No Drought
  misc_feature: MA Experiment 20001557 PARAMETER Experiment Name: At_Drought_Soil_Dry_P Parameter: Timepoint (day) Value: 13
  misc_feature: MA Experiment 20001557 PARAMETER Experiment Name: At_Drought_Soil_Dry_P Parameter: Treatment Value: Drought vs. No Drought
  misc_feature: MA Experiment ID: 20001558 Result: Down-regulated in Transcription
  misc_feature: MA Experiment 20001558 PARAMETER Experiment Name: At_Drought_Soil_Dry_P Parameter: Age (day) Value: 27
  misc_feature: MA Experiment 20001558 PARAMETER Experiment Name: At_Drought_Soil_Dry_P Parameter: Organism Value: A. thaliana
  misc_feature: MA Experiment 20001558 PARAMETER Experiment Name: At_Drought_Soil_Dry_P Parameter: Plant Line Value: WS
  misc_feature: MA Experiment 20001558 PARAMETER Experiment Name: At_Drought_Soil_Dry_P Parameter: Post Timepoint (hr) Value: 6
  misc_feature: MA Experiment 20001558 PARAMETER Experiment Name: At_Drought_Soil_Dry_P Parameter: Post-Treatment Value: Re-Water vs. No Drought
  misc_feature: MA Experiment 20001558 PARAMETER Experiment Name: At_Drought_Soil_Dry_P Parameter: Timepoint (day) Value: 13
  misc_feature: MA Experiment 20001558 PARAMETER Experiment Name: At_Drought_Soil_Dry_P Parameter: Treatment Value: Drought vs. No Drought
  misc_feature: MA Experiment ID: 20001560 Result: Down-regulated in Transcription
  misc_feature: MA Experiment 20001560 PARAMETER Experiment Name: At_Drought_Soil_Dry_P Parameter: Age (day) Value: 28
  misc_feature: MA Experiment 20001560 PARAMETER Experiment Name: At_Drought_Soil_Dry_P Parameter: Organism Value: A. thaliana
  misc_feature: MA Experiment 20001560 PARAMETER Experiment Name: At_Drought_Soil_Dry_P Parameter: Plant Line Value: WS
  misc_feature: MA Experiment 20001560 PARAMETER Experiment Name: At_Drought_Soil_Dry_P Parameter: Post Timepoint (hr) Value: None
  misc_feature: MA Experiment 20001560 PARAMETER Experiment Name: At_Drought_Soil_Dry_P Parameter: Post-Treatment Value: None
  misc_feature: MA Experiment 20001560 PARAMETER Experiment Name: At_Drought_Soil_Dry_P Parameter: Timepoint (day) Value: 14
  misc_feature: MA Experiment 20001560 PARAMETER Experiment Name: At_Drought_Soil_Dry_P Parameter: Treatment Value: Drought vs. No Drought
attgtcccaaaatacaagcaaaatacaaagatgacgtttcacaaaatcttttttgtaatctctctgatgctcgttgtctcattagttaatgctgttgactactcggtcgtcgacaattccggtgactctaccggaggaaggagattccggggagagatcggtggcataagctacggcacacagacactaagatctgcgacagactttgtgtggcgtttgttccaacaaaccaacccttcagacagaaagtcagttacaaagatcacactgttcatggagaacggtgacggagtagcgtacaactctgcaaacgagatacatttcaacgtgggatatctcgcgggtgtatcgggagatgtaaagagggaatttaccggtgtagtttatcatgaggtggtccattcttggcagtggaacggtgcgggtcgggctccgggtgggcttatcgaagggatagcggattacgtgaggctgaaagcgggttacgctccaagtcattgggtcgggcctggtcgtggtgataggtgggatcaaggttatgacgttaccgcgaggttcttggattattgtaacggtttgaggaatgggtttgtggccgagctgaacaagaagatgaggaatggttatagtgatggcttcttcgttgatttgcttgggaaagacgtgaatcaattatggagagagtacaaggccaagtatggtcaatgaatacaaacgatacaaaataatctcaatatggtaatgaaaataaaataaaatggtgaataaaatgaaaaatatggtgttgttaagtttctattggaaaacacatacattacactctttgtattaaaatataagctcttgct

SEQ ID NO: 98241 - protein, 235 aa, Arabidopsis thaliana
  peptide (1)..(235): Ceres Seq. ID no. 13592749
  misc_feature (11)..(235): Pfam Name: Plant Basic Secretory Protein Pfam Description: Plant Basic Secretory Protein
  misc_feature (11)..(235): Homolog of NCBI NO: 18397757 NR Description: expressed protein [Arabidopsis thaliana]
  misc_feature (11)..(235): Homolog of NCBI NO: 15226060 NR Description: hypothetical protein [Arabidopsis thaliana]
  misc_feature (10)..(233): Homolog of NCBI NO: 5360263 NR Description: NtPRp27 [Nicotiana tabacum]
  misc_feature (14)..(234): Homolog of NCBI NO: 27803890 NR Description: NtPRp27-like protein [Solanum tuberosum]
  misc_feature (19)..(233): Homolog of NCBI NO: 14329814 NR Description: putative NtPRp27-like protein [Atropa belladonna]
IVPKYKQNTKMTFHKIFFVISLMLVVSLVNAVDYSVVDNSGDSTGGRRFRGEIGGISYGTQTLRSATDFVWRLFQQTNPSDRKSVTKITLFMENGDGVAYNSANEIHFNVGYLAGVSGDVKREFTGVVYHEVVHSWQWNGAGRAPGGLIEGIADYVRLKAGYAPSHWVGPGRGDRWDQGYDVTARFLDYCNGLRNGFVAELNKKMRNGYSDGFFVDLLGKDVNQLWREYKAKYGQ

SEQ ID NO: 98242 - protein, 225 aa, Arabidopsis thaliana
  peptide (1)..(225): Ceres Seq. ID no. 13592750
  misc_feature (1)..(225): Pfam Name: Plant Basic Secretory Protein Pfam Description: Plant Basic Secretory Protein
  misc_feature (1)..(225): Homolog of NCBI NO: 18397757 NR Description: expressed protein [Arabidopsis thaliana]
  misc_feature (1)..(225): Homolog of NCBI NO: 15226060 NR Description: hypothetical protein [Arabidopsis thaliana]
  misc_feature (1)..(223): Homolog of NCBI NO: 5360263 NR Description: NtPRp27 [Nicotiana tabacum]
  misc_feature (4)..(224): Homolog of NCBI NO: 27803890 NR Description: NtPRp27-like protein [Solanum tuberosum]
  misc_feature (9)..(223): Homolog of NCBI NO: 14329814 NR Description: putative NtPRp27-like protein [Atropa belladonna]
MTFHKIFFVISLMLVVSLVNAVDYSVVDNSGDSTGGRRFRGEIGGISYGTQTLRSATDFVWRLFQQTNPSDRKSVTKITLFMENGDGVAYNSANEIHFNVGYLAGVSGDVKREFTGVVYHEVVHSWQWNGAGRAPGGLIEGIADYVRLKAGYAPSHWVGPGRGDRWDQGYDVTARFLDYCNGLRNGFVAELNKKMRNGYSDGFFVDLLGKDVNQLWREYKAKYGQ

SEQ ID NO: 98243 - protein, 213 aa, Arabidopsis thaliana
  peptide (1)..(213): Ceres Seq. ID no. 13592751
  misc_feature (1)..(213): Pfam Name: Plant Basic Secretory Protein Pfam Description: Plant Basic Secretory Protein
  misc_feature (1)..(213): Homolog of NCBI NO: 18397757 NR Description: expressed protein [Arabidopsis thaliana]
  misc_feature (1)..(213): Homolog of NCBI NO: 15226060 NR Description: hypothetical protein [Arabidopsis thaliana]
  misc_feature (1)..(211): Homolog of NCBI NO: 5360263 NR Description: NtPRp27 [Nicotiana tabacum]
  misc_feature (1)..(212): Homolog of NCBI NO: 27803890 NR Description: NtPRp27-like protein [Solanum tuberosum]
  misc_feature (1)..(211): Homolog of NCBI NO: 14329814 NR Description: putative NtPRp27-like protein [Atropa belladonna]
MLVVSLVNAVDYSVVDNSGDSTGGRRFRGEIGGISYGTQTLRSATDFVWRLFQQTNPSDRKSVTKITLFMENGDGVAYNSANEIHFNVGYLAGVSGDVKREFTGVVYHEVVHSWQWNGAGRAPGGLIEGIADYVRLKAGYAPSHWVGPGRGDRWDQGYDVTARFLDYCNGLRNGFVAELNKKMRNGYSDGFFVDLLGKDVNQLWREYKAKYGQ

SEQ ID NO: 98244 - DNA, 1588 bp, Arabidopsis thaliana
  misc_feature (1)..(1588): Ceres Seq. ID no. 13592796
  misc_feature: MA Experiment ID: 20000171 Result: Down-regulated in Transcription
  misc_feature: MA Experiment 20000171 PARAMETER Experiment Name: At_42deg_Heat_P Parameter: Age (day) Value: 14
  misc_feature: MA Experiment 20000171 PARAMETER Experiment Name: At_42deg_Heat_P Parameter: Organism Value: A. thaliana
  misc_feature: MA Experiment 20000171 PARAMETER Experiment Name: At_42deg_Heat_P Parameter: Plant Line Value: WS
  misc_feature: MA Experiment 20000171 PARAMETER Experiment Name: At_42deg_Heat_P Parameter: Temperature (deg C) Value: 42 vs. 22
  misc_feature: MA Experiment 20000171 PARAMETER Experiment Name: At_42deg_Heat_P Parameter: Timepoint (hr) Value: 1
  misc_feature: MA Experiment 20000171 PARAMETER Experiment Name: At_42deg_Heat_P Parameter: Tissue Value: Aerial
  misc_feature: MA Experiment ID: 20000173 Result: Down-regulated in Transcription
  misc_feature: MA Experiment 20000173 PARAMETER Experiment Name: At_42deg_Heat_P Parameter: Age (day) Value: 14
  misc_feature: MA Experiment 20000173 PARAMETER Experiment Name: At_42deg_Heat_P Parameter: Organism Value: A. thaliana
  misc_feature: MA Experiment 20000173 PARAMETER Experiment Name: At_42deg_Heat_P Parameter: Plant Line Value: WS
  misc_feature: MA Experiment 20000173 PARAMETER Experiment Name: At_42deg_Heat_P Parameter: Temperature (deg C) Value: 42 vs. 22
  misc_feature: MA Experiment 20000173 PARAMETER Experiment Name: At_42deg_Heat_P Parameter: Timepoint (hr) Value: 6
  misc_feature: MA Experiment 20000173 PARAMETER Experiment Name: At_42deg_Heat_P Parameter: Tissue Value: Aerial
  misc_feature: MA Experiment ID: 20000182 Result: Down-regulated in Transcription
  misc_feature: MA Experiment 20000182 PARAMETER Experiment Name: At_2mM_SA_P Parameter: Age (day) Value: 14
  misc_feature: MA Experiment 20000182 PARAMETER Experiment Name: At_2mM_SA_P Parameter: Organism Value: A. thaliana
  misc_feature: MA Experiment 20000182 PARAMETER Experiment Name: At_2mM_SA_P Parameter: Plant Line Value: WS
  misc_feature: MA Experiment 20000182 PARAMETER Experiment Name: At_2mM_SA_P Parameter: Timepoint (hr) Value: 6
  misc_feature: MA Experiment 20000182 PARAMETER Experiment Name: At_2mM_SA_P Parameter: Tissue Value: Aerial
  misc_feature: MA Experiment 20000182 PARAMETER Experiment Name: At_2mM_SA_P Parameter: Treatment Value: 2mM SA vs. No Treatment
  misc_feature: MA Experiment ID: 20000184 Result: Up-regulated in Transcription
  misc_feature: MA Experiment 20000184 PARAMETER Experiment Name: At_Shoots__P Parameter: Age (day) Value: 7
  misc_feature: MA Experiment 20000184 PARAMETER Experiment Name: At_Shoots__P Parameter: Tissue Value: Shoots vs. Whole Plant
  misc_feature: MA Experiment ID: 20000185 Result: Up-regulated in Transcription
  misc_feature: MA Experiment 20000185 PARAMETER Experiment Name: At_Roots__P Parameter: Age (day) Value: 7 vs. 21
  misc_feature: MA Experiment 20000185 PARAMETER Experiment Name: At_Roots__P Parameter: Organism Value: A. thaliana
  misc_feature: MA Experiment 20000185 PARAMETER Experiment Name: At_Roots__P Parameter: Tissue Value: Roots vs. Whole Plant
  misc_feature: MA Experiment ID: 20000227 Result: Down-regulated in Transcription
  misc_feature: MA Experiment 20000227 PARAMETER Experiment Name: At_Root-Tips-vs-Tops_P Parameter: Tissue Value: Root Tips vs. Root Tops
  misc_feature: MA Experiment ID: 20000234 Result: Up-regulated in Transcription
  misc_feature: MA Experiment 20000234 PARAMETER Experiment Name: At_Siliques_P Parameter: Age (day) Value: 21
  misc_feature: MA Experiment 20000234 PARAMETER Experiment Name: At_Siliques_P Parameter: Organism Value: A. thaliana
  misc_feature: MA Experiment 20000234 PARAMETER Experiment Name: At_Siliques_P Parameter: Plant Line Value: WS
  misc_feature: MA Experiment 20000234 PARAMETER Experiment Name: At_Siliques_P Parameter: Tissue Value: Less Than 5mm Siliques vs. Whole Plant
  misc_feature: MA Experiment ID: 20000235 Result: Up-regulated in Transcription
  misc_feature: MA Experiment 20000235 PARAMETER Experiment Name: At_Siliques_P Parameter: Age (day) Value: 21
  misc_feature: MA Experiment 20000235 PARAMETER Experiment Name: At_Siliques_P Parameter: Organism Value: A. thaliana
  misc_feature: MA Experiment 20000235 PARAMETER Experiment Name: At_Siliques_P Parameter: Plant Line Value: WS
  misc_feature: MA Experiment 20000235 PARAMETER Experiment Name: At_Siliques_P Parameter: Tissue Value: 5-10mm Siliques vs. Whole Plant
  misc_feature: MA Experiment ID: 20000264 Result: Up-regulated in Transcription
  misc_feature: MA Experiment 20000264 PARAMETER Experiment Name: At_Open_Flower_P Parameter: Age (day) Value: 21
  misc_feature: MA Experiment 20000264 PARAMETER Experiment Name: At_Open_Flower_P Parameter: Plant Line Value: WS
  misc_feature: MA Experiment 20000264 PARAMETER Experiment Name: At_Open_Flower_P Parameter: Tissue Value: Open Flower vs. Whole Plant
  misc_feature: MA Experiment ID: 20000437 Result: Down-regulated in Transcription
  misc_feature: MA Experiment 20000437 PARAMETER Experiment Name: At_Drought_P Parameter: Age (day) Value: 8
  misc_feature: MA Experiment 20000437 PARAMETER Experiment Name: At_Drought_P Parameter: Organism Value: A. thaliana
  misc_feature: MA Experiment 20000437 PARAMETER Experiment Name: At_Drought_P Parameter: Plant Line Value: WS
  misc_feature: MA Experiment 20000437 PARAMETER Experiment Name: At_Drought_P Parameter: Timepoint (hr) Value: 24
  misc_feature: MA Experiment 20000437 PARAMETER Experiment Name: At_Drought_P Parameter: Tissue Value: Whole Plant
  misc_feature: MA Experiment 20000437 PARAMETER Experiment Name: At_Drought_P Parameter: Treatment Value: Drought vs. No Drought
  misc_feature: MA Experiment ID: 20000438 Result: Up-regulated in Transcription
  misc_feature: MA Experiment 20000438 PARAMETER Experiment Name: At_Shoots__P Parameter: Age (day) Value: 14
  misc_feature: MA Experiment 20000438 PARAMETER Experiment Name: At_Shoots__P Parameter: Tissue Value: Shoots vs. Whole Plant
  misc_feature: MA Experiment ID: 20000439 Result: Up-regulated in Transcription
  misc_feature: MA Experiment 20000439 PARAMETER Experiment Name: At_Roots__P Parameter: Age (day) Value: 14 vs. 21
  misc_feature: MA Experiment 20000439 PARAMETER Experiment Name: At_Roots__P Parameter: Organism Value: A. thaliana
  misc_feature: MA Experiment 20000439 PARAMETER Experiment Name: At_Roots__P Parameter: Tissue Value: Roots vs. Whole Plant
  misc_feature: MA Experiment ID: 20001248 Result: Down-regulated in Transcription
  misc_feature: MA Experiment 20001248 PARAMETER Experiment Name: At_Far-red-induction_P Parameter: Age (day) Value: 7
  misc_feature: MA Experiment 20001248 PARAMETER Experiment Name: At_Far-red-induction_P Parameter: Light Value: Far-red vs. White
  misc_feature: MA Experiment 20001248 PARAMETER Experiment Name: At_Far-red-induction_P Parameter: Organism Value: A. thaliana
  misc_feature: MA Experiment 20001248 PARAMETER Experiment Name: At_Far-red-induction_P Parameter: Plant Line Value: Columbia
  misc_feature: MA Experiment 20001248 PARAMETER Experiment Name: At_Far-red-induction_P Parameter: Timepoint (hr) Value: 4
  misc_feature: MA Experiment 20001248 PARAMETER Experiment Name: At_Far-red-induction_P Parameter: Tissue Value: Whole Plant
  misc_feature: MA Experiment ID: 20001450 Result: Down-regulated in Transcription
  misc_feature: MA Experiment 20001450 PARAMETER Experiment Name: At_Far-red-induction_P Parameter: Age (day) Value: 7
  misc_feature: MA Experiment 20001450 PARAMETER Experiment Name: At_Far-red-induction_P Parameter: Light Value: Far-red vs. White
  misc_feature: MA Experiment 20001450 PARAMETER Experiment Name: At_Far-red-induction_P Parameter: Organism Value: A. thaliana
  misc_feature: MA Experiment 20001450 PARAMETER Experiment Name: At_Far-red-induction_P Parameter: Plant Line Value: Columbia
  misc_feature: MA Experiment 20001450 PARAMETER Experiment Name: At_Far-red-induction_P Parameter: Timepoint (hr) Value: 8
  misc_feature: MA Experiment 20001450 PARAMETER Experiment Name: At_Far-red-induction_P Parameter: Tissue Value: Whole Plant
  misc_feature: MA Experiment ID: 20001911 Result: Down-regulated in Transcription
  misc_feature: MA Experiment 20001911 PARAMETER Experiment Name: At_Drought_Reproduction_P Parameter: Age (day) Value: 40
  misc_feature: MA Experiment 20001911 PARAMETER Experiment Name: At_Drought_Reproduction_P Parameter: Organism Value: A. thaliana
  misc_feature: MA Experiment 20001911 PARAMETER Experiment Name: At_Drought_Reproduction_P Parameter: Plant Line Value: WS
  misc_feature: MA Experiment 20001911 PARAMETER Experiment Name: At_Drought_Reproduction_P Parameter: Timepoint (day) Value: 10
  misc_feature: MA Experiment 20001911 PARAMETER Experiment Name: At_Drought_Reproduction_P Parameter: Tissue Value: Flowers
  misc_feature: MA Experiment 20001911 PARAMETER Experiment Name: At_Drought_Reproduction_P Parameter: Treatment Value: Drought vs. No Drought
atctctgaatcactcataaaccctttcttcttccttgttcaaatccactcactcttggagagagacgactcaaacgcatagtctctcctctgtatttactcgttatcgtcactgtgagagagagagagagagagagcgcgcgcattcccccaattaaagcctctctgctccaaaccgtgatatactctttacgtwstttgtttttgcctttatccttccctagttgtgtataattttgttcttttcttatggagatggatctcagcaaggttactcttgacattttcacaaagcttgaacagaaatggctctctcactgcgactcctcccggaagactcgtatccttagcatcgacggtggcggtaccactggcattgtcgccgctgcttctattctccacctcgagcaccagatccgccttcaaaccggcgaccctcacgctcacatctctgatttcttcgacattgtcgccggaactggcatcggaggcattctcgccgccctccttgtcgccgacgacggctccggcaggccgatgttcactgccagagacgcggttaagtttgtcgcggagaagaactcggagctcttcgagatcaggtacaccggagttttcaggaggaacaagagatactcggggaagagcatggagagggttttggagacggcgtttaggagagaggacggtaaggtgttgacgatgaaggacacgtgtaagcctctccttgttccttgctacgacctcaaaacctctgctcctttcgttttctcacgcgccggcgcgtctgagtctccgagcttcgacttcgagctgtggaaagtctgccgtgccacgtcagcaacaccaagcctcttcaagccgttcagtgtagtgtcggtggacgggaaaacctcatgctcagccgtagacggcggtttggtgatgaacaatccaacagcagctgccgtcacgcacgtgctacacaacaaacgagatttcccgtcagtaaacggcgtagatgacttgcttgtactgtcgttgggaaacggtccgtcgaccatgtcatcatcaccagggaggaaactccgtcgtaacggagactgttcgacgtcaagtgtggtggacatagtggttgacggcgtttccgataccgtcgatcagatgctggggaacgctttctgctggaaccgtactgattacgttagaatccaggcgaacggtttgacgagcggcggagcggaggagttgctgaaagagagaggtgtggaaacggcgccgtttggggtaaaacggatactaacggagagtaacggagaaagaatagagggtttcgtgcaacgtcttgttgcgtcaggaaagtcaagtctacctccaagtccttgcaaggaatctgccgttaaccctctcgctgacggccgttaagtttcctttattattataaccctccccgtccgtgatgtaagaagtttgtaaccaaacccctgggttaattttttaaccccagccagcatcttcgagttaattaattagcctttctttttttctaatgactttagttgaggaattaataatggttaatgaatgatagtctttacttatttatcact

SEQ ID NO: 98245 - protein, 384 aa, Arabidopsis thaliana; identical to SEQ ID NO: 43536
  peptide (1)..(384): Ceres Seq. ID no. 15221154
  misc_feature (33)..(234): Pfam Name: Patatin-like phospholipase Pfam Description: Patatin-like phospholipase
  misc_feature (1)..(384): Homolog of NCBI NO: 18412659 NR Description: patatin-related [Arabidopsis thaliana] AT3g63200/F16M2_50 [Arabidopsis thaliana]
  misc_feature (3)..(384): Homolog of NCBI NO: 11357489 NR Description: hypothetical protein F16M2.50 - Arabidopsis >gi|7523402|emb|CAB86421.1| putative protein [Arabidopsis
  misc_feature (29)..(322): Homolog of NCBI NO: 15225054 NR Description: patatin family [Arabidopsis thaliana]
  misc_feature (309)..(360): Homolog of NCBI NO: 15225054 NR Description: patatin family [Arabidopsis thaliana]
  misc_feature (3)..(322): Homolog of NCBI NO: 15233136 NR Description: patatin-related [Arabidopsis thaliana]
  misc_feature (322)..(360): Homolog of NCBI NO: 15233136 NR Description: patatin-related [Arabidopsis thaliana]
  misc_feature (32)..(322): Homolog of NCBI NO: 30688454 NR Description: patatin-related [Arabidopsis thaliana]
  misc_feature (324)..(371): Homolog of NCBI NO: 30688454 NR Description: patatin-related [Arabidopsis thaliana]
  misc_feature (32)..(322): Homolog of NCBI NO: 7486230 NR Description: hypothetical protein F27B13.40 - Arabidopsis >gi|4914404|emb|CAB43655.1| putative protein [Arabidopsis >gi|7269879|emb|CAB79738.1| putative protein [Arabidopsis
  misc_feature (324)..(371): Homolog of NCBI NO: 7486230 NR Description: hypothetical protein F27B13.40 - Arabidopsis >gi|4914404|emb|CAB43655.1| putative protein [Arabidopsis >gi|7269879|emb|CAB79738.1| putative protein [Arabidopsis

SEQ ID NO: 98246 - protein, 382 aa, Arabidopsis thaliana; identical to SEQ ID NO: 43537
  peptide (1)..(382): Ceres Seq. ID no. 15221155
  misc_feature (31)..(232): Pfam Name: Patatin-like phospholipase Pfam Description: Patatin-like phospholipase
  misc_feature (1)..(382): Homolog of NCBI NO: 18412659 NR Description: patatin-related [Arabidopsis thaliana] AT3g63200/F16M2_50 [Arabidopsis thaliana]
  misc_feature (1)..(382): Homolog of NCBI NO: 11357489 NR Description: hypothetical protein F16M2.50 - Arabidopsis >gi|7523402|emb|CAB86421.1| putative protein [Arabidopsis
  misc_feature (27)..(320): Homolog of NCBI NO: 15225054 NR Description: patatin family [Arabidopsis thaliana]
  misc_feature (307)..(358): Homolog of NCBI NO: 15225054 NR Description: patatin family [Arabidopsis thaliana]
  misc_feature (1)..(320): Homolog of NCBI NO: 15233136 NR Description: patatin-related [Arabidopsis thaliana]
  misc_feature (320)..(358): Homolog of NCBI NO: 15233136 NR Description: patatin-related [Arabidopsis thaliana]
  misc_feature (30)..(320): Homolog of NCBI NO: 30688454 NR Description: patatin-related [Arabidopsis thaliana]
  misc_feature (322)..(369): Homolog of NCBI NO: 30688454 NR Description: patatin-related [Arabidopsis thaliana]
  misc_feature (30)..(320): Homolog of NCBI NO: 7486230 NR Description: hypothetical protein F27B13.40 - Arabidopsis >gi|4914404|emb|CAB43655.1| putative protein [Arabidopsis >gi|7269879|emb|CAB79738.1| putative protein [Arabidopsis
  misc_feature (322)..(369): Homolog of NCBI NO: 7486230 NR Description: hypothetical protein F27B13.40 - Arabidopsis >gi|4914404|emb|CAB43655.1| putative protein [Arabidopsis >gi|7269879|emb|CAB79738.1| putative protein [Arabidopsis

SEQ ID NO: 98247 - protein, 288 aa, Arabidopsis thaliana; identical to SEQ ID NO: 43538
  peptide (1)..(288): Ceres Seq. ID no. 15221156
  misc_feature (1)..(138): Pfam Name: Patatin-like phospholipase Pfam Description: Patatin-like phospholipase
  misc_feature (1)..(288): Homolog of NCBI NO: 18412659 NR Description: patatin-related [Arabidopsis thaliana] AT3g63200/F16M2_50 [Arabidopsis thaliana]
  misc_feature (1)..(288): Homolog of NCBI NO: 11357489 NR Description: hypothetical protein F16M2.50 - Arabidopsis >gi|7523402|emb|CAB86421.1| putative protein [Arabidopsis
  misc_feature (1)..(226): Homolog of NCBI NO: 15225054 NR Description: patatin family [Arabidopsis thaliana]
  misc_feature (213)..(264): Homolog of NCBI NO: 15225054 NR Description: patatin family [Arabidopsis thaliana]
  misc_feature (1)..(226): Homolog of NCBI NO: 15233136 NR Description: patatin-related [Arabidopsis thaliana]
  misc_feature (226)..(264): Homolog of NCBI NO: 15233136 NR Description: patatin-related [Arabidopsis thaliana]
  misc_feature (1)..(226): Homolog of NCBI NO: 30688454 NR Description: patatin-related [Arabidopsis thaliana]
  misc_feature (228)..(275): Homolog of NCBI NO: 30688454 NR Description: patatin-related [Arabidopsis thaliana]
  misc_feature (1)..(226): Homolog of NCBI NO: 7486230 NR Description: hypothetical protein F27B13.40 - Arabidopsis >gi|4914404|emb|CAB43655.1| putative protein [Arabidopsis >gi|7269879|emb|CAB79738.1| putative protein [Arabidopsis
  misc_feature (228)..(275): Homolog of NCBI NO: 7486230 NR Description: hypothetical protein F27B13.40 - Arabidopsis >gi|4914404|emb|CAB43655.1| putative protein [Arabidopsis >gi|7269879|emb|CAB79738.1| putative protein [Arabidopsis

SEQ ID NO: 98248 - DNA, 1297 bp, Arabidopsis thaliana
  misc_feature (1)..(1297): Ceres Seq. ID no. 13592809
  misc_feature: MA Experiment ID: 108435 Result: Down-regulated in Transcription
  misc_feature: MA Experiment 108435 PARAMETER Experiment Name: At_stm_Mutants_cDNA_P Parameter: Plant Line Value: wt Landsburg vs stm
  misc_feature: MA Experiment 108435 PARAMETER Experiment Name: At_stm_Mutants_cDNA_P Parameter: Tissue Value: Shoot Apical Meristem Region
  misc_feature: MA Experiment ID: 108461 Result: Up-regulated in Transcription
  misc_feature: MA Experiment 108461 PARAMETER Experiment Name: At_Germinating_Seeds_cDNA_P Parameter: Age (day) Value: 1 vs. 0
  misc_feature: MA Experiment 108461 PARAMETER Experiment Name: At_Germinating_Seeds_cDNA_P Parameter: Tissue Value: Germinating Seeds
  misc_feature: MA Experiment ID: 108464 Result: Up-regulated in Transcription
  misc_feature: MA Experiment 108464 PARAMETER Experiment Name: At_Germinating_Seeds_cDNA_P Parameter: Age (day) Value: 4 vs. 0
  misc_feature: MA Experiment 108464 PARAMETER Experiment Name: At_Germinating_Seeds_cDNA_P Parameter: Tissue Value: Germinating Seeds
  misc_feature: MA Experiment ID: 108474 Result: Up-regulated in Transcription
  misc_feature: MA Experiment 108474 PARAMETER Experiment Name: At_Drought_Flowers_cDNA_P Parameter: Timepoint (hr) Value: null
  misc_feature: MA Experiment 108474 PARAMETER Experiment Name: At_Drought_Flowers_cDNA_P Parameter: Treatment Value: Drought vs. No Drought
  misc_feature: MA Experiment ID: 108605 Result: Down-regulated in Transcription
  misc_feature: MA Experiment 108605 PARAMETER Experiment Name: At_100uM_ABA_cDNA_P Parameter: Timepoint (hr) Value: 6
  misc_feature: MA Experiment 108605 PARAMETER Experiment Name: At_100uM_ABA_cDNA_P Parameter: Tissue Value: Aerial
  misc_feature: MA Experiment 108605 PARAMETER Experiment Name: At_100uM_ABA_cDNA_P Parameter: Treatment Value: 100uM ABA vs. No Treatment
  misc_feature: MA Experiment ID: 20000069 Result: Down-regulated in Transcription
  misc_feature: MA Experiment 20000069 PARAMETER Experiment Name: At_100uM_ABA_Mutants_cDNA_P Parameter: Plant Line Value: CS23
  misc_feature: MA Experiment 20000069 PARAMETER Experiment Name: At_100uM_ABA_Mutants_cDNA_P Parameter: Timepoint (hr) Value: 6
  misc_feature: MA Experiment 20000069 PARAMETER Experiment Name: At_100uM_ABA_Mutants_cDNA_P Parameter: Tissue Value: Aerial
  misc_feature: MA Experiment 20000069 PARAMETER Experiment Name: At_100uM_ABA_Mutants_cDNA_P Parameter: Treatment Value: 100uM ABA vs. No Treatment
  misc_feature: MA Experiment ID: 20000070 Result: Down-regulated in Transcription
  misc_feature: MA Experiment 20000070 PARAMETER Experiment Name: At_100uM_ABA_Mutants_cDNA_P Parameter: Plant Line Value: CS24
  misc_feature: MA Experiment 20000070 PARAMETER Experiment Name: At_100uM_ABA_Mutants_cDNA_P Parameter: Timepoint (hr) Value: 6
  misc_feature: MA Experiment 20000070 PARAMETER Experiment Name: At_100uM_ABA_Mutants_cDNA_P Parameter: Tissue Value: Aerial
  misc_feature: MA Experiment 20000070 PARAMETER Experiment Name: At_100uM_ABA_Mutants_cDNA_P Parameter: Treatment Value: 100uM ABA vs. No Treatment
  misc_feature: MA Experiment ID: 20000072 Result: Down-regulated in Transcription
  misc_feature: MA Experiment 20000072 PARAMETER Experiment Name: At_100uM_ABA_Mutants_cDNA_P Parameter: Plant Line Value: CS8105
  misc_feature: MA Experiment 20000072 PARAMETER Experiment Name: At_100uM_ABA_Mutants_cDNA_P Parameter: Timepoint (hr) Value: 6
  misc_feature: MA Experiment 20000072 PARAMETER Experiment Name: At_100uM_ABA_Mutants_cDNA_P Parameter: Tissue Value: Aerial
  misc_feature: MA Experiment 20000072 PARAMETER Experiment Name: At_100uM_ABA_Mutants_cDNA_P Parameter: Treatment Value: 100uM ABA vs. No Treatment
  misc_feature: MA Experiment ID: 20000087 Result: Down-regulated in Transcription
  misc_feature: MA Experiment 20000087 PARAMETER Experiment Name: At_100uM_ABA_Mutants_cDNA_P Parameter: Plant Line Value: WS
  misc_feature: MA Experiment 20000087 PARAMETER Experiment Name: At_100uM_ABA_Mutants_cDNA_P Parameter: Timepoint (hr) Value: 6
  misc_feature: MA Experiment 20000087 PARAMETER Experiment Name: At_100uM_ABA_Mutants_cDNA_P Parameter: Tissue Value: Aerial
  misc_feature: MA Experiment 20000087 PARAMETER Experiment Name: At_100uM_ABA_Mutants_cDNA_P Parameter: Treatment Value: 100uM ABA vs. No Treatment
  misc_feature: MA Experiment ID: 20000088 Result: Down-regulated in Transcription
  misc_feature: MA Experiment 20000088 PARAMETER Experiment Name: At_100uM_ABA_Mutants_cDNA_P Parameter: Plant Line Value: Landsberg
  misc_feature: MA Experiment 20000088 PARAMETER Experiment Name: At_100uM_ABA_Mutants_cDNA_P Parameter: Timepoint (hr) Value: 6
  misc_feature: MA Experiment 20000088 PARAMETER Experiment Name: At_100uM_ABA_Mutants_cDNA_P Parameter: Tissue Value: Aerial
  misc_feature: MA Experiment 20000088 PARAMETER Experiment Name: At_100uM_ABA_Mutants_cDNA_P Parameter: Treatment Value: 100uM ABA vs. No Treatment
  misc_feature: MA Experiment ID: 20000090 Result: Down-regulated in Transcription
  misc_feature: MA Experiment ID: 20000113 Result: Up-regulated in Transcription
  misc_feature: MA Experiment 20000113 PARAMETER Experiment Name: At_42deg_Heat_cDNA_P Parameter: Temperature (deg C) Value: 42 vs. 22
  misc_feature: MA Experiment 20000113 PARAMETER Experiment Name: At_42deg_Heat_cDNA_P Parameter: Timepoint (hr) Value: 8
  misc_feature: MA Experiment 20000113 PARAMETER Experiment Name: At_42deg_Heat_cDNA_P Parameter: Tissue Value: Aerial
  misc_feature: MA Experiment ID: 20000117 Result: Down-regulated in Transcription
  misc_feature: MA Experiment 20000117 PARAMETER Experiment Name: At_100uM_ABA_Mutants_cDNA_P Parameter: Plant Line Value: Columbia
  misc_feature: MA Experiment 20000117 PARAMETER Experiment Name: At_100uM_ABA_Mutants_cDNA_P Parameter: Timepoint (hr) Value: 6
  misc_feature: MA Experiment 20000117 PARAMETER Experiment Name: At_100uM_ABA_Mutants_cDNA_P Parameter: Tissue Value: Aerial
  misc_feature: MA Experiment 20000117 PARAMETER Experiment Name: At_100uM_ABA_Mutants_cDNA_P Parameter: Treatment Value: 100uM ABA vs. No Treatment
  misc_feature: MA Experiment ID: 20000184 Result: Up-regulated in Transcription
  misc_feature: MA Experiment 20000184 PARAMETER Experiment Name: At_Shoots__P Parameter: Age (day) Value: 7
  misc_feature: MA Experiment 20000184 PARAMETER Experiment Name: At_Shoots__P Parameter: Tissue Value: Shoots vs. Whole Plant
  misc_feature: MA Experiment ID: 20000185 Result: Down-regulated in Transcription
  misc_feature: MA Experiment 20000185 PARAMETER Experiment Name: At_Roots__P Parameter: Age (day) Value: 7 vs. 21
  misc_feature: MA Experiment 20000185 PARAMETER Experiment Name: At_Roots__P Parameter: Organism Value: A. thaliana
  misc_feature: MA Experiment 20000185 PARAMETER Experiment Name: At_Roots__P Parameter: Tissue Value: Roots vs. Whole Plant
  misc_feature: MA Experiment ID: 20000264 Result: Down-regulated in Transcription
  misc_feature: MA Experiment 20000264 PARAMETER Experiment Name: At_Open_Flower_P Parameter: Age (day) Value: 21
  misc_feature: MA Experiment 20000264 PARAMETER Experiment Name: At_Open_Flower_P Parameter: Plant Line Value: WS
  misc_feature: MA Experiment 20000264 PARAMETER Experiment Name: At_Open_Flower_P Parameter: Tissue Value: Open Flower vs. Whole Plant
  misc_feature: MA Experiment ID: 20000308 Result: Down-regulated in Transcription
  misc_feature: MA Experiment 20000308 PARAMETER Experiment Name: At_100mM_NaCl__P Parameter: Age (day) Value: 17
  misc_feature: MA Experiment 20000308 PARAMETER Experiment Name: At_100mM_NaCl__P Parameter: Organism Value: A. thaliana
  misc_feature: MA Experiment 20000308 PARAMETER Experiment Name: At_100mM_NaCl__P Parameter: Plant Line Value: WS
  misc_feature: MA Experiment 20000308 PARAMETER Experiment Name: At_100mM_NaCl__P Parameter: Timepoint (hr) Value: 72
  misc_feature: MA Experiment 20000308 PARAMETER Experiment Name: At_100mM_NaCl__P Parameter: Tissue Value: Whole Plant
  misc_feature: MA Experiment 20000308 PARAMETER Experiment Name: At_100mM_NaCl__P Parameter: Treatment Value: 100mM NaCl vs. No Treatment
  misc_feature: MA Experiment ID: 20000438 Result: Up-regulated in Transcription
  misc_feature: MA Experiment 20000438 PARAMETER Experiment Name: At_Shoots__P Parameter: Age (day) Value: 14
  misc_feature: MA Experiment 20000438 PARAMETER Experiment Name: At_Shoots__P Parameter: Tissue Value: Shoots vs. Whole Plant
  misc_feature: MA Experiment ID: 20000439 Result: Down-regulated in Transcription
  misc_feature: MA Experiment 20000439 PARAMETER Experiment Name: At_Roots__P Parameter: Age (day) Value: 14 vs. 21
  misc_feature: MA Experiment 20000439 PARAMETER Experiment Name: At_Roots__P Parameter: Organism Value: A. thaliana
  misc_feature: MA Experiment 20000439 PARAMETER Experiment Name: At_Roots__P Parameter: Tissue Value: Roots vs. Whole Plant
  misc_feature: MA Experiment ID: 20000460 Result: Down-regulated in Transcription
  misc_feature: MA Experiment 20000460 PARAMETER Experiment Name: At_10percent_PEG_P Parameter: Age (day) Value: 12
  misc_feature: MA Experiment 20000460 PARAMETER Experiment Name: At_10percent_PEG_P Parameter: Organism Value: A. thaliana
  misc_feature: MA Experiment 20000460 PARAMETER Experiment Name: At_10percent_PEG_P Parameter: Plant Line Value: WS
  misc_feature: MA Experiment 20000460 PARAMETER Experiment Name: At_10percent_PEG_P Parameter: Timepoint (day) Value: 12
  misc_feature: MA Experiment 20000460 PARAMETER Experiment Name: At_10percent_PEG_P Parameter: Tissue Value: Whole Plant
  misc_feature: MA Experiment 20000460 PARAMETER Experiment Name: At_10percent_PEG_P Parameter: Treatment Value: 10percent PEG vs. No Treatment
  misc_feature: MA Experiment ID: 20000794 Result: Down-regulated in Transcription
  misc_feature: MA Experiment 20000794 PARAMETER Experiment Name: At_Petals_P Parameter: Age (day) Value: 23-25 days
  misc_feature: MA Experiment 20000794 PARAMETER Experiment Name: At_Petals_P Parameter: Plant Line Value: WS
  misc_feature: MA Experiment 20000794 PARAMETER Experiment Name: At_Petals_P Parameter: Tissue Value: Petals vs. Whole plant
  misc_feature: MA Experiment ID: 20001450 Result: Down-regulated in Transcription
  misc_feature: MA Experiment 20001450 PARAMETER Experiment Name: At_Far-red-induction_P Parameter: Age (day) Value: 7
  misc_feature: MA Experiment 20001450 PARAMETER Experiment Name: At_Far-red-induction_P Parameter: Light Value: Far-red vs. White
  misc_feature: MA Experiment 20001450 PARAMETER Experiment Name: At_Far-red-induction_P Parameter: Organism Value: A. thaliana
  misc_feature: MA Experiment 20001450 PARAMETER Experiment Name: At_Far-red-induction_P Parameter: Plant Line Value: Columbia
  misc_feature: MA Experiment 20001450 PARAMETER Experiment Name: At_Far-red-induction_P Parameter: Timepoint (hr) Value: 8
  misc_feature: MA Experiment 20001450 PARAMETER Experiment Name: At_Far-red-induction_P Parameter: Tissue Value: Whole Plant
  misc_feature: MA Experiment ID: 20001451 Result: Down-regulated in Transcription
  misc_feature: MA Experiment 20001451 PARAMETER Experiment Name: At_Far-red-induction_P Parameter: Age (day) Value: 7
  misc_feature: MA Experiment 20001451 PARAMETER Experiment Name: At_Far-red-induction_P Parameter: Light Value: Far-red vs. White
  misc_feature: MA Experiment 20001451 PARAMETER Experiment Name: At_Far-red-induction_P Parameter: Organism Value: A. thaliana
  misc_feature: MA Experiment 20001451 PARAMETER Experiment Name: At_Far-red-induction_P Parameter: Plant Line Value: Columbia
  misc_feature: MA Experiment 20001451 PARAMETER Experiment Name: At_Far-red-induction_P Parameter: Timepoint (hr) Value: 24
  misc_feature: MA Experiment 20001451 PARAMETER Experiment Name: At_Far-red-induction_P Parameter: Tissue Value: Whole Plant
  misc_feature: MA Experiment ID: 20001555 Result: Down-regulated in Transcription
  misc_feature: MA Experiment 20001555 PARAMETER Experiment Name: At_Drought_Soil_Dry_P Parameter: Age (day) Value: 24
  misc_feature: MA Experiment 20001555 PARAMETER Experiment Name: At_Drought_Soil_Dry_P Parameter: Organism Value: A. thaliana
  misc_feature: MA Experiment 20001555 PARAMETER Experiment Name: At_Drought_Soil_Dry_P Parameter: Plant Line Value: WS
  misc_feature: MA Experiment 20001555 PARAMETER Experiment Name: At_Drought_Soil_Dry_P Parameter: Post Timepoint (hr) Value: None
  misc_feature: MA Experiment 20001555 PARAMETER Experiment Name: At_Drought_Soil_Dry_P Parameter: Post-Treatment Value: None
  misc_feature: MA Experiment 20001555 PARAMETER Experiment Name: At_Drought_Soil_Dry_P Parameter: Timepoint (day) Value: 10
  misc_feature: MA Experiment 20001555 PARAMETER Experiment Name: At_Drought_Soil_Dry_P Parameter: Treatment Value: Drought vs. No Drought
  misc_feature: MA Experiment ID: 20001557 Result: Down-regulated in Transcription
  misc_feature: MA Experiment 20001557 PARAMETER Experiment Name: At_Drought_Soil_Dry_P Parameter: Age (day) Value: 27
  misc_feature: MA Experiment 20001557 PARAMETER Experiment Name: At_Drought_Soil_Dry_P Parameter: Organism Value: A. thaliana
  misc_feature: MA Experiment 20001557 PARAMETER Experiment Name: At_Drought_Soil_Dry_P Parameter: Plant Line Value: WS
  misc_feature: MA Experiment 20001557 PARAMETER Experiment Name: At_Drought_Soil_Dry_P Parameter: Post Timepoint (hr) Value: 3
  misc_feature: MA Experiment 20001557 PARAMETER Experiment Name: At_Drought_Soil_Dry_P Parameter: Post-Treatment Value: Re-Water vs. No Drought
  misc_feature: MA Experiment 20001557 PARAMETER Experiment Name: At_Drought_Soil_Dry_P Parameter: Timepoint (day) Value: 13
  misc_feature: MA Experiment 20001557 PARAMETER Experiment Name: At_Drought_Soil_Dry_P Parameter: Treatment Value: Drought vs. No Drought
  misc_feature: MA Experiment ID: 20001559 Result: Down-regulated in Transcription
  misc_feature: MA Experiment 20001559 PARAMETER Experiment Name: At_Drought_Soil_Dry_P Parameter: Age (day) Value: 28
  misc_feature: MA Experiment 20001559 PARAMETER Experiment Name: At_Drought_Soil_Dry_P Parameter: Organism Value: A. thaliana
  misc_feature: MA Experiment 20001559 PARAMETER Experiment Name: At_Drought_Soil_Dry_P Parameter: Plant Line Value: WS
  misc_feature: MA Experiment 20001559 PARAMETER Experiment Name: At_Drought_Soil_Dry_P Parameter: Post Timepoint (hr) Value: 29
  misc_feature: MA Experiment 20001559 PARAMETER Experiment Name: At_Drought_Soil_Dry_P Parameter: Post-Treatment Value: Re-Water vs. No Drought
  misc_feature: MA Experiment 20001559 PARAMETER Experiment Name: At_Drought_Soil_Dry_P Parameter: Timepoint (day) Value: 14
  misc_feature: MA Experiment 20001559 PARAMETER Experiment Name: At_Drought_Soil_Dry_P Parameter: Treatment Value: Drought vs. No Drought
  misc_feature: MA Experiment ID: 20001560 Result: Down-regulated in Transcription
  misc_feature: MA Experiment 20001560 PARAMETER Experiment Name: At_Drought_Soil_Dry_P Parameter: Age (day) Value: 28
  misc_feature: MA Experiment 20001560 PARAMETER Experiment Name: At_Drought_Soil_Dry_P Parameter: Organism Value: A. thaliana
  misc_feature: MA Experiment 20001560 PARAMETER Experiment Name: At_Drought_Soil_Dry_P Parameter: Plant Line Value: WS
  misc_feature: MA Experiment 20001560 PARAMETER Experiment Name: At_Drought_Soil_Dry_P Parameter: Post Timepoint (hr) Value: None
  misc_feature: MA Experiment 20001560 PARAMETER Experiment Name: At_Drought_Soil_Dry_P Parameter: Post-Treatment Value: None
  misc_feature: MA Experiment 20001560 PARAMETER Experiment Name: At_Drought_Soil_Dry_P Parameter: Timepoint (day) Value: 14
  misc_feature: MA Experiment 20001560 PARAMETER Experiment Name: At_Drought_Soil_Dry_P Parameter: Treatment Value: Drought vs. No Drought
  misc_feature: MA Experiment ID: 20001757 Result: Up-regulated in Transcription
  misc_feature: MA Experiment 20001757 PARAMETER Experiment Name: At_50mM_NH4NO3_L-to-H_P Parameter: Timepoint (hr) Value: 6
  misc_feature: MA Experiment 20001757 PARAMETER Experiment Name: At_50mM_NH4NO3_L-to-H_P Parameter: Tissue Value: Leaf
  misc_feature: MA Experiment 20001757 PARAMETER Experiment Name: At_50mM_NH4NO3_L-to-H_P Parameter: Treatment Value: 50mM NH4NO3 vs 100mM Mannitol
  misc_feature: MA Experiment ID: 20001905 Result: Down-regulated in Transcription
  misc_feature: MA Experiment 20001905 PARAMETER Experiment Name: At_Drought_Reproduction_P Parameter: Age (day) Value: 40
  misc_feature: MA Experiment 20001905 PARAMETER Experiment Name: At_Drought_Reproduction_P Parameter: Organism Value: A. thaliana
  misc_feature: MA Experiment 20001905 PARAMETER Experiment Name: At_Drought_Reproduction_P Parameter: Plant Line Value: WS
  misc_feature: MA Experiment 20001905 PARAMETER Experiment Name: At_Drought_Reproduction_P Parameter: Timepoint (day) Value: 10
  misc_feature: MA Experiment 20001905 PARAMETER Experiment Name: At_Drought_Reproduction_P Parameter: Tissue Value: Rosettes
  misc_feature: MA Experiment 20001905 PARAMETER Experiment Name: At_Drought_Reproduction_P Parameter: Treatment Value: Drought vs. No Drought
  misc_feature: MA Experiment ID: 20001906 Result: Down-regulated in Transcription
  misc_feature: MA Experiment 20001906 PARAMETER Experiment Name: At_Drought_Reproduction_P Parameter: Age (day) Value: 35
  misc_feature: MA Experiment 20001906 PARAMETER Experiment Name: At_Drought_Reproduction_P Parameter: Organism Value: A. thaliana
  misc_feature: MA Experiment 20001906 PARAMETER Experiment Name: At_Drought_Reproduction_P Parameter: Plant Line Value: WS
  misc_feature: MA Experiment 20001906 PARAMETER Experiment Name: At_Drought_Reproduction_P Parameter: Timepoint (day) Value: 5
  misc_feature: MA Experiment 20001906 PARAMETER Experiment Name: At_Drought_Reproduction_P Parameter: Tissue Value: Siliques
  misc_feature: MA Experiment 20001906 PARAMETER Experiment Name: At_Drought_Reproduction_P Parameter: Treatment Value: Drought vs. No Drought
cattattcacttaagtatatagtagcttccataagagtcttagttctaactataaatacacatatctcactctctctgatctccgcttctcttcgccaacaaatgtcgaccgctcctctctccggcttctttctcacttcactttctccttctcaatcttctctccagaaactctctcttcgtacttcttccaccgtcgcttgcctcccacccgcctcttcttcttcctcatcttcctcctcctcgtcttcccgttccgttccaacgcttatccgtaacgagccagtttttgccgctcctgctcctatcattgccccttattggagtgaagagatgggaaccgaagcatacgacgaggctattgaagctctcaagaagcttctcatcgagaaggaagagctaaagacggttgcagcggcaaaggtggagcagatcacagcggctcttcagacaggtacttcatccgacaagaaagctttcgaccccgtcgaaaccattaagcagggcttcatcaaattcaagaaggagaaatacgaaaccaaccctgctttgtacggtgagctcgcaaagggtcaaagtcctaagtacatggtgtttgcttgttcagactcacgtgtgtgtccatcacacgttctggactttcagccaggagatgccttcgtggtccgtaacatagccaacatggttcctcctttcgacaaggtcaaatacggtggcgttggagcagccattgaatacgcggtcttacaccttaaggtggagaacattgtggtgataggacacagtgcatgtggtgggatcaaagggcttatgtctttccccttagatggaaacaactccactgacttcatagaggactgggtcaaaatctgtttaccagccaagtcaaaggttatatcagaacttggagattcagcctttgaagatcaatgtggccgatgtgaaagggaggcggtgaatgtttcactagcaaacctattgacatatccatttgtgagagaaggacttgtgaagggaacacttgctttgaagggaggctactatgacttcgtcaagggtgcttttgagctttggggacttgaatttggcctctccgaaactagctctgtatgaaccaatccatcatcatcatcatcatcatgaccatccatcatcatcatcattattatcatcgtatataatatatatctaccccatatgtaatttgtaatgtgcctttgactgtgatgagttatctctccctctctaccaactttcttcatatatataaaacaaaaaggaaaagcagatgatatag

SEQ ID NO: 98249 - protein, 370 aa, Arabidopsis thaliana; identical to SEQ ID NO: 35084
  peptide (1)..(370): Ceres Seq. ID no. 13592810
  misc_feature (35)..(370): Homolog of NCBI NO: 30678350 NR Description: carbonic anhydrase, chloroplast precursor thaliana] >gi|16226255|gb|AAL16116.1|AF428284_1 AT3g01500/F4P13_5 thaliana] >gi|16226669|gb|AAL16228.1|AF428459_1 AT3g01500/F4P13_5
  misc_feature (35)..(370): Homolog of NCBI NO: 30678353 NR Description: carbonic anhydrase, chloroplast precursor thaliana] >gi|115470|sp|P27140|CAHC_ARATH Carbonic anhydrase, precursor (Carbonate dehydratase) >gi|320554|pir||S28412
  misc_feature (112)..(370): Homolog of NCBI NO: 30678347 NR Description: carbonic anhydrase, chloroplast precursor thaliana] >gi|20259533|gb|AAM13886.1| putative carbonic
  misc_feature (35)..(370): Homolog of NCBI NO: 7436820 NR Description: carbonate dehydratase (EC 4.2.1.1) 1b - Populus x Populus tremuloides >gi|1354517|gb|AAB65822.1| carbonic
  misc_feature (35)..(370): Homolog of NCBI NO: 7436819 NR Description: carbonate dehydratase (EC 4.2.1.1) 1a - Populus x Populus tremuloides >gi|1354515|gb|AAC49785.1| carbonic
  misc_feature (112)..(370): Homolog of NCBI NO: 21903379 NR Description: Carbonic anhydrase 2 (Carbonate dehydratase 2) AT5g14740 [Arabidopsis thaliana]
  misc_feature (112)..(370): Homolog of NCBI NO: 30685030 NR Description: CARBONIC ANHYDRASE 2 [Arabidopsis thaliana]
  misc_feature (112)..(370): Homolog of NCBI NO: 438449 NR Description: carbonic anhydrase
  misc_feature (35)..(370): Homolog of NCBI NO: 1168738 NR Description: CARBONIC ANHYDRASE 1 (CARBONATE DEHYDRATASE 1)
  misc_feature (35)..(370): Homolog of NCBI NO: 1168746 NR Description: CARBONIC ANHYDRASE (CARBONATE DEHYDRATASE)

SEQ ID NO: 98250 - protein, 336 aa, Arabidopsis thaliana; identical to SEQ ID NO: 35085
  peptide (1)..(336): Ceres Seq. ID no. 13592811
  misc_feature (1)..(336): Homolog of NCBI NO: 30678350 NR Description: carbonic anhydrase, chloroplast precursor thaliana] >gi|16226255|gb|AAL16116.1|AF428284_1 AT3g01500/F4P13_5 thaliana] >gi|16226669|gb|AAL16228.1|AF428459_1 AT3g01500/F4P13_5
  misc_feature (1)..(336): Homolog of NCBI NO: 30678353 NR Description: carbonic anhydrase, chloroplast precursor thaliana] >gi|115470|sp|P27140|CAHC_ARATH Carbonic anhydrase, precursor (Carbonate dehydratase) >gi|320554|pir||S28412
  misc_feature (78)..(336): Homolog of NCBI NO: 30678347 NR Description: carbonic anhydrase, chloroplast precursor thaliana] >gi|20259533|gb|AAM13886.1| putative carbonic
  misc_feature (1)..(336): Homolog of NCBI NO: 7436820 NR Description: carbonate dehydratase (EC 4.2.1.1) 1b - Populus x Populus tremuloides >gi|1354517|gb|AAB65822.1| carbonic
  misc_feature (1)..(336): Homolog of NCBI NO: 7436819 NR Description: carbonate dehydratase (EC 4.2.1.1) 1a - Populus x Populus tremuloides >gi|1354515|gb|AAC49785.1| carbonic
  misc_feature (78)..(336): Homolog of NCBI NO: 21903379 NR Description: Carbonic anhydrase 2 (Carbonate dehydratase 2) AT5g14740 [Arabidopsis thaliana]
  misc_feature (78)..(336): Homolog of NCBI NO: 30685030 NR Description: CARBONIC ANHYDRASE 2 [Arabidopsis thaliana]
  misc_feature (78)..(336): Homolog of NCBI NO: 438449 NR Description: carbonic anhydrase
  misc_feature (1)..(336): Homolog of NCBI NO: 1168738 NR Description: CARBONIC ANHYDRASE 1 (CARBONATE DEHYDRATASE 1)
  misc_feature (1)..(336): Homolog of NCBI NO: 1168746 NR Description: CARBONIC ANHYDRASE (CARBONATE DEHYDRATASE)

SEQ ID NO: 98251 - protein, 259 aa, Arabidopsis thaliana; identical to SEQ ID NO: 35086
  peptide (1)..(259): Ceres Seq. ID no. 13592812
  misc_feature (1)..(259): Homolog of NCBI NO: 30678350 NR Description: carbonic anhydrase, chloroplast precursor thaliana] >gi|16226255|gb|AAL16116.1|AF428284_1 AT3g01500/F4P13_5 thaliana] >gi|16226669|gb|AAL16228.1|AF428459_1 AT3g01500/F4P13_5
  misc_feature (1)..(259): Homolog of NCBI NO: 30678353 NR Description: carbonic anhydrase, chloroplast precursor thaliana] >gi|115470|sp|P27140|CAHC_ARATH Carbonic anhydrase, precursor (Carbonate dehydratase) >gi|320554|pir||S28412
  misc_feature (1)..(259): Homolog of NCBI NO: 30678347 NR Description: carbonic anhydrase, chloroplast precursor thaliana] >gi|20259533|gb|AAM13886.1| putative carbonic
  misc_feature (1)..(259): Homolog of NCBI NO: 7436820 NR Description: carbonate dehydratase (EC 4.2.1.1) 1b - Populus x Populus tremuloides >gi|1354517|gb|AAB65822.1| carbonic
  misc_feature (1)..(259): Homolog of NCBI NO: 7436819 NR Description: carbonate dehydratase (EC 4.2.1.1) 1a - Populus x Populus tremuloides >gi|1354515|gb|AAC49785.1| carbonic
  misc_feature (1)..(259): Homolog of NCBI NO: 21903379 NR Description: Carbonic anhydrase 2 (Carbonate dehydratase 2) AT5g14740 [Arabidopsis thaliana]
  misc_feature (1)..(259): Homolog of NCBI NO: 30685030 NR Description: CARBONIC ANHYDRASE 2 [Arabidopsis thaliana]
  misc_feature (1)..(259): Homolog of NCBI NO: 438449 NR Description: carbonic anhydrase
  misc_feature (1)..(259): Homolog of NCBI NO: 1168738 NR Description: CARBONIC ANHYDRASE 1 (CARBONATE DEHYDRATASE 1)
  misc_feature (1)..(259): Homolog of NCBI NO: 1168746 NR Description: CARBONIC ANHYDRASE (CARBONATE DEHYDRATASE)

SEQ ID NO: 98252 - DNA, 1004 bp, Arabidopsis thaliana
  misc_feature (1)..(1004): Ceres Seq. ID no. 13592861
  misc_feature: MA Experiment ID: 108434 Result: Up-regulated in Transcription
  misc_feature: MA Experiment 108434 PARAMETER Experiment Name: At_Root_Tips_cDNA_P Parameter: Tissue Value: Root Tips
  misc_feature: MA Experiment ID: 108608 Result: Up-regulated in Transcription
  misc_feature: MA Experiment 108608 PARAMETER Experiment Name: At_100uM_ABA_cDNA_P Parameter: Timepoint (hr) Value: 1
  misc_feature: MA Experiment 108608 PARAMETER Experiment Name: At_100uM_ABA_cDNA_P Parameter: Tissue Value: Aerial
  misc_feature: MA Experiment 108608 PARAMETER Experiment Name: At_100uM_ABA_cDNA_P Parameter: Treatment Value: 100uM ABA vs. No Treatment
  misc_feature: MA Experiment ID: 20000166 Result: Up-regulated in Transcription
  misc_feature: MA Experiment 20000166 PARAMETER Experiment Name: At_100uM_ABA_P Parameter: Age (day) Value: 14
  misc_feature: MA Experiment 20000166 PARAMETER Experiment Name: At_100uM_ABA_P Parameter: Organism Value: A. thaliana
  misc_feature: MA Experiment 20000166 PARAMETER Experiment Name: At_100uM_ABA_P Parameter: Plant Line Value: WS
  misc_feature: MA Experiment 20000166 PARAMETER Experiment Name: At_100uM_ABA_P Parameter: Timepoint (hr) Value: 1
  misc_feature: MA Experiment 20000166 PARAMETER Experiment Name: At_100uM_ABA_P Parameter: Tissue Value: Aerial
  misc_feature: MA Experiment 20000166 PARAMETER Experiment Name: At_100uM_ABA_P Parameter: Treatment Value: 100uM ABA vs. No Treatment
  misc_feature: MA Experiment ID: 20000227 Result: Up-regulated in Transcription
  misc_feature: MA Experiment 20000227 PARAMETER Experiment Name: At_Root-Tips-vs-Tops_P Parameter: Tissue Value: Root Tips vs. Root Tops
  misc_feature: MA Experiment ID: 20000234 Result: Up-regulated in Transcription
  misc_feature: MA Experiment 20000234 PARAMETER Experiment Name: At_Siliques_P Parameter: Age (day) Value: 21
  misc_feature: MA Experiment 20000234 PARAMETER Experiment Name: At_Siliques_P Parameter: Organism Value: A. thaliana
  misc_feature: MA Experiment 20000234 PARAMETER Experiment Name: At_Siliques_P Parameter: Plant Line Value: WS
  misc_feature: MA Experiment 20000234 PARAMETER Experiment Name: At_Siliques_P Parameter: Tissue Value: Less Than 5mm Siliques vs. Whole Plant
  misc_feature: MA Experiment ID: 20000235 Result: Up-regulated in Transcription
  misc_feature: MA Experiment 20000235 PARAMETER Experiment Name: At_Siliques_P Parameter: Age (day) Value: 21
  misc_feature: MA Experiment 20000235 PARAMETER Experiment Name: At_Siliques_P Parameter: Organism Value: A. thaliana
  misc_feature: MA Experiment 20000235 PARAMETER Experiment Name: At_Siliques_P Parameter: Plant Line Value: WS
  misc_feature: MA Experiment 20000235 PARAMETER Experiment Name: At_Siliques_P Parameter: Tissue Value: 5-10mm Siliques vs. Whole Plant
  misc_feature: MA Experiment ID: 20000438 Result: Up-regulated in Transcription
  misc_feature: MA Experiment 20000438 PARAMETER Experiment Name: At_Shoots__P Parameter: Age (day) Value: 14
  misc_feature: MA Experiment 20000438 PARAMETER Experiment Name: At_Shoots__P Parameter: Tissue Value: Shoots vs. Whole Plant
  misc_feature: MA Experiment ID: 20000495 Result: Down-regulated in Transcription
  misc_feature: MA Experiment 20000495 PARAMETER Experiment Name: At_Guard_Cells_P Parameter: Harvest Date Value: 8/2/2002
  misc_feature: MA Experiment 20000495 PARAMETER Experiment Name: At_Guard_Cells_P Parameter: Organism Value: A. thaliana
  misc_feature: MA Experiment 20000495 PARAMETER Experiment Name: At_Guard_Cells_P Parameter: Tissue Value: Guard Cells vs. Leaves
aggatttgctctagattgttgaatcgaagatgtcgacaagggaagagaatgtttacatggcgaaattagccgaacaagctgaacgttacgaagaaatggttgaattcatggagaaagttgcgaaaactgttgatgttgaggaactttcagttgaagagaggaatcttctctctgttgcttacaagaacgtgattggagcgagaagagcttcgtggagaatcatttcttcgattgagcagaaagaagagagcaaagggaacgaagatcatgttgctattatcaaggattacagaggaaagattgaatccgagcttagcaaaatctgtgatgggattttgaatgttcttgaagctcatcttattccttctgcttcaccagctgaatctaaagtgttttatcttaagatgaagggtgattatcataggtatcttgctgagtttaaggctggtgctgaaaggaaagaagctgctgaaagcactttggttgcttacaagtctgcttccgacattgccactgctgagttagctcctactcacccgataaggcttggtcttgcactcaacttctctgtgttttactatgaaatcctcaactcgcctgatcgtgcttgcagcctcgcaaagcaggcgtttgatgatgcaatcgctgagttagatacattgggtgaggaatcatacaaggacagtacactgattatgcagcttcttagagacaatctcactctctggacttcagatatgactgacgaagcaggagatgagattaaggaggcatcaaagcccgatggtgccgagtaaacccgaagaagaggaagagtcattttataatggtagaaaactttcatgtgataatctgagtgagggatagctcaggattcttataagagacacagttttattgttgtttgtttgttttgaaactacttgcgatttatcattcctcctttagcttcctcaatatttcctattctcctttctaatgaaatcaaaacttggttatttctg

SEQ ID NO: 98253 - protein, 255 aa, Arabidopsis thaliana; identical to SEQ ID NO: 27717
  peptide (1)..(255): Ceres Seq. ID no. 13592862
  misc_feature (4)..(241): Pfam Name: 14-3-3 protein Pfam Description: 14-3-3 protein
  misc_feature (1)..(255): Homolog of NCBI NO: 18421762 NR Description: 14-3-3 protein GF14 psi (grf3/RCI1) [Arabidopsis
  misc_feature (1)..(255): Homolog of NCBI NO: 1168200 NR Description: 14-3-3-like protein GF14 psi (General regulatory
  misc_feature (2)..(255): Homolog of NCBI NO: 8515888 NR Description: 14-3-3 protein [Populus x canescens]
  misc_feature (3)..(250): Homolog of NCBI NO: 2921512 NR Description: GF14 protein [Fritillaria agrestis]
  misc_feature (2)..(255): Homolog of NCBI NO: 18396217 NR Description: 14-3-3 protein GF14 nu (grf7) [Arabidopsis
  misc_feature (1)..(250): Homolog of NCBI NO: 18417863 NR Description: 14-3-3 protein GF14 upsilon (grf5) [Arabidopsis

SEQ ID NO: 98254 - protein, 246 aa, Arabidopsis thaliana; identical to SEQ ID NO: 27718
  peptide (1)..(246): Ceres Seq. ID no. 13592863
  misc_feature (1)..(232): Pfam Name: 14-3-3 protein Pfam Description: 14-3-3 protein
  misc_feature (1)..(246): Homolog of NCBI NO: 18421762 NR Description: 14-3-3 protein GF14 psi (grf3/RCI1) [Arabidopsis
  misc_feature (1)..(246): Homolog of NCBI NO: 1168200 NR Description: 14-3-3-like protein GF14 psi (General regulatory
  misc_feature (1)..(246): Homolog of NCBI NO: 8515888 NR Description: 14-3-3 protein [Populus x canescens]
  misc_feature (1)..(241): Homolog of NCBI NO: 2921512 NR Description: GF14 protein [Fritillaria agrestis]
  misc_feature (1)..(246): Homolog of NCBI NO: 18396217 NR Description: 14-3-3 protein GF14 nu (grf7) [Arabidopsis
  misc_feature (1)..(241): Homolog of NCBI NO: 18417863 NR Description: 14-3-3 protein GF14 upsilon (grf5) [Arabidopsis

SEQ ID NO: 98255 - protein, 233 aa, Arabidopsis thaliana; identical to SEQ ID NO: 27719
  peptide (1)..(233): Ceres Seq. ID no. 13592864
  misc_feature (1)..(219): Pfam Name: 14-3-3 protein Pfam Description: 14-3-3 protein
  misc_feature (1)..(233): Homolog of NCBI NO: 18421762 NR Description: 14-3-3 protein GF14 psi (grf3/RCI1) [Arabidopsis
  misc_feature (1)..(233): Homolog of NCBI NO: 1168200 NR Description: 14-3-3-like protein GF14 psi (General regulatory
  misc_feature (1)..(233): Homolog of NCBI NO: 8515888 NR Description: 14-3-3 protein [Populus x canescens]
  misc_feature (1)..(228): Homolog of NCBI NO: 2921512 NR Description: GF14 protein [Fritillaria agrestis]
  misc_feature (1)..(233): Homolog of NCBI NO: 18396217 NR Description: 14-3-3 protein GF14 nu (grf7) [Arabidopsis
  misc_feature (1)..(228): Homolog of NCBI NO: 18417863 NR Description: 14-3-3 protein GF14 upsilon (grf5) [Arabidopsis

SEQ ID NO: 98256 - DNA, 1137 bp, Arabidopsis thaliana
  misc_feature (1)..(1137): Ceres Seq. ID no. 13592902
  misc_feature: MA Experiment ID: 20000306 Result: Down-regulated in Transcription
  misc_feature: MA Experiment 20000306 PARAMETER Experiment Name: At_Germinating_Seeds_Sub_P Parameter: Age (hr) Value: 6 vs. 0
  misc_feature: MA Experiment 20000306 PARAMETER Experiment Name: At_Germinating_Seeds_Sub_P Parameter: Organism Value: A. thaliana
  misc_feature: MA Experiment 20000306 PARAMETER Experiment Name: At_Germinating_Seeds_Sub_P Parameter: Plant Line Value: WS
  misc_feature: MA Experiment 20000306 PARAMETER Experiment Name: At_Germinating_Seeds_Sub_P Parameter: Tissue Value: Germinating Seeds
  misc_feature: MA Experiment ID: 20000307 Result: Down-regulated in Transcription
  misc_feature: MA Experiment 20000307 PARAMETER Experiment Name: At_Germinating_Seeds_Sub_P Parameter: Age (hr) Value: 24 vs. 0
  misc_feature: MA Experiment 20000307 PARAMETER Experiment Name: At_Germinating_Seeds_Sub_P Parameter: Organism Value: A. thaliana
  misc_feature: MA Experiment 20000307 PARAMETER Experiment Name: At_Germinating_Seeds_Sub_P Parameter: Plant Line Value: WS
  misc_feature: MA Experiment 20000307 PARAMETER Experiment Name: At_Germinating_Seeds_Sub_P Parameter: Tissue Value: Germinating Seeds
  misc_feature: MA Experiment ID: 20000314 Result: Down-regulated in Transcription
  misc_feature: MA Experiment 20000314 PARAMETER Experiment Name: At_14day_Shoots-Roots_Sub_P Parameter: Age (day) Value: 14
  misc_feature: MA Experiment 20000314 PARAMETER Experiment Name: At_14day_Shoots-Roots_Sub_P Parameter: Organism Value: A. thaliana
  misc_feature: MA Experiment 20000314 PARAMETER Experiment Name: At_14day_Shoots-Roots_Sub_P Parameter: Plant Line Value: WS
  misc_feature: MA Experiment 20000314 PARAMETER Experiment Name: At_14day_Shoots-Roots_Sub_P Parameter: Tissue Value: Roots vs. Whole Plant
  misc_feature: MA Experiment ID: 20000315 Result: Down-regulated in Transcription
  misc_feature: MA Experiment 20000315 PARAMETER Experiment Name: At_14day_Shoots-Roots_Sub_P Parameter: Age (day) Value: 14
  misc_feature: MA Experiment 20000315 PARAMETER Experiment Name: At_14day_Shoots-Roots_Sub_P Parameter: Organism Value: A. thaliana
  misc_feature: MA Experiment 20000315 PARAMETER Experiment Name: At_14day_Shoots-Roots_Sub_P Parameter: Plant Line Value: WS
  misc_feature: MA Experiment 20000315 PARAMETER Experiment Name: At_14day_Shoots-Roots_Sub_P Parameter: Tissue Value: Shoots vs. Whole Plant
  misc_feature: MA Experiment ID: 20000327 Result: Down-regulated in Transcription
  misc_feature: MA Experiment 20000327 PARAMETER Experiment Name: At_42deg_Heat_Sub_P Parameter: Age (day) Value: 14
  misc_feature: MA Experiment 20000327 PARAMETER Experiment Name: At_42deg_Heat_Sub_P Parameter: Organism Value: A. thaliana
  misc_feature: MA Experiment 20000327 PARAMETER Experiment Name: At_42deg_Heat_Sub_P Parameter: Plant Line Value: WS
  misc_feature: MA Experiment 20000327 PARAMETER Experiment Name: At_42deg_Heat_Sub_P Parameter: Temperature (deg C) Value: 42 vs. 22
  misc_feature: MA Experiment 20000327 PARAMETER Experiment Name: At_42deg_Heat_Sub_P Parameter: Timepoint (hr) Value: 1
  misc_feature: MA Experiment 20000327 PARAMETER Experiment Name: At_42deg_Heat_Sub_P Parameter: Tissue Value: Aerial
  misc_feature: MA Experiment ID: 20000328 Result: Down-regulated in Transcription
  misc_feature: MA Experiment 20000328 PARAMETER Experiment Name: At_42deg_Heat_Sub_P Parameter: Age (day) Value: 14
  misc_feature: MA Experiment 20000328 PARAMETER Experiment Name: At_42deg_Heat_Sub_P Parameter: Organism Value: A. thaliana
  misc_feature: MA Experiment 20000328 PARAMETER Experiment Name: At_42deg_Heat_Sub_P Parameter: Plant Line Value: WS
  misc_feature: MA Experiment 20000328 PARAMETER Experiment Name: At_42deg_Heat_Sub_P Parameter: Temperature (deg C) Value: 42 vs. 22
  misc_feature: MA Experiment 20000328 PARAMETER Experiment Name: At_42deg_Heat_Sub_P Parameter: Timepoint (hr) Value: 6
  misc_feature: MA Experiment 20000328 PARAMETER Experiment Name: At_42deg_Heat_Sub_P Parameter: Tissue Value: Aerial
  misc_feature: MA Experiment ID: 20000329 Result: Up-regulated in Transcription
  misc_feature: MA Experiment 20000329 PARAMETER Experiment Name: At_4deg_Cold_Sub_P Parameter: Age (day) Value: 14
  misc_feature: MA Experiment 20000329 PARAMETER Experiment Name: At_4deg_Cold_Sub_P Parameter: Organism Value: A. thaliana
  misc_feature: MA Experiment 20000329 PARAMETER Experiment Name: At_4deg_Cold_Sub_P Parameter: Plant Line Value: WS
  misc_feature: MA Experiment 20000329 PARAMETER Experiment Name: At_4deg_Cold_Sub_P Parameter: Temperature (deg C) Value: 4 vs. 22
  misc_feature: MA Experiment 20000329 PARAMETER Experiment Name: At_4deg_Cold_Sub_P Parameter: Timepoint (hr) Value: 6
  misc_feature: MA Experiment 20000329 PARAMETER Experiment Name: At_4deg_Cold_Sub_P Parameter: Tissue Value: Aerial
  misc_feature: MA Experiment ID: 20000355 Result: Down-regulated in Transcription
  misc_feature: MA Experiment 20000355 PARAMETER Experiment Name: At_Siliques_Sub_P Parameter: Age (day) Value: 21
  misc_feature: MA Experiment 20000355 PARAMETER Experiment Name: At_Siliques_Sub_P Parameter: Organism Value: A. thaliana
  misc_feature: MA Experiment 20000355 PARAMETER Experiment Name: At_Siliques_Sub_P Parameter: Plant Line Value: WS
  misc_feature: MA Experiment 20000355 PARAMETER Experiment Name: At_Siliques_Sub_P Parameter: Tissue Value: Less Than 5mm Siliques vs. Whole Plant
  misc_feature: MA Experiment ID: 20000440 Result: Down-regulated in Transcription
  misc_feature: MA Experiment 20000440 PARAMETER Experiment Name: At_Closed-Flower__Sub_P Parameter: Tissue Value: Closed Flower vs. Whole Plant
atagaccaatacagagatacaaagcaatagaacaacaagaacaagaaaacagagaaaaaaacaatggctgccttgtcggataagttagcggatgcttaccagaacgcaaggccgagatatccgatcgattggttcacgaaacttgctgctcgaaccggtcagcacaaatcagcttgggatgttggtactggcaacggtcaagcagctattggtcttgcagagtatttcgagaaagttacagcaaccgacataaacgaagcacagttaaaacgagcggtaaaacacgaaagaatcagttaccatcacactcccacaacaatgtccgaagaccaaatggttgctctagtcggcggagataactccgttgatctaatcgtggcagcacaagccgttcactacttcgatctcgcaccattctacaacgtagcaaaacgtgttcttcgcaaagaaggaggattaatcgcagtttttgtctacaacgacataatcatctctcctgaagttgattccatcatgaaacgtcttgtggactccacgttcccgtttagaactcctgtaatgaatcttgctttcgacggttataaaacgttgccgtttccgtttgaaagtatagggatgggatcagaagggaagcctataatgcttgacattcctcataagctatcgcttaaagggtttatcggtttcttgagatcgtggcagcccgcaatgaaagctaaagaacgtggagttgagcttgtgactgaagatttgatctccaaatttgaagatgcttggggtgatgatgatgatgttaaagatattttctacaaagctcatatgattgttggaaaactttcggcttcagatatagagcggcatcgaaagagatttgatacgaactgcgtagttacaacactaaaggatcataacaactcggctgttattgcttcagtgactgctgctgcatttgctggagtggcggcttactgtgcttactctgcaaggaagaacagttagatcctttgaaggacaaagaaacggttttctgaatctagtgaatgaaatcttttttattttacatgttgacatgttgtcatgtatttatttatgtcattgatatgagatggttaagtaatatctaaagatttaagagtc

SEQ ID NO: 98257 - protein, 311 aa, Arabidopsis thaliana
  peptide (1)..(311): Ceres Seq. ID no. 13592903
  misc_feature (1)..(311): Homolog of NCBI NO: 18405387 NR Description: expressed protein [Arabidopsis thaliana]
  misc_feature (1)..(264): Homolog of NCBI NO: 15232436 NR Description: embryonic abundant protein -related [Arabidopsis
  misc_feature (1)..(264): Homolog of NCBI NO: 21594033 NR Description: embryonic abundant protein-like [Arabidopsis
  misc_feature (1)..(258): Homolog of NCBI NO: 15233061 NR Description: expressed protein [Arabidopsis thaliana]
  misc_feature (1)..(258): Homolog of NCBI NO: 15238280 NR Description: embryonic abundant protein -related [Arabidopsis
  misc_feature (1)..(256): Homolog of NCBI NO: 15235684 NR Description: expressed protein [Arabidopsis thaliana]
  misc_feature (25)..(256): Homolog of NCBI NO: 20258825 NR Description: unknown protein [Arabidopsis thaliana]
  misc_feature (1)..(161): Homolog of NCBI NO: 34912212 NR Description: P0415C01.8 [Oryza sativa (japonica
  misc_feature (171)..(262): Homolog of NCBI NO: 34912212 NR Description: P0415C01.8 [Oryza sativa (japonica
  misc_feature (1)..(257): Homolog of NCBI NO: 34910604 NR Description: putative embryonic abundant protein-like [Oryza
MAALSDKLADAYQNARPRYPIDWFTKLAARTGQHKSAWDVGTGNGQAAIGLAEYFEKVTATDINEAQLKRAVKHERISYHHTPTTMSEDQMVALVGGDNSVDLIVAAQAVHYFDLAPFYNVAKRVLRKEGGLIAVFVYNDIIISPEVDSIMKRLVDSTFPFRTPVMNLAFDGYKTLPFPFESIGMGSEGKPIMLDIPHKLSLKGFIGFLRSWQPAMKAKERGVELVTEDLISKFEDAWGDDDDVKDIFYKAHMIVGKLSASDIERHRKRFDTNCVVTTLKDHNNSAVIASVTAAAFAGVAAYCAYSARKNS

SEQ ID NO: 98258 - protein, 226 aa, Arabidopsis thaliana; identical to SEQ ID NO: 37193
  peptide (1)..(226): Ceres Seq. ID no. 13592904
  misc_feature (1)..(226): Homolog of NCBI NO: 18405387 NR Description: expressed protein [Arabidopsis thaliana]
  misc_feature (1)..(179): Homolog of NCBI NO: 15232436 NR Description: embryonic abundant protein -related [Arabidopsis
  misc_feature (1)..(179): Homolog of NCBI NO: 21594033 NR Description: embryonic abundant protein-like [Arabidopsis
  misc_feature (1)..(173): Homolog of NCBI NO: 15233061 NR Description: expressed protein [Arabidopsis thaliana]
  misc_feature (1)..(173): Homolog of NCBI NO: 15238280 NR Description: embryonic abundant protein -related [Arabidopsis
  misc_feature (1)..(171): Homolog of NCBI NO: 15235684 NR Description: expressed protein [Arabidopsis thaliana]
  misc_feature (1)..(171): Homolog of NCBI NO: 20258825 NR Description: unknown protein [Arabidopsis thaliana]
  misc_feature (1)..(76): Homolog of NCBI NO: 34912212 NR Description: P0415C01.8 [Oryza sativa (japonica
  misc_feature (86)..(177): Homolog of NCBI NO: 34912212 NR Description: P0415C01.8 [Oryza sativa (japonica
  misc_feature (1)..(172): Homolog of NCBI NO: 34910604 NR Description: putative embryonic abundant protein-like [Oryza

SEQ ID NO: 98259 - protein, 221 aa, Arabidopsis thaliana; identical to SEQ ID NO: 37194
  peptide (1)..(221): Ceres Seq. ID no. 13592905
  misc_feature (1)..(221): Homolog of NCBI NO: 18405387 NR Description: expressed protein [Arabidopsis thaliana]
  misc_feature (1)..(174): Homolog of NCBI NO: 15232436 NR Description: embryonic abundant protein -related [Arabidopsis
  misc_feature (1)..(174): Homolog of NCBI NO: 21594033 NR Description: embryonic abundant protein-like [Arabidopsis
  misc_feature (1)..(168): Homolog of NCBI NO: 15233061 NR Description: expressed protein [Arabidopsis thaliana]
  misc_feature (1)..(168): Homolog of NCBI NO: 15238280 NR Description: embryonic abundant protein -related [Arabidopsis
  misc_feature (1)..(166): Homolog of NCBI NO: 15235684 NR Description: expressed protein [Arabidopsis thaliana]
  misc_feature (1)..(166): Homolog of NCBI NO: 20258825 NR Description: unknown protein [Arabidopsis thaliana]
  misc_feature (1)..(71): Homolog of NCBI NO: 34912212 NR Description: P0415C01.8 [Oryza sativa (japonica
  misc_feature (81)..(172): Homolog of NCBI NO: 34912212 NR Description: P0415C01.8 [Oryza sativa (japonica
  misc_feature (1)..(167): Homolog of NCBI NO: 34910604 NR Description: putative embryonic abundant protein-like [Oryza

SEQ ID NO: 98260 - DNA, 861 bp, Arabidopsis thaliana
  misc_feature (1)..(861): Ceres Seq. ID no. 13592969
  misc_feature: MA Experiment ID: 20000184 Result: Up-regulated in Transcription
  misc_feature: MA Experiment 20000184 PARAMETER Experiment Name: At_Shoots__P Parameter: Age (day) Value: 7
  misc_feature: MA Experiment 20000184 PARAMETER Experiment Name: At_Shoots__P Parameter: Tissue Value: Shoots vs. Whole Plant
  misc_feature: MA Experiment ID: 20000267 Result: Up-regulated in Transcription
  misc_feature: MA Experiment 20000267 PARAMETER Experiment Name: At_Drought_P Parameter: Age (day) Value: 7
  misc_feature: MA Experiment 20000267 PARAMETER Experiment Name: At_Drought_P Parameter: Organism Value: A. thaliana
  misc_feature: MA Experiment 20000267 PARAMETER Experiment Name: At_Drought_P Parameter: Plant Line Value: WS
  misc_feature: MA Experiment 20000267 PARAMETER Experiment Name: At_Drought_P Parameter: Timepoint (hr) Value: 6
  misc_feature: MA Experiment 20000267 PARAMETER Experiment Name: At_Drought_P Parameter: Tissue Value: Whole Plant
  misc_feature: MA Experiment 20000267 PARAMETER Experiment Name: At_Drought_P Parameter: Treatment Value: Drought vs. No Drought
  misc_feature: MA Experiment ID: 20000436 Result: Up-regulated in Transcription
  misc_feature: MA Experiment 20000436 PARAMETER Experiment Name: At_Drought_P Parameter: Age (day) Value: 7
  misc_feature: MA Experiment 20000436 PARAMETER Experiment Name: At_Drought_P Parameter: Organism Value: A. thaliana
  misc_feature: MA Experiment 20000436 PARAMETER Experiment Name: At_Drought_P Parameter: Plant Line Value: WS
  misc_feature: MA Experiment 20000436 PARAMETER Experiment Name: At_Drought_P Parameter: Timepoint (hr) Value: 12
  misc_feature: MA Experiment 20000436 PARAMETER Experiment Name: At_Drought_P Parameter: Tissue Value: Whole Plant
  misc_feature: MA Experiment 20000436 PARAMETER Experiment Name: At_Drought_P Parameter: Treatment Value: Drought vs. No Drought
  misc_feature: MA Experiment ID: 20000437 Result: Up-regulated in Transcription
  misc_feature: MA Experiment 20000437 PARAMETER Experiment Name: At_Drought_P Parameter: Age (day) Value: 8
  misc_feature: MA Experiment 20000437 PARAMETER Experiment Name: At_Drought_P Parameter: Organism Value: A. thaliana
  misc_feature: MA Experiment 20000437 PARAMETER Experiment Name: At_Drought_P Parameter: Plant Line Value: WS
  misc_feature: MA Experiment 20000437 PARAMETER Experiment Name: At_Drought_P Parameter: Timepoint (hr) Value: 24
  misc_feature: MA Experiment 20000437 PARAMETER Experiment Name: At_Drought_P Parameter: Tissue Value: Whole Plant
  misc_feature: MA Experiment 20000437 PARAMETER Experiment Name: At_Drought_P Parameter: Treatment Value: Drought vs. No Drought
  misc_feature: MA Experiment ID: 20000438 Result: Up-regulated in Transcription
  misc_feature: MA Experiment 20000438 PARAMETER Experiment Name: At_Shoots__P Parameter: Age (day) Value: 14
  misc_feature: MA Experiment 20000438 PARAMETER Experiment Name: At_Shoots__P Parameter: Tissue Value: Shoots vs. Whole Plant
  misc_feature: MA Experiment ID: 20000573 Result: Down-regulated in Transcription
  misc_feature: MA Experiment 20000573 PARAMETER Experiment Name: At_100uM_ABA_Mutants__P Parameter: Organism Value: A. thaliana
  misc_feature: MA Experiment 20000573 PARAMETER Experiment Name: At_100uM_ABA_Mutants__P Parameter: Plant Line Value: CS22 vs. Ler wt
  misc_feature: MA Experiment 20000573 PARAMETER Experiment Name: At_100uM_ABA_Mutants__P Parameter: Timepoint (hr) Value: N/A
  misc_feature: MA Experiment 20000573 PARAMETER Experiment Name: At_100uM_ABA_Mutants__P Parameter: Tissue Value: Whole Plant
  misc_feature: MA Experiment 20000573 PARAMETER Experiment Name: At_100uM_ABA_Mutants__P Parameter: Treatment Value: None
  misc_feature: MA Experiment ID: 20001248 Result: Down-regulated in Transcription
  misc_feature: MA Experiment 20001248 PARAMETER Experiment Name: At_Far-red-induction_P Parameter: Age (day) Value: 7
  misc_feature: MA Experiment 20001248 PARAMETER Experiment Name: At_Far-red-induction_P Parameter: Light Value: Far-red vs. White
  misc_feature: MA Experiment 20001248 PARAMETER Experiment Name: At_Far-red-induction_P Parameter: Organism Value: A. thaliana
  misc_feature: MA Experiment 20001248 PARAMETER Experiment Name: At_Far-red-induction_P Parameter: Plant Line Value: Columbia
  misc_feature: MA Experiment 20001248 PARAMETER Experiment Name: At_Far-red-induction_P Parameter: Timepoint (hr) Value: 4
  misc_feature: MA Experiment 20001248 PARAMETER Experiment Name: At_Far-red-induction_P Parameter: Tissue Value: Whole Plant
  misc_feature: MA Experiment ID: 20001450 Result: Down-regulated in Transcription
  misc_feature: MA Experiment 20001450 PARAMETER Experiment Name: At_Far-red-induction_P Parameter: Age (day) Value: 7
  misc_feature: MA Experiment 20001450 PARAMETER Experiment Name: At_Far-red-induction_P Parameter: Light Value: Far-red vs. White
  misc_feature: MA Experiment 20001450 PARAMETER Experiment Name: At_Far-red-induction_P Parameter: Organism Value: A. thaliana
  misc_feature: MA Experiment 20001450 PARAMETER Experiment Name: At_Far-red-induction_P Parameter: Plant Line Value: Columbia
  misc_feature: MA Experiment 20001450 PARAMETER Experiment Name: At_Far-red-induction_P Parameter: Timepoint (hr) Value: 8
  misc_feature: MA Experiment 20001450 PARAMETER Experiment Name: At_Far-red-induction_P Parameter: Tissue Value: Whole Plant
  misc_feature: MA Experiment ID: 20001451 Result: Down-regulated in Transcription
  misc_feature: MA Experiment 20001451 PARAMETER Experiment Name: At_Far-red-induction_P Parameter: Age (day) Value: 7
  misc_feature: MA Experiment 20001451 PARAMETER Experiment Name: At_Far-red-induction_P Parameter: Light Value: Far-red vs. White
  misc_feature: MA Experiment 20001451 PARAMETER Experiment Name: At_Far-red-induction_P Parameter: Organism Value: A. thaliana
  misc_feature: MA Experiment 20001451 PARAMETER Experiment Name: At_Far-red-induction_P Parameter: Plant Line Value: Columbia
  misc_feature: MA Experiment 20001451 PARAMETER Experiment Name: At_Far-red-induction_P Parameter: Timepoint (hr) Value: 24
  misc_feature: MA Experiment 20001451 PARAMETER Experiment Name: At_Far-red-induction_P Parameter: Tissue Value: Whole Plant
  misc_feature: MA Experiment ID: 20001554 Result: Up-regulated in Transcription
  misc_feature: MA Experiment 20001554 PARAMETER Experiment Name: At_Drought_Soil_Dry_P Parameter: Age (day) Value: 21
  misc_feature: MA Experiment 20001554 PARAMETER Experiment Name: At_Drought_Soil_Dry_P Parameter: Organism Value: A. thaliana
  misc_feature: MA Experiment 20001554 PARAMETER Experiment Name: At_Drought_Soil_Dry_P Parameter: Plant Line Value: WS
  misc_feature: MA Experiment 20001554 PARAMETER Experiment Name: At_Drought_Soil_Dry_P Parameter: Post Timepoint (hr) Value: None
  misc_feature: MA Experiment 20001554 PARAMETER Experiment Name: At_Drought_Soil_Dry_P Parameter: Post-Treatment Value: None
  misc_feature: MA Experiment 20001554 PARAMETER Experiment Name: At_Drought_Soil_Dry_P Parameter: Timepoint (day) Value: 7
  misc_feature: MA Experiment 20001554 PARAMETER Experiment Name: At_Drought_Soil_Dry_P Parameter: Treatment Value: Drought vs. No Drought
  misc_feature: MA Experiment ID: 20001556 Result: Up-regulated in Transcription
  misc_feature: MA Experiment 20001556 PARAMETER Experiment Name: At_Drought_Soil_Dry_P Parameter: Age (day) Value: 26
  misc_feature: MA Experiment 20001556 PARAMETER Experiment Name: At_Drought_Soil_Dry_P Parameter: Organism Value: A. thaliana
  misc_feature: MA Experiment 20001556 PARAMETER Experiment Name: At_Drought_Soil_Dry_P Parameter: Plant Line Value: WS
  misc_feature: MA Experiment 20001556 PARAMETER Experiment Name: At_Drought_Soil_Dry_P Parameter: Post Timepoint (hr) Value: None
  misc_feature: MA Experiment 20001556 PARAMETER Experiment Name: At_Drought_Soil_Dry_P Parameter: Post-Treatment Value: None
  misc_feature: MA Experiment 20001556 PARAMETER Experiment Name: At_Drought_Soil_Dry_P Parameter: Timepoint (day) Value: 12
  misc_feature: MA Experiment 20001556 PARAMETER Experiment Name: At_Drought_Soil_Dry_P Parameter: Treatment Value: Drought vs. No Drought
agagacaaaaatggagtgtgtagaagcatttctcggtgatttttccgtcgacgatcttctcgacctctctaacgccgacacttctttagagtcgtcttcgtcacaaagaaaagaagacgaacaagaacgtgagaaatttaagagcttttctgaccaaagtacccgtctttcaccgccagaggatctcttatcttttcccggcgacgctccggttggtgatttggaggacttagagtggttatccaacttcgtggaggattctttctcagaatcgtatatttcgagtgatttcccggtgaatccagtcgcgtcggtggaggttcggagacagtgcgttcctgttaaacctagaagcaaacgccgccgcaccaacggccgtatctggtctatggagtctccatctcctctgctatccaccgctgttgccagaaggaagaagagagggagacagaaggtggatgcatcgtacggtggcgtagtccagcagcagcagctgaggcggtgctgcagccattgtggagtccagaagacgcctcaatggagaatgggtccattaggtgcgaagacactgtgtaatgcttgtggggtccggtttaagtcgggtcgacttttacccgaatatagacccgcttgtagcccaacattcaccaacgagattcactctaactctcaccggaaagtgttggagctacggctcatgaaagtggcggatccggctcgggtttaagccatttttttctatcttgaaattttatcaatgccatgtgcattgtgtaatcttgtaaacagagaatcagagagagatccgtagactgttttcacattcatgaagttaagctataattagagacaattttattt

SEQ ID NO: 98261 - protein, 241 aa, Arabidopsis thaliana
  peptide (1)..(241): Ceres Seq. ID no. 13592970
  misc_feature (4)..(241): Homolog of NCBI NO: 15234336 NR Description: GATA zinc finger protein [Arabidopsis thaliana]
  misc_feature (13)..(134): Homolog of NCBI NO: 15239343 NR Description: GATA zinc finger protein [Arabidopsis thaliana]
  misc_feature (145)..(234): Homolog of NCBI NO: 15239343 NR Description: GATA zinc finger protein [Arabidopsis thaliana]
  misc_feature (13)..(90): Homolog of NCBI NO: 37572449 NR Description: AG-motif binding protein-4 [Nicotiana tabacum]
  misc_feature (167)..(234): Homolog of NCBI NO: 37572449 NR Description: AG-motif binding protein-4 [Nicotiana tabacum]
  misc_feature (14)..(122): Homolog of NCBI NO: 38344977 NR Description: OSJNBa0011L07.7 [Oryza sativa (japonica
  misc_feature (171)..(234): Homolog of NCBI NO: 38344977 NR Description: OSJNBa0011L07.7 [Oryza sativa (japonica
  misc_feature (16)..(234): Homolog of NCBI NO: 15232355 NR Description: GATA zinc finger protein [Arabidopsis thaliana]
  misc_feature (16)..(234): Homolog of NCBI NO: 15225399 NR Description: GATA zinc finger protein [Arabidopsis thaliana]
  misc_feature (112)..(234): Homolog of NCBI NO: 15233971 NR Description: GATA zinc finger protein [Arabidopsis thaliana]
ETKMECVEAFLGDFSVDDLLDLSNADTSLESSSSQRKEDEQEREKFKSFSDQSTRLSPPEDLLSFPGDAPVGDLEDLEWLSNFVEDSFSESYISSDFPVNPVASVEVRRQCVPVKPRSKRRRTNGRIWSMESPSPLLSTAVARRKKRGRQKVDASYGGVVQQQQLRRCCSHCGVQKTPQWRMGPLGAKTLCNACGVRFKSGRLLPEYRPACSPTFTNEIHSNSHRKVLELRLMKVADPARV

SEQ ID NO: 98262 - protein, 238 aa, Arabidopsis thaliana
  peptide (1)..(238): Ceres Seq. ID no. 13592971
  misc_feature (1)..(238): Homolog of NCBI NO: 15234336 NR Description: GATA zinc finger protein [Arabidopsis thaliana]
  misc_feature (10)..(131): Homolog of NCBI NO: 15239343 NR Description: GATA zinc finger protein [Arabidopsis thaliana]
  misc_feature (142)..(231): Homolog of NCBI NO: 15239343 NR Description: GATA zinc finger protein [Arabidopsis thaliana]
  misc_feature (10)..(87): Homolog of NCBI NO: 37572449 NR Description: AG-motif binding protein-4 [Nicotiana tabacum]
  misc_feature (164)..(231): Homolog of NCBI NO: 37572449 NR Description: AG-motif binding protein-4 [Nicotiana tabacum]
  misc_feature (11)..(119): Homolog of NCBI NO: 38344977 NR Description: OSJNBa0011L07.7 [Oryza sativa (japonica
  misc_feature (168)..(231): Homolog of NCBI NO: 38344977 NR Description: OSJNBa0011L07.7 [Oryza sativa (japonica
  misc_feature (13)..(231): Homolog of NCBI NO: 15232355 NR Description: GATA zinc finger protein [Arabidopsis thaliana]
  misc_feature (13)..(231): Homolog of NCBI NO: 15225399 NR Description: GATA zinc finger protein [Arabidopsis thaliana]
  misc_feature (109)..(231): Homolog of NCBI NO: 15233971 NR Description: GATA zinc finger protein [Arabidopsis thaliana]
MECVEAFLGDFSVDDLLDLSNADTSLESSSSQRKEDEQEREKFKSFSDQSTRLSPPEDLLSFPGDAPVGDLEDLEWLSNFVEDSFSESYISSDFPVNPVASVEVRRQCVPVKPRSKRRRTNGRIWSMESPSPLLSTAVARRKKRGRQKVDASYGGVVQQQQLRRCCSHCGVQKTPQWRMGPLGAKTLCNACGVRFKSGRLLPEYRPACSPTFTNEIHSNSHRKVLELRLMKVADPARV

SEQ ID NO: 98263 - DNA, 1146 bp, Arabidopsis thaliana
  misc_feature (1)..(1146): Ceres Seq. ID no. 13592985
  misc_feature: MA Experiment ID: 20000180 Result: Down-regulated in Transcription
  misc_feature: MA Experiment 20000180 PARAMETER Experiment Name: At_Germinating_Seeds_P Parameter: Age (hr) Value: 24 vs. 0
  misc_feature: MA Experiment 20000180 PARAMETER Experiment Name: At_Germinating_Seeds_P Parameter: Tissue Value: Germinating Seeds
  misc_feature: MA Experiment ID: 20000227 Result: Up-regulated in Transcription
  misc_feature: MA Experiment 20000227 PARAMETER Experiment Name: At_Root-Tips-vs-Tops_P Parameter: Tissue Value: Root Tips vs. Root Tops
  misc_feature: MA Experiment ID: 20000264 Result: Up-regulated in Transcription
  misc_feature: MA Experiment 20000264 PARAMETER Experiment Name: At_Open_Flower_P Parameter: Age (day) Value: 21
  misc_feature: MA Experiment 20000264 PARAMETER Experiment Name: At_Open_Flower_P Parameter: Plant Line Value: WS
  misc_feature: MA Experiment 20000264 PARAMETER Experiment Name: At_Open_Flower_P Parameter: Tissue Value: Open Flower vs. Whole Plant
  misc_feature: MA Experiment ID: 20000265 Result: Up-regulated in Transcription
  misc_feature: MA Experiment 20000265 PARAMETER Experiment Name: At_Open_Flower_P Parameter: Age (day) Value: 21
  misc_feature: MA Experiment 20000265 PARAMETER Experiment Name: At_Open_Flower_P Parameter: Plant Line Value: WS
  misc_feature: MA Experiment 20000265 PARAMETER Experiment Name: At_Open_Flower_P Parameter: Tissue Value: Closed Flower vs. Whole Plant
  misc_feature: MA Experiment ID: 20000436 Result: Down-regulated in Transcription
  misc_feature: MA Experiment 20000436 PARAMETER Experiment Name: At_Drought_P Parameter: Age (day) Value: 7
  misc_feature: MA Experiment 20000436 PARAMETER Experiment Name: At_Drought_P Parameter: Organism Value: A. thaliana
  misc_feature: MA Experiment 20000436 PARAMETER Experiment Name: At_Drought_P Parameter: Plant Line Value: WS
  misc_feature: MA Experiment 20000436 PARAMETER Experiment Name: At_Drought_P Parameter: Timepoint (hr) Value: 12
  misc_feature: MA Experiment 20000436 PARAMETER Experiment Name: At_Drought_P Parameter: Tissue Value: Whole Plant
  misc_feature: MA Experiment 20000436 PARAMETER Experiment Name: At_Drought_P Parameter: Treatment Value: Drought vs. No Drought
  misc_feature: MA Experiment ID: 20000441 Result: Down-regulated in Transcription
  misc_feature: MA Experiment 20000441 PARAMETER Experiment Name: At_1uM_BR-BRZ__P Parameter: Tissue Value: Shoot Apices
  misc_feature: MA Experiment 20000441 PARAMETER Experiment Name: At_1uM_BR-BRZ__P Parameter: Treatment Value: 1uM BR vs. No Treatment
  misc_feature: MA Experiment ID: 20000456 Result: Up-regulated in Transcription
  misc_feature: MA Experiment 20000456 PARAMETER Experiment Name: At_100uM_BA_P Parameter: Age (day) Value: 14
  misc_feature: MA Experiment 20000456 PARAMETER Experiment Name: At_100uM_BA_P Parameter: Organism Value: A. thaliana
  misc_feature: MA Experiment 20000456 PARAMETER Experiment Name: At_100uM_BA_P Parameter: Plant Line Value: WS
  misc_feature: MA Experiment 20000456 PARAMETER Experiment Name: At_100uM_BA_P Parameter: Timepoint (hr) Value: 6
  misc_feature: MA Experiment 20000456 PARAMETER Experiment Name: At_100uM_BA_P Parameter: Tissue Value: Aerial
  misc_feature: MA Experiment 20000456 PARAMETER Experiment Name: At_100uM_BA_P Parameter: Treatment Value: 100uM BA vs. No Treatment
  misc_feature: MA Experiment ID: 20001247 Result: Down-regulated in Transcription
  misc_feature: MA Experiment 20001247 PARAMETER Experiment Name: At_Far-red-induction_P Parameter: Age (day) Value: 7
  misc_feature: MA Experiment 20001247 PARAMETER Experiment Name: At_Far-red-induction_P Parameter: Light Value: Far-red vs. White
  misc_feature: MA Experiment 20001247 PARAMETER Experiment Name: At_Far-red-induction_P Parameter: Organism Value: A. thaliana
  misc_feature: MA Experiment 20001247 PARAMETER Experiment Name: At_Far-red-induction_P Parameter: Plant Line Value: Columbia
  misc_feature: MA Experiment 20001247 PARAMETER Experiment Name: At_Far-red-induction_P Parameter: Timepoint (hr) Value: 1
  misc_feature: MA Experiment 20001247 PARAMETER Experiment Name: At_Far-red-induction_P Parameter: Tissue Value: Whole Plant
  misc_feature: MA Experiment ID: 20001450 Result: Down-regulated in Transcription
  misc_feature: MA Experiment 20001450 PARAMETER Experiment Name: At_Far-red-induction_P Parameter: Age (day) Value: 7
  misc_feature: MA Experiment 20001450 PARAMETER Experiment Name: At_Far-red-induction_P Parameter: Light Value: Far-red vs. White
  misc_feature: MA Experiment 20001450 PARAMETER Experiment Name: At_Far-red-induction_P Parameter: Organism Value: A. thaliana
  misc_feature: MA Experiment 20001450 PARAMETER Experiment Name: At_Far-red-induction_P Parameter: Plant Line Value: Columbia
  misc_feature: MA Experiment 20001450 PARAMETER Experiment Name: At_Far-red-induction_P Parameter: Timepoint (hr) Value: 8
  misc_feature: MA Experiment 20001450 PARAMETER Experiment Name: At_Far-red-induction_P Parameter: Tissue Value: Whole Plant
  misc_feature: MA Experiment ID: 20001451 Result: Down-regulated in Transcription
  misc_feature: MA Experiment 20001451 PARAMETER Experiment Name: At_Far-red-induction_P Parameter: Age (day) Value: 7
  misc_feature: MA Experiment 20001451 PARAMETER Experiment Name: At_Far-red-induction_P Parameter: Light Value: Far-red vs. White
  misc_feature: MA Experiment 20001451 PARAMETER Experiment Name: At_Far-red-induction_P Parameter: Organism Value: A. thaliana
  misc_feature: MA Experiment 20001451 PARAMETER Experiment Name: At_Far-red-induction_P Parameter: Plant Line Value: Columbia
  misc_feature: MA Experiment 20001451 PARAMETER Experiment Name: At_Far-red-induction_P Parameter: Timepoint (hr) Value: 24
  misc_feature: MA Experiment 20001451 PARAMETER Experiment Name: At_Far-red-induction_P Parameter: Tissue Value: Whole Plant
  misc_feature: MA Experiment ID: 20001458 Result: Up-regulated in Transcription
  misc_feature: MA Experiment 20001458 PARAMETER Experiment Name: At_50mM_NH4NO3_L-to-H_P Parameter: Age (day) Value: Undefined
  misc_feature: MA Experiment 20001458 PARAMETER Experiment Name: At_50mM_NH4NO3_L-to-H_P Parameter: Organism Value: Undefined
  misc_feature: MA Experiment 20001458 PARAMETER Experiment Name: At_50mM_NH4NO3_L-to-H_P Parameter: Plant Line Value: Undefined
  misc_feature: MA Experiment 20001458 PARAMETER Experiment Name: At_50mM_NH4NO3_L-to-H_P Parameter: Timepoint (hr) Value: 2
  misc_feature: MA Experiment 20001458 PARAMETER Experiment Name: At_50mM_NH4NO3_L-to-H_P Parameter: Tissue Value: Siliques
  misc_feature: MA Experiment 20001458 PARAMETER Experiment Name: At_50mM_NH4NO3_L-to-H_P Parameter: Treatment Value: 50mM NH4NO3 vs. 100mM Manitol
  misc_feature: MA Experiment ID: 20001556 Result: Up-regulated in Transcription
  misc_feature: MA Experiment 20001556 PARAMETER Experiment Name: At_Drought_Soil_Dry_P Parameter: Age (day) Value: 26
  misc_feature: MA Experiment 20001556 PARAMETER Experiment Name: At_Drought_Soil_Dry_P Parameter: Organism Value: A. thaliana
  misc_feature: MA Experiment 20001556 PARAMETER Experiment Name: At_Drought_Soil_Dry_P Parameter: Plant Line Value: WS
  misc_feature: MA Experiment 20001556 PARAMETER Experiment Name: At_Drought_Soil_Dry_P Parameter: Post Timepoint (hr) Value: None
  misc_feature: MA Experiment 20001556 PARAMETER Experiment Name: At_Drought_Soil_Dry_P Parameter: Post-Treatment Value: None
  misc_feature: MA Experiment 20001556 PARAMETER Experiment Name: At_Drought_Soil_Dry_P Parameter: Timepoint (day) Value: 12
  misc_feature: MA Experiment 20001556 PARAMETER Experiment Name: At_Drought_Soil_Dry_P Parameter: Treatment Value: Drought vs. No Drought
  misc_feature: MA Experiment ID: 20001557 Result: Up-regulated in Transcription
  misc_feature: MA Experiment 20001557 PARAMETER Experiment Name: At_Drought_Soil_Dry_P Parameter: Age (day) Value: 27
  misc_feature: MA Experiment 20001557 PARAMETER Experiment Name: At_Drought_Soil_Dry_P Parameter: Organism Value: A. thaliana
  misc_feature: MA Experiment 20001557 PARAMETER Experiment Name: At_Drought_Soil_Dry_P Parameter: Plant Line Value: WS
  misc_feature: MA Experiment 20001557 PARAMETER Experiment Name: At_Drought_Soil_Dry_P Parameter: Post Timepoint (hr) Value: 3
  misc_feature: MA Experiment 20001557 PARAMETER Experiment Name: At_Drought_Soil_Dry_P Parameter: Post-Treatment Value: Re-Water vs. No Drought
  misc_feature: MA Experiment 20001557 PARAMETER Experiment Name: At_Drought_Soil_Dry_P Parameter: Timepoint (day) Value: 13
  misc_feature: MA Experiment 20001557 PARAMETER Experiment Name: At_Drought_Soil_Dry_P Parameter: Treatment Value: Drought vs. No Drought
  misc_feature: MA Experiment ID: 20001558 Result: Up-regulated in Transcription
  misc_feature: MA Experiment 20001558 PARAMETER Experiment Name: At_Drought_Soil_Dry_P Parameter: Age (day) Value: 27
  misc_feature: MA Experiment 20001558 PARAMETER Experiment Name: At_Drought_Soil_Dry_P Parameter: Organism Value: A. thaliana
  misc_feature: MA Experiment 20001558 PARAMETER Experiment Name: At_Drought_Soil_Dry_P Parameter: Plant Line Value: WS
  misc_feature: MA Experiment 20001558 PARAMETER Experiment Name: At_Drought_Soil_Dry_P Parameter: Post Timepoint (hr) Value: 6
  misc_feature: MA Experiment 20001558 PARAMETER Experiment Name: At_Drought_Soil_Dry_P Parameter: Post-Treatment Value: Re-Water vs. No Drought
  misc_feature: MA Experiment 20001558 PARAMETER Experiment Name: At_Drought_Soil_Dry_P Parameter: Timepoint (day) Value: 13
  misc_feature: MA Experiment 20001558 PARAMETER Experiment Name: At_Drought_Soil_Dry_P Parameter: Treatment Value: Drought vs. No Drought
  misc_feature: MA Experiment ID: 20001560 Result: Up-regulated in Transcription
  misc_feature: MA Experiment 20001560 PARAMETER Experiment Name: At_Drought_Soil_Dry_P Parameter: Age (day) Value: 28
  misc_feature: MA Experiment 20001560 PARAMETER Experiment Name: At_Drought_Soil_Dry_P Parameter: Organism Value: A. thaliana
  misc_feature: MA Experiment 20001560 PARAMETER Experiment Name: At_Drought_Soil_Dry_P Parameter: Plant Line Value: WS
  misc_feature: MA Experiment 20001560 PARAMETER Experiment Name: At_Drought_Soil_Dry_P Parameter: Post Timepoint (hr) Value: None
  misc_feature: MA Experiment 20001560 PARAMETER Experiment Name: At_Drought_Soil_Dry_P Parameter: Post-Treatment Value: None
  misc_feature: MA Experiment 20001560 PARAMETER Experiment Name: At_Drought_Soil_Dry_P Parameter: Timepoint (day) Value: 14
  misc_feature: MA Experiment 20001560 PARAMETER Experiment Name: At_Drought_Soil_Dry_P Parameter: Treatment Value: Drought vs. No Drought
  misc_feature: MA Experiment ID: 20001757 Result: Up-regulated in Transcription
  misc_feature: MA Experiment 20001757 PARAMETER Experiment Name: At_50mM_NH4NO3_L-to-H_P Parameter: Timepoint (hr) Value: 6
  misc_feature: MA Experiment 20001757 PARAMETER Experiment Name: At_50mM_NH4NO3_L-to-H_P Parameter: Tissue Value: Leaf
  misc_feature: MA Experiment 20001757 PARAMETER Experiment Name: At_50mM_NH4NO3_L-to-H_P Parameter: Treatment Value: 50mM NH4NO3 vs 100mM Mannitol
aagttttaacggacgcgagaaatcacagaggaagcgaagtcagtgtagagatatctaattgcgatggcttttttgagtaaattcgggaacatattgaagcagaccacaaacaagcaactcaatgctcaggtttctttatcaagcccttcgctttttcaagcaataaggtgtatgtcatcttctaagctctttattggaggtatggcttatagcatggatgaggatagcttaagagaagctttcaccaaatacggtgaagttgtcgatactagagttattttggatcgtgaaactggtaggtcaaggggatttggatttgttacattcacctcttcagaagcggcatctagtgctatccaggctttggatggccgggatctccatggccgggttgttaaagtaaactatgcaaatgatagaacaagtggtggtggttttggaggtggtggctatggaggcggtggtggtggttatggtggtagtggtggctacggaggaggtgctggtggctacggaggaagtggtggctatggaggcggtgctggtggctacggaggtaattctggtggtggctacggaggtaatgctgctggtggatatggaggcagtggtgctggtggctatggaggcgatgctactggtcacggaggtgctggtggaggttatggttcaagcggtggctttggatctagcggcaacacttatggggagggttcaagtgcaagcgcaggtgctgttggtgactataatggaagtagtggttatggtagcgccaatacttatggtagcagcaatggtggattcgctggagacagccagtttggaggaagccctgttggcaacagctctcagttcggtggtgacaatacccagtttactgctggtggccaatttggcggtgaggatcaatttggaagcatggagaaaagtgaaacgaagatggaagatggaccaataggtggagaattcgaagatgttgccaaaagagcttgaaggaactagcaaaaaatgttgtcaagactgtcttttcatattaaatcctatgattagtagtagctagctattctacattgcttcctgaattaaacactttatcaagaaacaatctgcttttgctatctttgaaaataatttgtagctcaattt

SEQ ID NO: 98264 - protein, 309 aa, Arabidopsis thaliana
  peptide (1)..(309): Ceres Seq. ID no. 13592986
  misc_feature (42)..(113): Pfam Name: RNA recognition motif. (a.k.a. RRM, RBD, or RNP domain) Pfam Description: RNA recognition motif. (a.k.a. RRM, RBD, or RNP
  misc_feature (1)..(309): Homolog of NCBI NO: 15239505 NR Description: RNA-binding protein, putative [Arabidopsis >gi|9759450|dbj|BAB10366.1| contains similarity to RNA binding [Arabidopsis thaliana] >gi|16974556|gb|AAL31194.1|
  misc_feature (1)..(309): Homolog of NCBI NO: 15221187 NR Description: glycine-rich RNA-binding protein [Arabidopsis
  misc_feature (1)..(288): Homolog of NCBI NO: 15822705 NR Description: RNA-binding protein precursor [Solanum tuberosum]
  misc_feature (1)..(246): Homolog of NCBI NO: 15822703 NR Description: RNA-binding protein precursor [Nicotiana tabacum]
  misc_feature (1)..(245): Homolog of NCBI NO: 1084415 NR Description: RNA-binding protein - wood tobacco
  misc_feature (41)..(214): Homolog of NCBI NO: 1076731 NR Description: RNA binding protein - barley glycine rich protein, RNA binding protein [Hordeum vulgare subsp.
  misc_feature (42)..(256): Homolog of NCBI NO: 33239465 NR Description: RNA-binding protein, RRM domain [Prochlorococcus
  misc_feature (41)..(206): Homolog of NCBI NO: 7439981 NR Description: glycine-rich RNA-binding protein GRP1 - wheat
  misc_feature (115)..(253): Homolog of NCBI NO: 28374304 NR Description: similar to heterogeneous ribonuclear particle
  misc_feature (41)..(119): Homolog of NCBI NO: 28374304 NR Description: similar to heterogeneous ribonuclear particle
MAFLSKFGNILKQTTNKQLNAQVSLSSPSLFQAIRCMSSSKLFIGGMAYSMDEDSLREAFTKYGEVVDTRVILDRETGRSRGFGFVTFTSSEAASSAIQALDGRDLHGRVVKVNYANDRTSGGGFGGGGYGGGGGGYGGSGGYGGGAGGYGGSGGYGGGAGGYGGNSGGGYGGNAAGGYGGSGAGGYGGDATGHGGAGGGYGSSGGFGSSGNTYGEGSSASAGAVGDYNGSSGYGSANTYGSSNGGFAGDSQFGGSPVGNSSQFGGDNTQFTAGGQFGGEDQFGSMEKSETKMEDGPIGGEFEDVAKRA

SEQ ID NO: 98265 - protein, 273 aa, Arabidopsis thaliana
  peptide (1)..(273): Ceres Seq. ID no. 13592987
  misc_feature (6)..(77): Pfam Name: RNA recognition motif. (a.k.a. RRM, RBD, or RNP domain) Pfam Description: RNA recognition motif. (a.k.a. RRM, RBD, or RNP
  misc_feature (1)..(273): Homolog of NCBI NO: 15239505 NR Description: RNA-binding protein, putative [Arabidopsis >gi|9759450|dbj|BAB10366.1| contains similarity to RNA binding [Arabidopsis thaliana] >gi|16974556|gb|AAL31194.1|
  misc_feature (1)..(273): Homolog of NCBI NO: 15221187 NR Description: glycine-rich RNA-binding protein [Arabidopsis
  misc_feature (1)..(252): Homolog of NCBI NO: 15822705 NR Description: RNA-binding protein precursor [Solanum tuberosum]
  misc_feature (1)..(210): Homolog of NCBI NO: 15822703 NR Description: RNA-binding protein precursor [Nicotiana tabacum]
  misc_feature (1)..(209): Homolog of NCBI NO: 1084415 NR Description: RNA-binding protein - wood tobacco
  misc_feature (5)..(178): Homolog of NCBI NO: 1076731 NR Description: RNA binding protein - barley glycine rich protein, RNA binding protein [Hordeum vulgare subsp.
  misc_feature (6)..(220): Homolog of NCBI NO: 33239465 NR Description: RNA-binding protein, RRM domain [Prochlorococcus
  misc_feature (5)..(170): Homolog of NCBI NO: 7439981 NR Description: glycine-rich RNA-binding protein GRP1 - wheat
  misc_feature (79)..(217): Homolog of NCBI NO: 28374304 NR Description: similar to heterogeneous ribonuclear particle
  misc_feature (5)..(83): Homolog of NCBI NO: 28374304 NR Description: similar to heterogeneous ribonuclear particle
MSSSKLFIGGMAYSMDEDSLREAFTKYGEVVDTRVILDRETGRSRGFGFVTFTSSEAASSAIQALDGRDLHGRVVKVNYANDRTSGGGFGGGGYGGGGGGYGGSGGYGGGAGGYGGSGGYGGGAGGYGGNSGGGYGGNAAGGYGGSGAGGYGGDATGHGGAGGGYGSSGGFGSSGNTYGEGSSASAGAVGDYNGSSGYGSANTYGSSNGGFAGDSQFGGSPVGNSSQFGGDNTQFTAGGQFGGEDQFGSMEKSETKMEDGPIGGEFEDVAKRA

SEQ ID NO: 98266 - protein, 263 aa, Arabidopsis thaliana
  peptide (1)..(263): Ceres Seq. ID no. 13592988
  misc_feature (1)..(67): Pfam Name: RNA recognition motif. (a.k.a. RRM, RBD, or RNP domain) Pfam Description: RNA recognition motif. (a.k.a. RRM, RBD, or RNP
  misc_feature (1)..(263): Homolog of NCBI NO: 15239505 NR Description: RNA-binding protein, putative [Arabidopsis >gi|9759450|dbj|BAB10366.1| contains similarity to RNA binding [Arabidopsis thaliana] >gi|16974556|gb|AAL31194.1|
  misc_feature (1)..(263): Homolog of NCBI NO: 15221187 NR Description: glycine-rich RNA-binding protein [Arabidopsis
  misc_feature (1)..(242): Homolog of NCBI NO: 15822705 NR Description: RNA-binding protein precursor [Solanum tuberosum]
  misc_feature (1)..(200): Homolog of NCBI NO: 15822703 NR Description: RNA-binding protein precursor [Nicotiana tabacum]
  misc_feature (1)..(199): Homolog of NCBI NO: 1084415 NR Description: RNA-binding protein - wood tobacco
  misc_feature (1)..(168): Homolog of NCBI NO: 1076731 NR Description: RNA binding protein - barley glycine rich protein, RNA binding protein [Hordeum vulgare subsp.
  misc_feature (1)..(210): Homolog of NCBI NO: 33239465 NR Description: RNA-binding protein, RRM domain [Prochlorococcus
  misc_feature (1)..(160): Homolog of NCBI NO: 7439981 NR Description: glycine-rich RNA-binding protein GRP1 - wheat
  misc_feature (69)..(207): Homolog of NCBI NO: 28374304 NR Description: similar to heterogeneous ribonuclear particle
  misc_feature (1)..(73): Homolog of NCBI NO: 28374304 NR Description: similar to heterogeneous ribonuclear particle
MAYSMDEDSLREAFTKYGEVVDTRVILDRETGRSRGFGFVTFTSSEAASSAIQALDGRDLHGRVVKVNYANDRTSGGGFGGGGYGGGGGGYGGSGGYGGGAGGYGGSGGYGGGAGGYGGNSGGGYGGNAAGGYGGSGAGGYGGDATGHGGAGGGYGSSGGFGSSGNTYGEGSSASAGAVGDYNGSSGYGSANTYGSSNGGFAGDSQFGGSPVGNSSQFGGDNTQFTAGGQFGGEDQFGSMEKSETKMEDGPIGGEFEDVAKRA

SEQ ID NO: 98267 - DNA, 1008 bp, Arabidopsis thaliana
  misc_feature (1)..(1008): Ceres Seq. ID no. 13592999
  misc_feature: MA Experiment ID: 20000179 Result: Up-regulated in Transcription
  misc_feature: MA Experiment 20000179 PARAMETER Experiment Name: At_Germinating_Seeds_P Parameter: Age (hr) Value: 6 vs. 0
  misc_feature: MA Experiment 20000179 PARAMETER Experiment Name: At_Germinating_Seeds_P Parameter: Tissue Value: Germinating Seeds
  misc_feature: MA Experiment ID: 20000182 Result: Down-regulated in Transcription
  misc_feature: MA Experiment 20000182 PARAMETER Experiment Name: At_2mM_SA_P Parameter: Age (day) Value: 14
  misc_feature: MA Experiment 20000182 PARAMETER Experiment Name: At_2mM_SA_P Parameter: Organism Value: A. thaliana
  misc_feature: MA Experiment 20000182 PARAMETER Experiment Name: At_2mM_SA_P Parameter: Plant Line Value: WS
  misc_feature: MA Experiment 20000182 PARAMETER Experiment Name: At_2mM_SA_P Parameter: Timepoint (hr) Value: 6
  misc_feature: MA Experiment 20000182 PARAMETER Experiment Name: At_2mM_SA_P Parameter: Tissue Value: Aerial
  misc_feature: MA Experiment 20000182 PARAMETER Experiment Name: At_2mM_SA_P Parameter: Treatment Value: 2mM SA vs. No Treatment
  misc_feature: MA Experiment ID: 20000234 Result: Up-regulated in Transcription
  misc_feature: MA Experiment 20000234 PARAMETER Experiment Name: At_Siliques_P Parameter: Age (day) Value: 21
  misc_feature: MA Experiment 20000234 PARAMETER Experiment Name: At_Siliques_P Parameter: Organism Value: A. thaliana
  misc_feature: MA Experiment 20000234 PARAMETER Experiment Name: At_Siliques_P Parameter: Plant Line Value: WS
  misc_feature: MA Experiment 20000234 PARAMETER Experiment Name: At_Siliques_P Parameter: Tissue Value: Less Than 5mm Siliques vs. Whole Plant
  misc_feature: MA Experiment ID: 20000264 Result: Up-regulated in Transcription
  misc_feature: MA Experiment 20000264 PARAMETER Experiment Name: At_Open_Flower_P Parameter: Age (day) Value: 21
  misc_feature: MA Experiment 20000264 PARAMETER Experiment Name: At_Open_Flower_P Parameter: Plant Line Value: WS
  misc_feature: MA Experiment 20000264 PARAMETER Experiment Name: At_Open_Flower_P Parameter: Tissue Value: Open Flower vs. Whole Plant
  misc_feature: MA Experiment ID: 20000265 Result: Up-regulated in Transcription
  misc_feature: MA Experiment 20000265 PARAMETER Experiment Name: At_Open_Flower_P Parameter: Age (day) Value: 21
  misc_feature: MA Experiment 20000265 PARAMETER Experiment Name: At_Open_Flower_P Parameter: Plant Line Value: WS
  misc_feature: MA Experiment 20000265 PARAMETER Experiment Name: At_Open_Flower_P Parameter: Tissue Value: Closed Flower vs. Whole Plant
  misc_feature: MA Experiment ID: 20000286 Result: Up-regulated in Transcription
  misc_feature: MA Experiment 20000286 PARAMETER Experiment Name: At_Open_Flower_P Parameter: Age (day) Value: 21
  misc_feature: MA Experiment 20000286 PARAMETER Experiment Name: At_Open_Flower_P Parameter: Plant Line Value: WS
  misc_feature: MA Experiment 20000286 PARAMETER Experiment Name: At_Open_Flower_P Parameter: Tissue Value: Half Open vs. Whole Plant
  misc_feature: MA Experiment ID: 20000437 Result: Down-regulated in Transcription
  misc_feature: MA Experiment 20000437 PARAMETER Experiment Name: At_Drought_P Parameter: Age (day) Value: 8
  misc_feature: MA Experiment 20000437 PARAMETER Experiment Name: At_Drought_P Parameter: Organism Value: A. thaliana
  misc_feature: MA Experiment 20000437 PARAMETER Experiment Name: At_Drought_P Parameter: Plant Line Value: WS
  misc_feature: MA Experiment 20000437 PARAMETER Experiment Name: At_Drought_P Parameter: Timepoint (hr) Value: 24
  misc_feature: MA Experiment 20000437 PARAMETER Experiment Name: At_Drought_P Parameter: Tissue Value: Whole Plant
  misc_feature: MA Experiment 20000437 PARAMETER Experiment Name: At_Drought_P Parameter: Treatment Value: Drought vs. No Drought
  misc_feature: MA Experiment ID: 20000451 Result: Up-regulated in Transcription
  misc_feature: MA Experiment 20000451 PARAMETER Experiment Name: At_CS6879_Shoots-Roots_P Parameter: Age (day) Value: 14
  misc_feature: MA Experiment 20000451 PARAMETER Experiment Name: At_CS6879_Shoots-Roots_P Parameter: Organism Value: A. thaliana
  misc_feature: MA Experiment 20000451 PARAMETER Experiment Name: At_CS6879_Shoots-Roots_P Parameter: Plant Line Value: CS6879 vs. WS
  misc_feature: MA Experiment 20000451 PARAMETER Experiment Name: At_CS6879_Shoots-Roots_P Parameter: Tissue Value: Roots
  misc_feature: MA Experiment ID: 20001450 Result: Down-regulated in Transcription
  misc_feature: MA Experiment 20001450 PARAMETER Experiment Name: At_Far-red-induction_P Parameter: Age (day) Value: 7
  misc_feature: MA Experiment 20001450 PARAMETER Experiment Name: At_Far-red-induction_P Parameter: Light Value: Far-red vs. White
  misc_feature: MA Experiment 20001450 PARAMETER Experiment Name: At_Far-red-induction_P Parameter: Organism Value: A. thaliana
  misc_feature: MA Experiment 20001450 PARAMETER Experiment Name: At_Far-red-induction_P Parameter: Plant Line Value: Columbia
  misc_feature: MA Experiment 20001450 PARAMETER Experiment Name: At_Far-red-induction_P Parameter: Timepoint (hr) Value: 8
  misc_feature: MA Experiment 20001450 PARAMETER Experiment Name: At_Far-red-induction_P Parameter: Tissue Value: Whole Plant
gttgattcagtctcactcttgctcagtagagctcccatcaatggcttcaatcaacctcttcctcttcgctttccttcttcttctctctcacgcttcagcttcaacggtaatcttctacaacaaatgcaaacacccagtttggccaggtatccaacccagcgccggtcaaaacttactcgccggcggtggttttaagcttccagctaacaaagcccactctcttcaactcccaccactctggtccggccgtttctggggtcgccacggctgcaccttcgacagatctggccgtggtcactgcgccaccggagattgcggcggttctctctcctgcaacggtgccggcggtgaacctccggccactctcgccgaaatcactctcggccctgagctagacttctatgacgtcagcctcgtcgacggttataacctggccatgtcgattatgccggttaaaggttcaggtcaatgtagctacgccggttgtgttagcgatctaaaccagatgtgtccggttggtttacaagtccggtcacgtaacgggaaacgtgtagtagcctgtaaaagtgcttgctctgccttcaattcaccacagtactgttgcaccggcttgttcggtaacccacagtcttgcaaaccaacggcttactccaaaatcttcaaagtcgcttgcccaaaagcttactcttatgcttacgacgacccaaccagtatcgccacatgttccaaggctaactacatcgtcaccttttgccctcatcatcgccattaaattagccagtaaagaagaagaaacatttctctattagcaacaaactcttgtcatgtttcgaattcttgagtttctatatctacttttgtaacactatgattgaatgcagatcctattatcaatatcaatggaactcaaccaacttagtgatgtgtcttgtgagtgttaatctccaaattctaaatccttttatgttcagtggcttatgtactagacaatgcaagattaatgctatt

SEQ ID NO: 98268 - protein, 256 aa, Arabidopsis thaliana
  peptide (1)..(256): Ceres Seq. ID no. 13593000
  misc_feature (40)..(252): Pfam Name: Thaumatin family Pfam Description: Thaumatin family
  misc_feature (14)..(256): Homolog of NCBI NO: 15221033 NR Description: thaumatin-like protein [Arabidopsis thaliana]
  misc_feature (14)..(256): Homolog of NCBI NO: 2129751 NR Description: thaumatin-like protein - Arabidopsis thaliana
  misc_feature (14)..(255): Homolog of NCBI NO: 7442175 NR Description: thaumatin-like protein - turnip
  misc_feature (10)..(253): Homolog of NCBI NO: 15219508 NR Description: thaumatin-like protein (pathogenesis-related
  misc_feature (15)..(253): Homolog of NCBI NO: 21553814 NR Description: thaumatin-like protein [Arabidopsis thaliana]
  misc_feature (14)..(123): Homolog of NCBI NO: 25296198 NR Description: protein T10O22.21 [imported] - Arabidopsis >gi|8671776|gb|AAF78382.1|AC069551_15 T10O22.21 [Arabidopsis
  misc_feature (153)..(256): Homolog of NCBI NO: 25296198 NR Description: protein T10O22.21 [imported] - Arabidopsis >gi|8671776|gb|AAF78382.1|AC069551_15 T10O22.21 [Arabidopsis
  misc_feature (19)..(251): Homolog of NCBI NO: 4586372 NR Description: thaumatin-like protein SE39b [Nicotiana tabacum]
  misc_feature (11)..(252): Homolog of NCBI NO: 15222088 NR Description: thaumatin-like protein [Arabidopsis thaliana]
  misc_feature (16)..(252): Homolog of NCBI NO: 6273385 NR Description: SCUTL2 [Vitis vinifera]
LIQSHSCSVELPSMASINLFLFAFLLLLSHASASTVIFYNKCKHPVWPGIQPSAGQNLLAGGGFKLPANKAHSLQLPPLWSGRFWGRHGCTFDRSGRGHCATGDCGGSLSCNGAGGEPPATLAEITLGPELDFYDVSLVDGYNLAMSIMPVKGSGQCSYAGCVSDLNQMCPVGLQVRSRNGKRVVACKSACSAFNSPQYCCTGLFGNPQSCKPTAYSKIFKVACPKAYSYAYDDPTSIATCSKANYIVTFCPHHRH

SEQ ID NO: 98269 - protein, 243 aa, Arabidopsis thaliana
  peptide (1)..(243): Ceres Seq. ID no. 13593001
  misc_feature (27)..(239): Pfam Name: Thaumatin family Pfam Description: Thaumatin family
  misc_feature (1)..(243): Homolog of NCBI NO: 15221033 NR Description: thaumatin-like protein [Arabidopsis thaliana]
  misc_feature (1)..(243): Homolog of NCBI NO: 2129751 NR Description: thaumatin-like protein - Arabidopsis thaliana
  misc_feature (1)..(242): Homolog of NCBI NO: 7442175 NR Description: thaumatin-like protein - turnip
  misc_feature (1)..(240): Homolog of NCBI NO: 15219508 NR Description: thaumatin-like protein (pathogenesis-related
  misc_feature (2)..(240): Homolog of NCBI NO: 21553814 NR Description: thaumatin-like protein [Arabidopsis thaliana]
  misc_feature (1)..(110): Homolog of NCBI NO: 25296198 NR Description: protein T10O22.21 [imported] - Arabidopsis >gi|8671776|gb|AAF78382.1|AC069551_15 T10O22.21 [Arabidopsis
  misc_feature (140)..(243): Homolog of NCBI NO: 25296198 NR Description: protein T10O22.21 [imported] - Arabidopsis >gi|8671776|gb|AAF78382.1|AC069551_15 T10O22.21 [Arabidopsis
  misc_feature (6)..(238): Homolog of NCBI NO: 4586372 NR Description: thaumatin-like protein SE39b [Nicotiana tabacum]
  misc_feature (1)..(239): Homolog of NCBI NO: 15222088 NR Description: thaumatin-like protein [Arabidopsis thaliana]
  misc_feature (3)..(239): Homolog of NCBI NO: 6273385 NR Description: SCUTL2 [Vitis vinifera]
MASINLFLFAFLLLLSHASASTVIFYNKCKHPVWPGIQPSAGQNLLAGGGFKLPANKAHSLQLPPLWSGRFWGRHGCTFDRSGRGHCATGDCGGSLSCNGAGGEPPATLAEITLGPELDFYDVSLVDGYNLAMSIMPVKGSGQCSYAGCVSDLNQMCPVGLQVRSRNGKRVVACKSACSAFNSPQYCCTGLFGNPQSCKPTAYSKIFKVACPKAYSYAYDDPTSIATCSKANYIVTFCPHHRH

SEQ ID NO: 98270 - DNA, 1590 bp, Arabidopsis thaliana
  misc_feature (1)..(1590): Ceres Seq. ID no. 13593006
  misc_feature: MA Experiment ID: 20000179 Result: Up-regulated in Transcription
  misc_feature: MA Experiment 20000179 PARAMETER Experiment Name: At_Germinating_Seeds_P Parameter: Age (hr) Value: 6 vs. 0
  misc_feature: MA Experiment 20000179 PARAMETER Experiment Name: At_Germinating_Seeds_P Parameter: Tissue Value: Germinating Seeds
  misc_feature: MA Experiment ID: 20000180 Result: Up-regulated in Transcription
  misc_feature: MA Experiment 20000180 PARAMETER Experiment Name: At_Germinating_Seeds_P Parameter: Age (hr) Value: 24 vs. 0
  misc_feature: MA Experiment 20000180 PARAMETER Experiment Name: At_Germinating_Seeds_P Parameter: Tissue Value: Germinating Seeds
  misc_feature: MA Experiment ID: 20000265 Result: Up-regulated in Transcription
  misc_feature: MA Experiment 20000265 PARAMETER Experiment Name: At_Open_Flower_P Parameter: Age (day) Value: 21
  misc_feature: MA Experiment 20000265 PARAMETER Experiment Name: At_Open_Flower_P Parameter: Plant Line Value: WS
  misc_feature: MA Experiment 20000265 PARAMETER Experiment Name: At_Open_Flower_P Parameter: Tissue Value: Closed Flower vs. Whole Plant
  misc_feature: MA Experiment ID: 20000495 Result: Up-regulated in Transcription
  misc_feature: MA Experiment 20000495 PARAMETER Experiment Name: At_Guard_Cells_P Parameter: Harvest Date Value: 8/2/2002
  misc_feature: MA Experiment 20000495 PARAMETER Experiment Name: At_Guard_Cells_P Parameter: Organism Value: A. thaliana
  misc_feature: MA Experiment 20000495 PARAMETER Experiment Name: At_Guard_Cells_P Parameter: Tissue Value: Guard Cells vs. Leaves
  misc_feature: MA Experiment ID: 20000573 Result: Down-regulated in Transcription
  misc_feature: MA Experiment 20000573 PARAMETER Experiment Name: At_100uM_ABA_Mutants__P Parameter: Organism Value: A. thaliana
  misc_feature: MA Experiment 20000573 PARAMETER Experiment Name: At_100uM_ABA_Mutants__P Parameter: Plant Line Value: CS22 vs. Ler wt
  misc_feature: MA Experiment 20000573 PARAMETER Experiment Name: At_100uM_ABA_Mutants__P Parameter: Timepoint (hr) Value: N/A
  misc_feature: MA Experiment 20000573 PARAMETER Experiment Name: At_100uM_ABA_Mutants__P Parameter: Tissue Value: Whole Plant
  misc_feature: MA Experiment 20000573 PARAMETER Experiment Name: At_100uM_ABA_Mutants__P Parameter: Treatment Value: None
atgtggtgtttgtcctgctttaaaccttccactaaacatgatccctctgaggatcgttttgaagaagaaacaaatatcgttacaggtatttctctgtatgaagatgtcatcttacgtcagagaagatcagaagctgatcagatagaatgggctattcaagatagcttcaacccgcaagaaacttctcgttgtcgtcagcgagaggaggatgatcagatagcgcgtggtttgcaatatgtggaagaaactgagcttgataaatcagttgtggacgaagaagatcagcagctttctaagattgttgaggagagtttgaaggagaaaggcaaaagtaagcaatttgaagatgatcaagtggaaaatgatgaacagcaagctctgatggttcaggagagtctatacatggtggagctttctgctcaacttgaagaagataaaaacatttcaacaatacctccgctgaatgaagatgcgcagcttcagaaggttatttgggaaagcgcgaagggtaaaggccaaatagagcatttcaaagatccagtggaagaagatggaaatcttccaagggtagatctcaacgttaaccatcctcatagcatatgtgatggttgcaaatctgcgattgaatatggaagatctgttcatgccttgggtgttaattggcatcctgaatgtttctgttgtcgttattgcgacaaaccaatcgctatgcacgagtataaagaacatcccttctggaaggaaaagtactgcccttttcatgaagttgatggaactcccaagtgttgcagttgtgaaagattagagccctggggaacgaagtatgtaatgcttgctgacaatcggtggctatgcgtaaaatgtatggaatgcgcggttatggatacttatgagtgccaaccattgcactttgaaatccgtgaattcttcggaagcttaaacatgaaggttgagaaagaattccctcttcttttggtggagaaagaagcgctgaaaaaagctgaggcgcaagaaaagatcgacaatcagcatggggttgtaaccagaggtatttgcctgtctgaagggcagattgtcaatagtgtctttaaaaagccaaccatggggccaaacggcgagctagtaagcttgggtacagaacctcaaaaggttgttggtggatgtgaggtcactgcaattctcatcctatatggacttcctaggttactaactggatatatcttggctcatgagatgatgcatgcttggcttagactcaatggttataggaatcttaagttagagctggaagaaggaatatgccaagtgctaggccacatgtggttggagtcacagacatactccagttctgcagctgcatcatcagcttcttcttcttcgaggactccagctgctaatgcatcaaagaaaggtgctcaatctgattacgagaagaaactggtggaattttgcaaggatcagatagaaacagacgattcaccggtctacggtgttggattcaggaaagttaaccagatggtctcagactccagcctccataaaatcctgaaaagtattcaacactggacgaaaccagattcaaatctttga

SEQ ID NO: 98271 - protein, 529 aa, Arabidopsis thaliana
  peptide (1)..(529): Ceres Seq. ID no. 13593007
  misc_feature (201)..(270): Pfam Name: LIM domain Pfam Description: LIM domain
  misc_feature (1)..(529): Homolog of NCBI NO: 15240017 NR Description: expressed protein [Arabidopsis thaliana] emb|CAB16816.1~gene_id:K1F13.29~similar to unknown protein
  misc_feature (37)..(519): Homolog of NCBI NO: 15240018 NR Description: hypothetical protein [Arabidopsis thaliana] emb|CAB16816.1~gene_id:K1F13.30~similar to unknown protein
  misc_feature (92)..(519): Homolog of NCBI NO: 27808630 NR Description: At5g66630 [Arabidopsis thaliana]
  misc_feature (92)..(519): Homolog of NCBI NO: 30698240 NR Description: expressed protein [Arabidopsis thaliana]
  misc_feature (38)..(519): Homolog of NCBI NO: 22326876 NR Description: disease resistance protein (TIR-NBS-LRR class),
  misc_feature (222)..(519): Homolog of NCBI NO: 10177891 NR Description: emb|CAB16816.1|~gene_id:MPI7.6~similar to unknown
  misc_feature (110)..(529): Homolog of NCBI NO: 30698242 NR Description: expressed protein [Arabidopsis thaliana]
  misc_feature (225)..(529): Homolog of NCBI NO: 8843722 NR Description: emb|CAB16816.1~gene_id:MSN2.2~similar to unknown
  misc_feature (44)..(520): Homolog of NCBI NO: 25407769 NR Description: hypothetical protein AT4g36860 [imported] - thaliana >gi|4006886|emb|CAB16816.1| putative protein thaliana] >gi|7270635|emb|CAB80352.1| putative protein
  misc_feature (196)..(520): Homolog of NCBI NO: 17065046 NR Description: Unknown protein [Arabidopsis thaliana]
MWCLSCFKPSTKHDPSEDRFEEETNIVTGISLYEDVILRQRRSEADQIEWAIQDSFNPQETSRCRQREEDDQIARGLQYVEETELDKSVVDEEDQQLSKIVEESLKEKGKSKQFEDDQVENDEQQALMVQESLYMVELSAQLEEDKNISTIPPLNEDAQLQKVIWESAKGKGQIEHFKDPVEEDGNLPRVDLNVNHPHSICDGCKSAIEYGRSVHALGVNWHPECFCCRYCDKPIAMHEYKEHPFWKEKYCPFHEVDGTPKCCSCERLEPWGTKYVMLADNRWLCVKCMECAVMDTYECQPLHFEIREFFGSLNMKVEKEFPLLLVEKEALKKAEAQEKIDNQHGVVTRGICLSEGQIVNSVFKKPTMGPNGELVSLGTEPQKVVGGCEVTAILILYGLPRLLTGYILAHEMMHAWLRLNGYRNLKLELEEGICQVLGHMWLESQTYSSSAAASSASSSSRTPAANASKKGAQSDYEKKLVEFCKDQIETDDSPVYGVGFRKVNQMVSDSSLHKILKSIQHWTKPDSNL

SEQ ID NO: 98272 - protein, 402 aa, Arabidopsis thaliana
  peptide (1)..(402): Ceres Seq. ID no. 13593008
  misc_feature (74)..(143): Pfam Name: LIM domain Pfam Description: LIM domain
  misc_feature (1)..(402): Homolog of NCBI NO: 15240017 NR Description: expressed protein [Arabidopsis thaliana] emb|CAB16816.1~gene_id:K1F13.29~similar to unknown protein
  misc_feature (1)..(392): Homolog of NCBI NO: 15240018 NR Description: hypothetical protein [Arabidopsis thaliana] emb|CAB16816.1~gene_id:K1F13.30~similar to unknown protein
  misc_feature (1)..(392): Homolog of NCBI NO: 27808630 NR Description: At5g66630 [Arabidopsis thaliana]
  misc_feature (1)..(392): Homolog of NCBI NO: 30698240 NR Description: expressed protein [Arabidopsis thaliana]
  misc_feature (1)..(392): Homolog of NCBI NO: 22326876 NR Description: disease resistance protein (TIR-NBS-LRR class),
  misc_feature (95)..(392): Homolog of NCBI NO: 10177891 NR Description: emb|CAB16816.1|~gene_id:MPI7.6~similar to unknown
  misc_feature (1)..(402): Homolog of NCBI NO: 30698242 NR Description: expressed protein [Arabidopsis thaliana]
  misc_feature (98)..(402): Homolog of NCBI NO: 8843722 NR Description: emb|CAB16816.1~gene_id:MSN2.2~similar to unknown
  misc_feature (1)..(393): Homolog of NCBI NO: 25407769 NR Description: hypothetical protein AT4g36860 [imported] - thaliana >gi|4006886|emb|CAB16816.1| putative protein thaliana] >gi|7270635|emb|CAB80352.1| putative protein
  misc_feature (69)..(393): Homolog of NCBI NO: 17065046 NR Description: Unknown protein [Arabidopsis thaliana]
MVQESLYMVELSAQLEEDKNISTIPPLNEDAQLQKVIWESAKGKGQIEHFKDPVEEDGNLPRVDLNVNHPHSICDGCKSAIEYGRSVHALGVNWHPECFCCRYCDKPIAMHEYKEHPFWKEKYCPFHEVDGTPKCCSCERLEPWGTKYVMLADNRWLCVKCMECAVMDTYECQPLHFEIREFFGSLNMKVEKEFPLLLVEKEALKKAEAQEKIDNQHGVVTRGICLSEGQIVNSVFKKPTMGPNGELVSLGTEPQKVVGGCEVTAILILYGLPRLLTGYILAHEMMHAWLRLNGYRNLKLELEEGICQVLGHMWLESQTYSSSAAASSASSSSRTPAANASKKGAQSDYEKKLVEFCKDQIETDDSPVYGVGFRKVNQMVSDSSLHKILKSIQHWTKPDSNL

SEQ ID NO: 98273 - protein, 395 aa, Arabidopsis thaliana
  peptide (1)..(395): Ceres Seq. ID no. 13593009
  misc_feature (67)..(136): Pfam Name: LIM domain Pfam Description: LIM domain
  misc_feature (1)..(395): Homolog of NCBI NO: 15240017 NR Description: expressed protein [Arabidopsis thaliana] emb|CAB16816.1~gene_id:K1F13.29~similar to unknown protein
  misc_feature (1)..(385): Homolog of NCBI NO: 15240018 NR Description: hypothetical protein [Arabidopsis thaliana] emb|CAB16816.1~gene_id:K1F13.30~similar to unknown protein
  misc_feature (1)..(385): Homolog of NCBI NO: 27808630 NR Description: At5g66630 [Arabidopsis thaliana]
  misc_feature (1)..(385): Homolog of NCBI NO: 30698240 NR Description: expressed protein [Arabidopsis thaliana]
  misc_feature (1)..(385): Homolog of NCBI NO: 22326876 NR Description: disease resistance protein (TIR-NBS-LRR class),
  misc_feature (88)..(385): Homolog of NCBI NO: 10177891 NR Description: emb|CAB16816.1|~gene_id:MPI7.6~similar to unknown
  misc_feature (1)..(395): Homolog of NCBI NO: 30698242 NR Description: expressed protein [Arabidopsis thaliana]
  misc_feature (91)..(395): Homolog of NCBI NO: 8843722 NR Description: emb|CAB16816.1~gene_id:MSN2.2~similar to unknown
  misc_feature (1)..(386): Homolog of NCBI NO: 25407769 NR Description: hypothetical protein AT4g36860 [imported] - thaliana >gi|4006886|emb|CAB16816.1| putative protein thaliana] >gi|7270635|emb|CAB80352.1| putative protein
  misc_feature (62)..(386): Homolog of NCBI NO: 17065046 NR Description: Unknown protein [Arabidopsis thaliana]
MVELSAQLEEDKNISTIPPLNEDAQLQKVIWESAKGKGQIEHFKDPVEEDGNLPRVDLNVNHPHSICDGCKSAIEYGRSVHALGVNWHPECFCCRYCDKPIAMHEYKEHPFWKEKYCPFHEVDGTPKCCSCERLEPWGTKYVMLADNRWLCVKCMECAVMDTYECQPLHFEIREFFGSLNMKVEKEFPLLLVEKEALKKAEAQEKIDNQHGVVTRGICLSEGQIVNSVFKKPTMGPNGELVSLGTEPQKVVGGCEVTAILILYGLPRLLTGYILAHEMMHAWLRLNGYRNLKLELEEGICQVLGHMWLESQTYSSSAAASSASSSSRTPAANASKKGAQSDYEKKLVEFCKDQIETDDSPVYGVGFRKVNQMVSDSSLHKILKSIQHWTKPDSNL

SEQ ID NO: 98274 - DNA, 1631 bp, Arabidopsis thaliana
  misc_feature (1)..(1631): Ceres Seq. ID no. 13593017
  misc_feature: MA Experiment ID: 20000169 Result: Up-regulated in Transcription
  misc_feature: MA Experiment 20000169 PARAMETER Experiment Name: At_100uM_ABA_P Parameter: Age (day) Value: 14
  misc_feature: MA Experiment 20000169 PARAMETER Experiment Name: At_100uM_ABA_P Parameter: Organism Value: A. thaliana
  misc_feature: MA Experiment 20000169 PARAMETER Experiment Name: At_100uM_ABA_P Parameter: Plant Line Value: WS
  misc_feature: MA Experiment 20000169 PARAMETER Experiment Name: At_100uM_ABA_P Parameter: Timepoint (hr) Value: 6
  misc_feature: MA Experiment 20000169 PARAMETER Experiment Name: At_100uM_ABA_P Parameter: Tissue Value: Aerial
  misc_feature: MA Experiment 20000169 PARAMETER Experiment Name: At_100uM_ABA_P Parameter: Treatment Value: 100uM ABA vs. No Treatment
  misc_feature: MA Experiment ID: 20000171 Result: Up-regulated in Transcription
  misc_feature: MA Experiment 20000171 PARAMETER Experiment Name: At_42deg_Heat_P Parameter: Age (day) Value: 14
  misc_feature: MA Experiment 20000171 PARAMETER Experiment Name: At_42deg_Heat_P Parameter: Organism Value: A. thaliana
  misc_feature: MA Experiment 20000171 PARAMETER Experiment Name: At_42deg_Heat_P Parameter: Plant Line Value: WS
  misc_feature: MA Experiment 20000171 PARAMETER Experiment Name: At_42deg_Heat_P Parameter: Temperature (deg C) Value: 42 vs. 22
  misc_feature: MA Experiment 20000171 PARAMETER Experiment Name: At_42deg_Heat_P Parameter: Timepoint (hr) Value: 1
  misc_feature: MA Experiment 20000171 PARAMETER Experiment Name: At_42deg_Heat_P Parameter: Tissue Value: Aerial
  misc_feature: MA Experiment ID: 20000173 Result: Up-regulated in Transcription
  misc_feature: MA Experiment 20000173 PARAMETER Experiment Name: At_42deg_Heat_P Parameter: Age (day) Value: 14
  misc_feature: MA Experiment 20000173 PARAMETER Experiment Name: At_42deg_Heat_P Parameter: Organism Value: A. thaliana
  misc_feature: MA Experiment 20000173 PARAMETER Experiment Name: At_42deg_Heat_P Parameter: Plant Line Value: WS
  misc_feature: MA Experiment 20000173 PARAMETER Experiment Name: At_42deg_Heat_P Parameter: Temperature (deg C) Value: 42 vs. 22
  misc_feature: MA Experiment 20000173 PARAMETER Experiment Name: At_42deg_Heat_P Parameter: Timepoint (hr) Value: 6
  misc_feature: MA Experiment 20000173 PARAMETER Experiment Name: At_42deg_Heat_P Parameter: Tissue Value: Aerial
  misc_feature: MA Experiment ID: 20000184 Result: Up-regulated in Transcription
  misc_feature: MA Experiment 20000184 PARAMETER Experiment Name: At_Shoots__P Parameter: Age (day) Value: 7
  misc_feature: MA Experiment 20000184 PARAMETER Experiment Name: At_Shoots__P Parameter: Tissue Value: Shoots vs. Whole Plant
  misc_feature: MA Experiment ID: 20000436 Result: Up-regulated in Transcription
  misc_feature: MA Experiment 20000436 PARAMETER Experiment Name: At_Drought_P Parameter: Age (day) Value: 7
  misc_feature: MA Experiment 20000436 PARAMETER Experiment Name: At_Drought_P Parameter: Organism Value: A. thaliana
  misc_feature: MA Experiment 20000436 PARAMETER Experiment Name: At_Drought_P Parameter: Plant Line Value: WS
  misc_feature: MA Experiment 20000436 PARAMETER Experiment Name: At_Drought_P Parameter: Timepoint (hr) Value: 12
  misc_feature: MA Experiment 20000436 PARAMETER Experiment Name: At_Drought_P Parameter: Tissue Value: Whole Plant
  misc_feature: MA Experiment 20000436 PARAMETER Experiment Name: At_Drought_P Parameter: Treatment Value: Drought vs. No Drought
  misc_feature: MA Experiment ID: 20000794 Result: Up-regulated in Transcription
  misc_feature: MA Experiment 20000794 PARAMETER Experiment Name: At_Petals_P Parameter: Age (day) Value: 23-25 days
  misc_feature: MA Experiment 20000794 PARAMETER Experiment Name: At_Petals_P Parameter: Plant Line Value: WS
  misc_feature: MA Experiment 20000794 PARAMETER Experiment Name: At_Petals_P Parameter: Tissue Value: Petals vs. Whole plant
  misc_feature: MA Experiment ID: 20001248 Result: Down-regulated in Transcription
  misc_feature: MA Experiment 20001248 PARAMETER Experiment Name: At_Far-red-induction_P Parameter: Age (day) Value: 7
  misc_feature: MA Experiment 20001248 PARAMETER Experiment Name: At_Far-red-induction_P Parameter: Light Value: Far-red vs. White
  misc_feature: MA Experiment 20001248 PARAMETER Experiment Name: At_Far-red-induction_P Parameter: Organism Value: A. thaliana
  misc_feature: MA Experiment 20001248 PARAMETER Experiment Name: At_Far-red-induction_P Parameter: Plant Line Value: Columbia
  misc_feature: MA Experiment 20001248 PARAMETER Experiment Name: At_Far-red-induction_P Parameter: Timepoint (hr) Value: 4
  misc_feature: MA Experiment 20001248 PARAMETER Experiment Name: At_Far-red-induction_P Parameter: Tissue Value: Whole Plant
  misc_feature: MA Experiment ID: 20001557 Result: Up-regulated in Transcription
  misc_feature: MA Experiment 20001557 PARAMETER Experiment Name: At_Drought_Soil_Dry_P Parameter: Age (day) Value: 27
  misc_feature: MA Experiment 20001557 PARAMETER Experiment Name: At_Drought_Soil_Dry_P Parameter: Organism Value: A. thaliana
  misc_feature: MA Experiment 20001557 PARAMETER Experiment Name: At_Drought_Soil_Dry_P Parameter: Plant Line Value: WS
  misc_feature: MA Experiment 20001557 PARAMETER Experiment Name: At_Drought_Soil_Dry_P Parameter: Post Timepoint (hr) Value: 3
  misc_feature: MA Experiment 20001557 PARAMETER Experiment Name: At_Drought_Soil_Dry_P Parameter: Post-Treatment Value: Re-Water vs. No Drought
  misc_feature: MA Experiment 20001557 PARAMETER Experiment Name: At_Drought_Soil_Dry_P Parameter: Timepoint (day) Value: 13
  misc_feature: MA Experiment 20001557 PARAMETER Experiment Name: At_Drought_Soil_Dry_P Parameter: Treatment Value: Drought vs. No Drought
  misc_feature: MA Experiment ID: 20001558 Result: Up-regulated in Transcription
  misc_feature: MA Experiment 20001558 PARAMETER Experiment Name: At_Drought_Soil_Dry_P Parameter: Age (day) Value: 27
  misc_feature: MA Experiment 20001558 PARAMETER Experiment Name: At_Drought_Soil_Dry_P Parameter: Organism Value: A. thaliana
  misc_feature: MA Experiment 20001558 PARAMETER Experiment Name: At_Drought_Soil_Dry_P Parameter: Plant Line Value: WS
  misc_feature: MA Experiment 20001558 PARAMETER Experiment Name: At_Drought_Soil_Dry_P Parameter: Post Timepoint (hr) Value: 6
  misc_feature: MA Experiment 20001558 PARAMETER Experiment Name: At_Drought_Soil_Dry_P Parameter: Post-Treatment Value: Re-Water vs. No Drought
  misc_feature: MA Experiment 20001558 PARAMETER Experiment Name: At_Drought_Soil_Dry_P Parameter: Timepoint (day) Value: 13
  misc_feature: MA Experiment 20001558 PARAMETER Experiment Name: At_Drought_Soil_Dry_P Parameter: Treatment Value: Drought vs. No Drought
  misc_feature: MA Experiment ID: 20001905 Result: Up-regulated in Transcription
  misc_feature: MA Experiment 20001905 PARAMETER Experiment Name: At_Drought_Reproduction_P Parameter: Age (day) Value: 40
  misc_feature: MA Experiment 20001905 PARAMETER Experiment Name: At_Drought_Reproduction_P Parameter: Organism Value: A. thaliana
  misc_feature: MA Experiment 20001905 PARAMETER Experiment Name: At_Drought_Reproduction_P Parameter: Plant Line Value: WS
  misc_feature: MA Experiment 20001905 PARAMETER Experiment Name: At_Drought_Reproduction_P Parameter: Timepoint (day) Value: 10
  misc_feature: MA Experiment 20001905 PARAMETER Experiment Name: At_Drought_Reproduction_P Parameter: Tissue Value: Rosettes
  misc_feature: MA Experiment 20001905 PARAMETER Experiment Name: At_Drought_Reproduction_P Parameter: Treatment Value: Drought vs. No Drought
acacacgagaaagaaaaagctcacaactttaacctttctggagagagaagaacaaaagagggagagggagagaaatggaaggcaaagaagaagatgtacgagtgggagctaacaagttcccggagaggcaacccatcggtacatcggctcagtccaccgacaaggactacaaagagccacctcctgcgccactgttcgagcccggcgagctcagctcatggtctttctacagagccggaatagctgagtttatcgctactttcttgtttctctacatcactgttttgactgtaatgggagttaagagagcaccaaacatgtgtgcttctgttggaatccaaggtatcgcttgggcttttggtggcatgatctttgctcttgtctactgtactgctggaatttcaggtggacacatcaaccctgctgtaacattcggtctgttcttggctcggaagttatctctgaccagagcagtgttctacatgattatgcaatgtcttggagccatctgtggtgccggagtcgtcaaaggtttccagccaacgccgtaccagactctcggtggtggtgctaacaccgttgctcatggctacaccaaaggttctggccttggtgctgaaatcatcggaacattcgttctcgtctacactgtcttctccgccaccgacgccaagagaagcgcccgtgactcacacgtcccgattttggcgccgctcccaatcggatttgcagtgttcttggtacacttggcaacaataccgatcaccgggaccggaatcaacccagctagaagtcttggagccgcaattatctacaacaaggaccactcttgggatgaccattggattttctgggttggaccattcattggagcagctctagcagcactatatcaccagattgtcatcagagcgattcctttcaagagcaagagttagagacacacagaaagattccacggtccagaatttgttctttagtagtttctttgcttatctatctaatgtagcttgtgttttgcaatgtaatgagcctttcaagaatatgtatttgggatttctaatcagcttttgtctatgtaaaaactatgtgtttcttttttcttcctatactcgtctcagatgctttatggcaaagggtctctgaagtctaaggtgattagtgctccggttattgatgttttgaatagtttgttcgacgaatataaaataaacatagtcaaccctcattctgtatcaacatcaagttctcgggttggttttgagagacatgattatgaagatgatcatgacttcgtgaatgtgggggttgaaggattggcctctgtttatgacaagatggtgaatgaagagcttgactattgtgtacttgcaagaaagtgttgaaaacacaagggccaatacattggaaacagaatatgatgtgtttcatactagaagctcagtagtcttaagcttccggttttatttgtactagctagagatattctagctatgcaagtttcttctgtagcttctgattcttgttttagcaccagtggtcggatcttagagccacagaaaagttgcttaacacattatatgattgaggtcttgttgtgtactgaacaatagatgatttaaataattttt

SEQ ID NO: 98275 - protein, 287 aa, Arabidopsis thaliana; identical to SEQ ID NO: 29005
  peptide (1)..(287): Ceres Seq. ID no. 13593018
  misc_feature (45)..(274): Pfam Name: Major intrinsic protein Pfam Description: Major intrinsic protein
  misc_feature (1)..(287): Homolog of NCBI NO: 18411332 NR Description: transmembrane protein (MIP family) [Arabidopsis >gi|535780|dbj|BAA05654.1| transmembrane protein [Arabidopsis >gi|20466718|gb|AAM20676.1| probable plasma membrane intrinsic
  misc_feature (1)..(287): Homolog of NCBI NO: 7441247 NR Description: probable plasma membrane intrinsic protein 1c - thaliana >gi|2252825|gb|AAB62824.1| Similar to transmembrane coded for by A. thaliana cDNA H37637; coded for by A. for by A.
  misc_feature (1)..(287): Homolog of NCBI NO: 2373401 NR Description: transmembrane protein [Arabidopsis thaliana]
  misc_feature (1)..(287): Homolog of NCBI NO: 15223438 NR Description: plasma membrane intrinsic protein 1c [Arabidopsis >gi|1175012|sp|Q08733|WC1C_ARATH Plasma membrane intrinsic
  misc_feature (1)..(287): Homolog of NCBI NO: 17065068 NR Description: plasma membrane intrinsic protein 1C protein B) [Arabidopsis thaliana] >gi|25083740|gb|AAN72112.1| membrane intrinsic protein 1C (transmembrane protein B)
  misc_feature (1)..(287): Homolog of NCBI NO: 472875 NR Description: plasma membrane intrinsic protein 1c [Arabidopsis
  misc_feature (1)..(287): Homolog of NCBI NO: 15233109 NR Description: plasma membrane intrinsic protein 1A [Arabidopsis >gi|21431895|sp|P43285|WC1A_ARATH Plasma membrane intrinsic
  misc_feature (1)..(287): Homolog of NCBI NO: 3551131 NR Description: plasma membrane aquaporin (PAQ1) [Raphanus
  misc_feature (1)..(287): Homolog of NCBI NO: 15236485 NR Description: major intrinsic protein (MIP) family [Arabidopsis
  misc_feature (1)..(287): Homolog of NCBI NO: 10799095 NR Description: aquaporin PIP1b2 [Brassica oleracea]

SEQ ID NO: 98276 - protein, 214 aa, Arabidopsis thaliana; identical to SEQ ID NO: 29006
  peptide (1)..(214): Ceres Seq. ID no. 13593019
  misc_feature (1)..(201): Pfam Name: Major intrinsic protein Pfam Description: Major intrinsic protein
  misc_feature (1)..(214): Homolog of NCBI NO: 18411332 NR Description: transmembrane protein (MIP family) [Arabidopsis >gi|535780|dbj|BAA05654.1| transmembrane protein [Arabidopsis >gi|20466718|gb|AAM20676.1| probable plasma membrane intrinsic
  misc_feature (1)..(214): Homolog of NCBI NO: 7441247 NR Description: probable plasma membrane intrinsic protein 1c - thaliana >gi|2252825|gb|AAB62824.1| Similar to transmembrane coded for by A. thaliana cDNA H37637; coded for by A. for by A.
  misc_feature (1)..(214): Homolog of NCBI NO: 2373401 NR Description: transmembrane protein [Arabidopsis thaliana]
  misc_feature (1)..(214): Homolog of NCBI NO: 15223438 NR Description: plasma membrane intrinsic protein 1c [Arabidopsis >gi|1175012|sp|Q08733|WC1C_ARATH Plasma membrane intrinsic
  misc_feature (1)..(214): Homolog of NCBI NO: 17065068 NR Description: plasma membrane intrinsic protein 1C protein B) [Arabidopsis thaliana] >gi|25083740|gb|AAN72112.1| membrane intrinsic protein 1C (transmembrane protein B)
  misc_feature (1)..(214): Homolog of NCBI NO: 472875 NR Description: plasma membrane intrinsic protein 1c [Arabidopsis
  misc_feature (1)..(214): Homolog of NCBI NO: 15233109 NR Description: plasma membrane intrinsic protein 1A [Arabidopsis >gi|21431895|sp|P43285|WC1A_ARATH Plasma membrane intrinsic
  misc_feature (1)..(214): Homolog of NCBI NO: 3551131 NR Description: plasma membrane aquaporin (PAQ1) [Raphanus
  misc_feature (1)..(214): Homolog of NCBI NO: 15236485 NR Description: major intrinsic protein (MIP) family [Arabidopsis
  misc_feature (1)..(214): Homolog of NCBI NO: 10799095 NR Description: aquaporin PIP1b2 [Brassica oleracea]

SEQ ID NO: 98277 - protein, 206 aa, Arabidopsis thaliana; identical to SEQ ID NO: 29007
  peptide (1)..(206): Ceres Seq. ID no. 13593020
  misc_feature (1)..(193): Pfam Name: Major intrinsic protein Pfam Description: Major intrinsic protein
  misc_feature (1)..(206): Homolog of NCBI NO: 18411332 NR Description: transmembrane protein (MIP family) [Arabidopsis >gi|535780|dbj|BAA05654.1| transmembrane protein [Arabidopsis >gi|20466718|gb|AAM20676.1| probable plasma membrane intrinsic
  misc_feature (1)..(206): Homolog of NCBI NO: 7441247 NR Description: probable plasma membrane intrinsic protein 1c - thaliana >gi|2252825|gb|AAB62824.1| Similar to transmembrane coded for by A. thaliana cDNA H37637; coded for by A. for by A.
  misc_feature (1)..(206): Homolog of NCBI NO: 2373401 NR Description: transmembrane protein [Arabidopsis thaliana]
  misc_feature (1)..(206): Homolog of NCBI NO: 15223438 NR Description: plasma membrane intrinsic protein 1c [Arabidopsis >gi|1175012|sp|Q08733|WC1C_ARATH Plasma membrane intrinsic
  misc_feature (1)..(206): Homolog of NCBI NO: 17065068 NR Description: plasma membrane intrinsic protein 1C protein B) [Arabidopsis thaliana] >gi|25083740|gb|AAN72112.1| membrane intrinsic protein 1C (transmembrane protein B)
  misc_feature (1)..(206): Homolog of NCBI NO: 472875 NR Description: plasma membrane intrinsic protein 1c [Arabidopsis
  misc_feature (1)..(206): Homolog of NCBI NO: 15233109 NR Description: plasma membrane intrinsic protein 1A [Arabidopsis >gi|21431895|sp|P43285|WC1A_ARATH Plasma membrane intrinsic
  misc_feature (1)..(206): Homolog of NCBI NO: 3551131 NR Description: plasma membrane aquaporin (PAQ1) [Raphanus
  misc_feature (1)..(206): Homolog of NCBI NO: 15236485 NR Description: major intrinsic protein (MIP) family [Arabidopsis
  misc_feature (1)..(206): Homolog of NCBI NO: 10799095 NR Description: aquaporin PIP1b2 [Brassica oleracea]

SEQ ID NO: 98278 - DNA, 1468 bp, Arabidopsis thaliana
  misc_feature (1)..(1468): Ceres Seq. ID no. 13593033
  misc_feature: MA Experiment ID: 20000306 Result: Up-regulated in Transcription
  misc_feature: MA Experiment 20000306 PARAMETER Experiment Name: At_Germinating_Seeds_Sub_P Parameter: Age (hr) Value: 6 vs. 0
  misc_feature: MA Experiment 20000306 PARAMETER Experiment Name: At_Germinating_Seeds_Sub_P Parameter: Organism Value: A. thaliana
  misc_feature: MA Experiment 20000306 PARAMETER Experiment Name: At_Germinating_Seeds_Sub_P Parameter: Plant Line Value: WS
  misc_feature: MA Experiment 20000306 PARAMETER Experiment Name: At_Germinating_Seeds_Sub_P Parameter: Tissue Value: Germinating Seeds
  misc_feature: MA Experiment ID: 20000307 Result: Up-regulated in Transcription
  misc_feature: MA Experiment 20000307 PARAMETER Experiment Name: At_Germinating_Seeds_Sub_P Parameter: Age (hr) Value: 24 vs. 0
  misc_feature: MA Experiment 20000307 PARAMETER Experiment Name: At_Germinating_Seeds_Sub_P Parameter: Organism Value: A. thaliana
  misc_feature: MA Experiment 20000307 PARAMETER Experiment Name: At_Germinating_Seeds_Sub_P Parameter: Plant Line Value: WS
  misc_feature: MA Experiment 20000307 PARAMETER Experiment Name: At_Germinating_Seeds_Sub_P Parameter: Tissue Value: Germinating Seeds
  misc_feature: MA Experiment ID: 20000314 Result: Up-regulated in Transcription
  misc_feature: MA Experiment 20000314 PARAMETER Experiment Name: At_14day_Shoots-Roots_Sub_P Parameter: Age (day) Value: 14
  misc_feature: MA Experiment 20000314 PARAMETER Experiment Name: At_14day_Shoots-Roots_Sub_P Parameter: Organism Value: A. thaliana
  misc_feature: MA Experiment 20000314 PARAMETER Experiment Name: At_14day_Shoots-Roots_Sub_P Parameter: Plant Line Value: WS
  misc_feature: MA Experiment 20000314 PARAMETER Experiment Name: At_14day_Shoots-Roots_Sub_P Parameter: Tissue Value: Roots vs. Whole Plant
aaacttttgtctctttttaactctcttaactttcgtttcttctcctaccttcttttaccaacctttcctttctcttacacacatatatatatacatatatagagagagagaagaggacaaagagttgaaagatgaagactctcatgtcttcatagaaacaagtgatatgtgcgctaagaaagaagaagaagaagaagaagaagaagacagttctgaagccatgaacaacatacaaaattaccaaaatgacctcttctttcaccaactcatctctcatcatcaccatcatcatcatgatccttctcaatctgaaactttgggagcatccggtaacgttggatctggtttcactatcttctctcaagattccgtctctccaatatggtctctacctccacctacctcgatccaaccaccatttgatcagtttcctcctccttcttcttctccagcatctttctacggaagtttcttcaacagaagtcgagctcatcatcagggattacagtttgggtacgagggttttggtggagccacgtcagcagcacatcatcatcatgaacaacttcggatcttgtcggaagctttaggtccggtagtacaagccgggtccggtccttttgggttacaagctgagttagggaagatgacagcacaagagatcatggacgctaaagctttggctgcttcaaagagtcatagtgaagctgagagaagaagaagagagagaatcaataatcatctcgctaagctccgtagcatattacccaacaccaccaaaacggataaagcgtcgttactagctgaagtgatccaacatgtgaaagagttgaagagagagacttcagtgatctcagagacaaatcttgtcccaacggaaagcgatgagttaacggtagctttcacggaggaggaagaaaccggagatggcagatttgtaattaaagcgtcgctttgctgtgaagacaggtcggatctcttgcctgacatgattaaaacattgaaagctatgcgtctcaaaacgctcaaggcggagataaccaccgttgggggacgagtcaagaacgttttgtttgttaccggagaagagagctccggtgaggaagtggaggaagagtactgtatagggacgattgaggaagctttgaaagcggtgatggagaagagcaatgtagaggaatcatcttcttctggaaatgctaagagacagagaatgagtagtcacaacactatcactatcgtcgaacaacaacaacaatataatcagaggtaatcaattttttacttaaatcgctttttttttcttactttcggtgtatctactacgtgtgttgtttgctggttatggaaatgaatgttgtacgtcacgttatactatagatatatgtgtgtttgtgtgtatgtataacggaagtatttgtatccgttgtggtcttggacttttggtttggttctaagatacttattt

SEQ ID NO: 98279 - protein, 423 aa, Arabidopsis thaliana
  peptide (1)..(423): Ceres Seq. ID no. 13593034
  misc_feature (229)..(278): Pfam Name: Helix-loop-helix DNA-binding domain Pfam Description: Helix-loop-helix DNA-binding domain
  misc_feature (56)..(423): Homolog of NCBI NO: 18409132 NR Description: bHLH protein family [Arabidopsis thaliana]
  misc_feature (116)..(373): Homolog of NCBI NO: 15230869 NR Description: bHLH protein family [Arabidopsis thaliana]
  misc_feature (213)..(408): Homolog of NCBI NO: 15226839 NR Description: bHLH protein family [Arabidopsis thaliana]
  misc_feature (213)..(408): Homolog of NCBI NO: 18491261 NR Description: At2g41130/T3K9.10 [Arabidopsis thaliana]
  misc_feature (221)..(408): Homolog of NCBI NO: 15229004 NR Description: bHLH protein family [Arabidopsis thaliana]
  misc_feature (197)..(411): Homolog of NCBI NO: 34896028 NR Description: ESTs C26093(C11622),AU090634(C12429) correspond a region of the predicted gene.~Similar to Arabidopsis thaliana II BAC T3K9; hypothetical protein (AC004261) [Oryza sativa
  misc_feature (167)..(407): Homolog of NCBI NO: 34904034 NR Description: P0665D10.15 [Oryza sativa (japonica
  misc_feature (225)..(408): Homolog of NCBI NO: 15225658 NR Description: bHLH protein family [Arabidopsis thaliana]
  misc_feature (223)..(399): Homolog of NCBI NO: 33111975 NR Description: putative bHLH131 transcription factor
  misc_feature (223)..(399): Homolog of NCBI NO: 15233658 NR Description: bHLH protein family [Arabidopsis thaliana]
NFCLFLTLLTFVSSPTFFYQPFLSLTHIYIYIYREREEDKELKDEDSHVFIETSDMCAKKEEEEEEEEDSSEAMNNIQNYQNDLFFHQLISHHHHHHHDPSQSETLGASGNVGSGFTIFSQDSVSPIWSLPPPTSIQPPFDQFPPPSSSPASFYGSFFNRSRAHHQGLQFGYEGFGGATSAAHHHHEQLRILSEALGPVVQAGSGPFGLQAELGKMTAQEIMDAKALAASKSHSEAERRRRERINNHLAKLRSILPNTTKTDKASLLAEVIQHVKELKRETSVISETNLVPTESDELTVAFTEEEETGDGRFVIKASLCCEDRSDLLPDMIKTLKAMRLKTLKAEITTVGGRVKNVLFVTGEESSGEEVEEEYCIGTIEEALKAVMEKSNVEESSSSGNAKRQRMSSHNTITIVEQQQQYNQR

SEQ ID NO: 98280 - protein, 368 aa, Arabidopsis thaliana
  peptide (1)..(368): Ceres Seq. ID no. 13593035
  misc_feature (174)..(223): Pfam Name: Helix-loop-helix DNA-binding domain Pfam Description: Helix-loop-helix DNA-binding domain
  misc_feature (1)..(368): Homolog of NCBI NO: 18409132 NR Description: bHLH protein family [Arabidopsis thaliana]
  misc_feature (61)..(318): Homolog of NCBI NO: 15230869 NR Description: bHLH protein family [Arabidopsis thaliana]
  misc_feature (158)..(353): Homolog of NCBI NO: 15226839 NR Description: bHLH protein family [Arabidopsis thaliana]
  misc_feature (158)..(353): Homolog of NCBI NO: 18491261 NR Description: At2g41130/T3K9.10 [Arabidopsis thaliana]
  misc_feature (166)..(353): Homolog of NCBI NO: 15229004 NR Description: bHLH protein family [Arabidopsis thaliana]
  misc_feature (142)..(356): Homolog of NCBI NO: 34896028 NR Description: ESTs C26093(C11622),AU090634(C12429) correspond a region of the predicted gene.~Similar to Arabidopsis thaliana II BAC T3K9; hypothetical protein (AC004261) [Oryza sativa
  misc_feature (112)..(352): Homolog of NCBI NO: 34904034 NR Description: P0665D10.15 [Oryza sativa (japonica
  misc_feature (170)..(353): Homolog of NCBI NO: 15225658 NR Description: bHLH protein family [Arabidopsis thaliana]
  misc_feature (168)..(344): Homolog of NCBI NO: 33111975 NR Description: putative bHLH131 transcription factor
  misc_feature (168)..(344): Homolog of NCBI NO: 15233658 NR Description: bHLH protein family [Arabidopsis thaliana]
MCAKKEEEEEEEEDSSEAMNNIQNYQNDLFFHQLISHHHHHHHDPSQSETLGASGNVGSGFTIFSQDSVSPIWSLPPPTSIQPPFDQFPPPSSSPASFYGSFFNRSRAHHQGLQFGYEGFGGATSAAHHHHEQLRILSEALGPVVQAGSGPFGLQAELGKMTAQEIMDAKALAASKSHSEAERRRRERINNHLAKLRSILPNTTKTDKASLLAEVIQHVKELKRETSVISETNLVPTESDELTVAFTEEEETGDGRFVIKASLCCEDRSDLLPDMIKTLKAMRLKTLKAEITTVGGRVKNVLFVTGEESSGEEVEEEYCIGTIEEALKAVMEKSNVEESSSSGNAKRQRMSSHNTITIVEQQQQYNQR

SEQ ID NO: 98281 - protein, 350 aa, Arabidopsis thaliana
  peptide (1)..(350): Ceres Seq. ID no. 13593036
  misc_feature (156)..(205): Pfam Name: Helix-loop-helix DNA-binding domain Pfam Description: Helix-loop-helix DNA-binding domain
  misc_feature (1)..(350): Homolog of NCBI NO: 18409132 NR Description: bHLH protein family [Arabidopsis thaliana]
  misc_feature (43)..(300): Homolog of NCBI NO: 15230869 NR Description: bHLH protein family [Arabidopsis thaliana]
  misc_feature (140)..(335): Homolog of NCBI NO: 15226839 NR Description: bHLH protein family [Arabidopsis thaliana]
  misc_feature (140)..(335): Homolog of NCBI NO: 18491261 NR Description: At2g41130/T3K9.10 [Arabidopsis thaliana]
  misc_feature (148)..(335): Homolog of NCBI NO: 15229004 NR Description: bHLH protein family [Arabidopsis thaliana]
  misc_feature (124)..(338): Homolog of NCBI NO: 34896028 NR Description: ESTs C26093(C11622),AU090634(C12429) correspond a region of the predicted gene.~Similar to Arabidopsis thaliana II BAC T3K9; hypothetical protein (AC004261) [Oryza sativa
  misc_feature (94)..(334): Homolog of NCBI NO: 34904034 NR Description: P0665D10.15 [Oryza sativa (japonica
  misc_feature (152)..(335): Homolog of NCBI NO: 15225658 NR Description: bHLH protein family [Arabidopsis thaliana]
  misc_feature (150)..(326): Homolog of NCBI NO: 33111975 NR Description: putative bHLH131 transcription factor
  misc_feature (150)..(326): Homolog of NCBI NO: 15233658 NR Description: bHLH protein family [Arabidopsis thaliana]
MNNIQNYQNDLFFHQLISHHHHHHHDPSQSETLGASGNVGSGFTIFSQDSVSPIWSLPPPTSIQPPFDQFPPPSSSPASFYGSFFNRSRAHHQGLQFGYEGFGGATSAAHHHHEQLRILSEALGPVVQAGSGPFGLQAELGKMTAQEIMDAKALAASKSHSEAERRRRERINNHLAKLRSILPNTTKTDKASLLAEVIQHVKELKRETSVISETNLVPTESDELTVAFTEEEETGDGRFVIKASLCCEDRSDLLPDMIKTLKAMRLKTLKAEITTVGGRVKNVLFVTGEESSGEEVEEEYCIGTIEEALKAVMEKSNVEESSSSGNAKRQRMSSHNTITIVEQQQQYNQR

SEQ ID NO: 98282 - DNA, 1272 bp, Arabidopsis thaliana
  misc_feature (1)..(1272): Ceres Seq. ID no. 13593041
  misc_feature: MA Experiment ID: 20000184 Result: Down-regulated in Transcription
  misc_feature: MA Experiment 20000184 PARAMETER Experiment Name: At_Shoots__P Parameter: Age (day) Value: 7
  misc_feature: MA Experiment 20000184 PARAMETER Experiment Name: At_Shoots__P Parameter: Tissue Value: Shoots vs. Whole Plant
  misc_feature: MA Experiment ID: 20001248 Result: Up-regulated in Transcription
  misc_feature: MA Experiment 20001248 PARAMETER Experiment Name: At_Far-red-induction_P Parameter: Age (day) Value: 7
  misc_feature: MA Experiment 20001248 PARAMETER Experiment Name: At_Far-red-induction_P Parameter: Light Value: Far-red vs. White
  misc_feature: MA Experiment 20001248 PARAMETER Experiment Name: At_Far-red-induction_P Parameter: Organism Value: A. thaliana
  misc_feature: MA Experiment 20001248 PARAMETER Experiment Name: At_Far-red-induction_P Parameter: Plant Line Value: Columbia
  misc_feature: MA Experiment 20001248 PARAMETER Experiment Name: At_Far-red-induction_P Parameter: Timepoint (hr) Value: 4
  misc_feature: MA Experiment 20001248 PARAMETER Experiment Name: At_Far-red-induction_P Parameter: Tissue Value: Whole Plant
  misc_feature: MA Experiment ID: 20001451 Result: Up-regulated in Transcription
  misc_feature: MA Experiment 20001451 PARAMETER Experiment Name: At_Far-red-induction_P Parameter: Age (day) Value: 7
  misc_feature: MA Experiment 20001451 PARAMETER Experiment Name: At_Far-red-induction_P Parameter: Light Value: Far-red vs. White
  misc_feature: MA Experiment 20001451 PARAMETER Experiment Name: At_Far-red-induction_P Parameter: Organism Value: A. thaliana
  misc_feature: MA Experiment 20001451 PARAMETER Experiment Name: At_Far-red-induction_P Parameter: Plant Line Value: Columbia
  misc_feature: MA Experiment 20001451 PARAMETER Experiment Name: At_Far-red-induction_P Parameter: Timepoint (hr) Value: 24
  misc_feature: MA Experiment 20001451 PARAMETER Experiment Name: At_Far-red-induction_P Parameter: Tissue Value: Whole Plant
gaagaagcaaaaccctagagctcaaggtaatcgccgtcgatttctcaatctctcaccggcgattacatgccgatgaaagttgtacaatagctgctgtaagagagagatttatcaggtatttttagaatcatgtatagagacagaggaacggtgaattcgagacctgaagttgtggatcgtaaacggatcaacgacgctcttgaacgtccttctccttcaacctctcgtcaagttaacggcaaaggcaaaggaaccgttacggcggcgacgacgacggcgaacttgattgggaagcagcagtcgaataacatcaaccatagagattctcgttctgcttctctctcgaagaacaatacggtttctgatgatgaatcagacacagatagtgaagaatcagatgtgagtggttctgatggagaggacacttcatggatatcttggttttgtaatctaagaggaaacgagttcttttgtgaagttgatgatgattacattcaagatgacttcaacttgtgtggactcagcagtctagttccctactacgagtacgctcttgatttgattttggatgttgaatcttctcaaggagagatgtttacagaggaacagaatgaattgatcgagtcagcagctgagatgttgtatggactgattcatgctcgttacatattgactagcaaaggattggcagcaatgttagacaaatacaaaaactatgactttggaagatgtccaagagtttattgctgtggccaaccttgtcttccggttggtcaatcagacttaccgcgatctagcactgtgaagatatattgcccgaaatgcgaagacatttattacccacgatcaaagtatcaaggcaacattgatggagcttactttgggacaacgtttccacatctgttcctgatgacttatgggcatctcaagccagcgaaggcaacacaaaactatgttcaaagagtgtttgggttcaaattacacaaaccgtgaaggaagtttgacgacaaaacccaaggatcaagatcatggcgttggaatggaactgagaaaagaagagacgtgtgtgaacagaaacggaaaataaaacgcactgtaatcacacgaatggtgaagagagcattcatgtctctatttgtcttcaggtacatacacattagaagaaagcaaaagcatggttagaaagaaaaaaaacacgaaaatcttttaatgagtttgttaaacttgaacatgtatttttctaccttctgtaaacttttttattttgtttct

SEQ ID NO: 98283 - protein, 287 aa, Arabidopsis thaliana; identical to SEQ ID NO: 76582
  peptide (1)..(287): Ceres Seq. ID no. 13593042
  misc_feature (97)..(275): Pfam Name: Casein kinase II regulatory subunit Pfam Description: Casein kinase II regulatory subunit
  misc_feature (1)..(287): Homolog of NCBI NO: 15238013 NR Description: casein kinase II beta chain, putative thaliana] >gi|729880|sp|P40228|KC2B_ARATH Casein kinase II beta
  misc_feature (1)..(287): Homolog of NCBI NO: 15236597 NR Description: casein kinase II beta chain, putative thaliana] >gi|729882|sp|P40229|KC2C_ARATH Casein kinase II beta'
  misc_feature (1)..(286): Homolog of NCBI NO: 21261784 NR Description: protein kinase Ck2 regulatory subunit 2
  misc_feature (1)..(287): Homolog of NCBI NO: 11527004 NR Description: protein kinase CK2 regulatory subunit CK2B3 [Zea
  misc_feature (2)..(286): Homolog of NCBI NO: 37536920 NR Description: putative casein kinase II beta subunit [Oryza
  misc_feature (15)..(287): Homolog of NCBI NO: 34901776 NR Description: OJ1058_B11.17 [Oryza sativa (japonica >gi|29243371|dbj|BAC66224.1| putative protein kinase CK2
  misc_feature (68)..(287): Homolog of NCBI NO: 29367573 NR Description: possible protein kinase CK2 regulatory subunit
  misc_feature (1)..(287): Homolog of NCBI NO: 11527000 NR Description: protein kinase CK2 regulatory subunit CK2B1 [Zea
  misc_feature (1)..(285): Homolog of NCBI NO: 15224934 NR Description: casein kinase II beta chain, putative
  misc_feature (15)..(287): Homolog of NCBI NO: 11527002 NR Description: protein kinase CK2 regulatory subunit CK2B2 [Zea

SEQ ID NO: 98284 - DNA, 1779 bp, Arabidopsis thaliana
  misc_feature (1)..(1779): Ceres Seq. ID no. 13593043
  misc_feature: MA Experiment ID: 20001450 Result: Up-regulated in Transcription
  misc_feature: MA Experiment 20001450 PARAMETER Experiment Name: At_Far-red-induction_P Parameter: Age (day) Value: 7
  misc_feature: MA Experiment 20001450 PARAMETER Experiment Name: At_Far-red-induction_P Parameter: Light Value: Far-red vs. White
  misc_feature: MA Experiment 20001450 PARAMETER Experiment Name: At_Far-red-induction_P Parameter: Organism Value: A. thaliana
  misc_feature: MA Experiment 20001450 PARAMETER Experiment Name: At_Far-red-induction_P Parameter: Plant Line Value: Columbia
  misc_feature: MA Experiment 20001450 PARAMETER Experiment Name: At_Far-red-induction_P Parameter: Timepoint (hr) Value: 8
  misc_feature: MA Experiment 20001450 PARAMETER Experiment Name: At_Far-red-induction_P Parameter: Tissue Value: Whole Plant
atgtcatcggagattgaggtggtggaagaaatccaatcgaatcccaaggagaatggggaatcgagttctaaagggattgaagaagagagcttgaagaacgatgtctatactgctgccgcttatggtgatttggagaagcttcatagattggttgagtgtgagggttcctctgtttccgagcctgatgctcttggctactatgctcttcagtggtctgccttgaacaaccgcgtcgccgttgcccagtaccttatcgagcatggtggagatgtaaacgcgacggatcatactggacagactgcattgcattggagtgctgttcgtggtgcgatacaagttgcagaactgttattacaagagggtgcaagagtagatgcaacggatatgtatggctatcaggcaacacatgttgccgcacagtatggccagactgcttttctttgtcacgttgtctcaaagtggaatgctgatcctgacgtgcctgataatgatggaagaagccccttgcattgggctgcatataaaggttttgcagattccattcgcctacttttatttctagatgcatatagaggacgacaagacaaagaaggttgcactcctctgcattgggctgccatccgaggtaatttggaggcttgcactgtcttggtgcaggctggaaagaaagaggatttgatgattactgacaagactgggctaacccctgcgcaacttgctgctgaaaagaatcacagacaatcccctcggaagattgtcaaagttgggactcgctccagttctttggatcatgatcctgctgcttctgctccatccaatctgccaaagttaacgactgggattggtgcgcttgcatggctgggattcattcttgcaactgcaggattatttttgttctaccgctgtagcaggaaggatccaggttacatcagaatgaatatccatgatccgcaaaccatgaaagatgatgaaccactcttaaaaatagagctaaacaatcctgctttgcttgctgggaattggacacagctctgtgcaacatgcaagattatcagacctcttcgagctaagcactgttccacctgtgatcgttgtgtagagcaatttgatcaccattgtccttgggtatcaaattgtgttggaaaaaaaaacaagtgggaattttttctttttcttctacttgaagttctagcgatgctgataactggtggcgtcactcttgcaagagtcttgagtgacccttcagctccatcttcttttggagcatggatgagccatgtcgctagtaatcatgtgggtgctttatcctttctgctagtggaattctgcctcttcttttctgtcgccgtcttaacagtcatacaagcgtcacaaatatcaaggaacataaccacaaatgaaatggccaacgccctgcggtacagctacctaagaggtccaggtggtcggtttaggaatccttatgatctcgggtgcagaagaaactgctcggacttcttagtaaaaggttataacgaagatattgagtgtcatgaagaagacgcaacacagagaccagagggtattagcatgatgcagatgcagcggaatccaaatcttcaaaatggcaatggccatgttgctatcgatgttaacccgacacataattcacagtcagcacatgttcattctgccaactgcagccatagccataatagtaagtcaaagagtgacaatgttcctttgggtttgggacttggtcttagccgcaacccaacccgacctgttgtatctccataa

SEQ ID NO: 98285 - protein, 592 aa, Arabidopsis thaliana
  peptide (1)..(592): Ceres Seq. ID no. 13593044
  misc_feature (345)..(393): Pfam Name: DHHC zinc finger domain Pfam Description: DHHC zinc finger domain
  misc_feature (277)..(570): Homolog of NCBI NO: 40644806 NR Description: hypothetical protein KIAA0946 [Triticum aestivum]
  misc_feature (33)..(250): Homolog of NCBI NO: 24583835 NR Description: CG6618-PA [Drosophila melanogaster]
  misc_feature (289)..(501): Homolog of NCBI NO: 24583835 NR Description: CG6618-PA [Drosophila melanogaster]
  misc_feature (34)..(251): Homolog of NCBI NO: 29791906 NR Description: Unknown (protein for MGC:48450) [Homo sapiens]
  misc_feature (287)..(499): Homolog of NCBI NO: 29791906 NR Description: Unknown (protein for MGC:48450) [Homo sapiens]
  misc_feature (34)..(251): Homolog of NCBI NO: 4589536 NR Description: KIAA0946 protein [Homo sapiens]
  misc_feature (287)..(499): Homolog of NCBI NO: 4589536 NR Description: KIAA0946 protein [Homo sapiens]
  misc_feature (34)..(251): Homolog of NCBI NO: 27369784 NR Description: RIKEN cDNA A230053P19 [Mus musculus]
  misc_feature (287)..(499): Homolog of NCBI NO: 27369784 NR Description: RIKEN cDNA A230053P19 [Mus musculus]
  misc_feature (289)..(500): Homolog of NCBI NO: 21357959 NR Description: CG6017-PA [Drosophila melanogaster]
MSSEIEVVEEIQSNPKENGESSSKGIEEESLKNDVYTAAAYGDLEKLHRLVECEGSSVSEPDALGYYALQWSALNNRVAVAQYLIEHGGDVNATDHTGQTALHWSAVRGAIQVAELLLQEGARVDATDMYGYQATHVAAQYGQTAFLCHVVSKWNADPDVPDNDGRSPLHWAAYKGFADSIRLLLFLDAYRGRQDKEGCTPLHWAAIRGNLEACTVLVQAGKKEDLMITDKTGLTPAQLAAEKNHRQSPRKIVKVGTRSSSLDHDPAASAPSNLPKLTTGIGALAWLGFILATAGLFLFYRCSRKDPGYIRMNIHDPQTMKDDEPLLKIELNNPALLAGNWTQLCATCKIIRPLRAKHCSTCDRCVEQFDHHCPWVSNCVGKKNKWEFFLFLLLEVLAMLITGGVTLARVLSDPSAPSSFGAWMSHVASNHVGALSFLLVEFCLFFSVAVLTVIQASQISRNITTNEMANALRYSYLRGPGGRFRNPYDLGCRRNCSDFLVKGYNEDIECHEEDATQRPEGISMMQMQRNPNLQNGNGHVAIDVNPTHNSQSAHVHSANCSHSHNSKSKSDNVPLGLGLGLSRNPTRPVVSP

SEQ ID NO: 98286 - protein, 464 aa, Arabidopsis thaliana
  peptide (1)..(464): Ceres Seq. ID no. 13593045
  misc_feature (217)..(265): Pfam Name: DHHC zinc finger domain Pfam Description: DHHC zinc finger domain
  misc_feature (149)..(442): Homolog of NCBI NO: 40644806 NR Description: hypothetical protein KIAA0946 [Triticum aestivum]
  misc_feature (1)..(122): Homolog of NCBI NO: 24583835 NR Description: CG6618-PA [Drosophila melanogaster]
  misc_feature (161)..(373): Homolog of NCBI NO: 24583835 NR Description: CG6618-PA [Drosophila melanogaster]
  misc_feature (1)..(123): Homolog of NCBI NO: 29791906 NR Description: Unknown (protein for MGC:48450) [Homo sapiens]
  misc_feature (159)..(371): Homolog of NCBI NO: 29791906 NR Description: Unknown (protein for MGC:48450) [Homo sapiens]
  misc_feature (1)..(123): Homolog of NCBI NO: 4589536 NR Description: KIAA0946 protein [Homo sapiens]
  misc_feature (159)..(371): Homolog of NCBI NO: 4589536 NR Description: KIAA0946 protein [Homo sapiens]
  misc_feature (1)..(123): Homolog of NCBI NO: 27369784 NR Description: RIKEN cDNA A230053P19 [Mus musculus]
  misc_feature (159)..(371): Homolog of NCBI NO: 27369784 NR Description: RIKEN cDNA A230053P19 [Mus musculus]
  misc_feature (161)..(372): Homolog of NCBI NO: 21357959 NR Description: CG6017-PA [Drosophila melanogaster]
MYGYQATHVAAQYGQTAFLCHVVSKWNADPDVPDNDGRSPLHWAAYKGFADSIRLLLFLDAYRGRQDKEGCTPLHWAAIRGNLEACTVLVQAGKKEDLMITDKTGLTPAQLAAEKNHRQSPRKIVKVGTRSSSLDHDPAASAPSNLPKLTTGIGALAWLGFILATAGLFLFYRCSRKDPGYIRMNIHDPQTMKDDEPLLKIELNNPALLAGNWTQLCATCKIIRPLRAKHCSTCDRCVEQFDHHCPWVSNCVGKKNKWEFFLFLLLEVLAMLITGGVTLARVLSDPSAPSSFGAWMSHVASNHVGALSFLLVEFCLFFSVAVLTVIQASQISRNITTNEMANALRYSYLRGPGGRFRNPYDLGCRRNCSDFLVKGYNEDIECHEEDATQRPEGISMMQMQRNPNLQNGNGHVAIDVNPTHNSQSAHVHSANCSHSHNSKSKSDNVPLGLGLGLSRNPTRPVVSP

SEQ ID NO: 98287 - protein, 366 aa, Arabidopsis thaliana
  peptide (1)..(366): Ceres Seq. ID no. 13593046
  misc_feature (119)..(167): Pfam Name: DHHC zinc finger domain Pfam Description: DHHC zinc finger domain
  misc_feature (51)..(344): Homolog of NCBI NO: 40644806 NR Description: hypothetical protein KIAA0946 [Triticum aestivum]
  misc_feature (1)..(24): Homolog of NCBI NO: 24583835 NR Description: CG6618-PA [Drosophila melanogaster]
  misc_feature (63)..(275): Homolog of NCBI NO: 24583835 NR Description: CG6618-PA [Drosophila melanogaster]
  misc_feature (1)..(25): Homolog of NCBI NO: 29791906 NR Description: Unknown (protein for MGC:48450) [Homo sapiens]
  misc_feature (61)..(273): Homolog of NCBI NO: 29791906 NR Description: Unknown (protein for MGC:48450) [Homo sapiens]
  misc_feature (1)..(25): Homolog of NCBI NO: 4589536 NR Description: KIAA0946 protein [Homo sapiens]
  misc_feature (61)..(273): Homolog of NCBI NO: 4589536 NR Description: KIAA0946 protein [Homo sapiens]
  misc_feature (1)..(25): Homolog of NCBI NO: 27369784 NR Description: RIKEN cDNA A230053P19 [Mus musculus]
  misc_feature (61)..(273): Homolog of NCBI NO: 27369784 NR Description: RIKEN cDNA A230053P19 [Mus musculus]
  misc_feature (63)..(274): Homolog of NCBI NO: 21357959 NR Description: CG6017-PA [Drosophila melanogaster]
MITDKTGLTPAQLAAEKNHRQSPRKIVKVGTRSSSLDHDPAASAPSNLPKLTTGIGALAWLGFILATAGLFLFYRCSRKDPGYIRMNIHDPQTMKDDEPLLKIELNNPALLAGNWTQLCATCKIIRPLRAKHCSTCDRCVEQFDHHCPWVSNCVGKKNKWEFFLFLLLEVLAMLITGGVTLARVLSDPSAPSSFGAWMSHVASNHVGALSFLLVEFCLFFSVAVLTVIQASQISRNITTNEMANALRYSYLRGPGGRFRNPYDLGCRRNCSDFLVKGYNEDIECHEEDATQRPEGISMMQMQRNPNLQNGNGHVAIDVNPTHNSQSAHVHSANCSHSHNSKSKSDNVPLGLGLGLSRNPTRPVVSP

SEQ ID NO: 98288 - DNA, 1627 bp, Arabidopsis thaliana
  misc_feature (1)..(1627): Ceres Seq. ID no. 13593066
  misc_feature: MA Experiment ID: 20000166 Result: Up-regulated in Transcription
  misc_feature: MA Experiment 20000166 PARAMETER Experiment Name: At_100uM_ABA_P Parameter: Age (day) Value: 14
  misc_feature: MA Experiment 20000166 PARAMETER Experiment Name: At_100uM_ABA_P Parameter: Organism Value: A. thaliana
  misc_feature: MA Experiment 20000166 PARAMETER Experiment Name: At_100uM_ABA_P Parameter: Plant Line Value: WS
  misc_feature: MA Experiment 20000166 PARAMETER Experiment Name: At_100uM_ABA_P Parameter: Timepoint (hr) Value: 1
  misc_feature: MA Experiment 20000166 PARAMETER Experiment Name: At_100uM_ABA_P Parameter: Tissue Value: Aerial
  misc_feature: MA Experiment 20000166 PARAMETER Experiment Name: At_100uM_ABA_P Parameter: Treatment Value: 100uM ABA vs. No Treatment
  misc_feature: MA Experiment ID: 20000169 Result: Up-regulated in Transcription
  misc_feature: MA Experiment 20000169 PARAMETER Experiment Name: At_100uM_ABA_P Parameter: Age (day) Value: 14
  misc_feature: MA Experiment 20000169 PARAMETER Experiment Name: At_100uM_ABA_P Parameter: Organism Value: A. thaliana
  misc_feature: MA Experiment 20000169 PARAMETER Experiment Name: At_100uM_ABA_P Parameter: Plant Line Value: WS
  misc_feature: MA Experiment 20000169 PARAMETER Experiment Name: At_100uM_ABA_P Parameter: Timepoint (hr) Value: 6
  misc_feature: MA Experiment 20000169 PARAMETER Experiment Name: At_100uM_ABA_P Parameter: Tissue Value: Aerial
  misc_feature: MA Experiment 20000169 PARAMETER Experiment Name: At_100uM_ABA_P Parameter: Treatment Value: 100uM ABA vs. No Treatment
  misc_feature: MA Experiment ID: 20000182 Result: Up-regulated in Transcription
  misc_feature: MA Experiment 20000182 PARAMETER Experiment Name: At_2mM_SA_P Parameter: Age (day) Value: 14
  misc_feature: MA Experiment 20000182 PARAMETER Experiment Name: At_2mM_SA_P Parameter: Organism Value: A. thaliana
  misc_feature: MA Experiment 20000182 PARAMETER Experiment Name: At_2mM_SA_P Parameter: Plant Line Value: WS
  misc_feature: MA Experiment 20000182 PARAMETER Experiment Name: At_2mM_SA_P Parameter: Timepoint (hr) Value: 6
  misc_feature: MA Experiment 20000182 PARAMETER Experiment Name: At_2mM_SA_P Parameter: Tissue Value: Aerial
  misc_feature: MA Experiment 20000182 PARAMETER Experiment Name: At_2mM_SA_P Parameter: Treatment Value: 2mM SA vs. No Treatment
  misc_feature: MA Experiment ID: 20000264 Result: Down-regulated in Transcription
  misc_feature: MA Experiment 20000264 PARAMETER Experiment Name: At_Open_Flower_P Parameter: Age (day) Value: 21
  misc_feature: MA Experiment 20000264 PARAMETER Experiment Name: At_Open_Flower_P Parameter: Plant Line Value: WS
  misc_feature: MA Experiment 20000264 PARAMETER Experiment Name: At_Open_Flower_P Parameter: Tissue Value: Open Flower vs. Whole Plant
  misc_feature: MA Experiment ID: 20000267 Result: Up-regulated in Transcription
  misc_feature: MA Experiment 20000267 PARAMETER Experiment Name: At_Drought_P Parameter: Age (day) Value: 7
  misc_feature: MA Experiment 20000267 PARAMETER Experiment Name: At_Drought_P Parameter: Organism Value: A. thaliana
  misc_feature: MA Experiment 20000267 PARAMETER Experiment Name: At_Drought_P Parameter: Plant Line Value: WS
  misc_feature: MA Experiment 20000267 PARAMETER Experiment Name: At_Drought_P Parameter: Timepoint (hr) Value: 6
  misc_feature: MA Experiment 20000267 PARAMETER Experiment Name: At_Drought_P Parameter: Tissue Value: Whole Plant
  misc_feature: MA Experiment 20000267 PARAMETER Experiment Name: At_Drought_P Parameter: Treatment Value: Drought vs. No Drought
  misc_feature: MA Experiment ID: 20000268 Result: Up-regulated in Transcription
  misc_feature: MA Experiment 20000268 PARAMETER Experiment Name: At_100mM_NaCl__P Parameter: Age (day) Value: 14
  misc_feature: MA Experiment 20000268 PARAMETER Experiment Name: At_100mM_NaCl__P Parameter: Organism Value: A. thaliana
  misc_feature: MA Experiment 20000268 PARAMETER Experiment Name: At_100mM_NaCl__P Parameter: Plant Line Value: WS
  misc_feature: MA Experiment 20000268 PARAMETER Experiment Name: At_100mM_NaCl__P Parameter: Timepoint (hr) Value: 6
  misc_feature: MA Experiment 20000268 PARAMETER Experiment Name: At_100mM_NaCl__P Parameter: Tissue Value: Whole Plant
  misc_feature: MA Experiment 20000268 PARAMETER Experiment Name: At_100mM_NaCl__P Parameter: Treatment Value: 100mM NaCl vs. No Treatment
  misc_feature: MA Experiment ID: 20000436 Result: Up-regulated in Transcription
  misc_feature: MA Experiment 20000436 PARAMETER Experiment Name: At_Drought_P Parameter: Age (day) Value: 7
  misc_feature: MA Experiment 20000436 PARAMETER Experiment Name: At_Drought_P Parameter: Organism Value: A. thaliana
  misc_feature: MA Experiment 20000436 PARAMETER Experiment Name: At_Drought_P Parameter: Plant Line Value: WS
  misc_feature: MA Experiment 20000436 PARAMETER Experiment Name: At_Drought_P Parameter: Timepoint (hr) Value: 12
  misc_feature: MA Experiment 20000436 PARAMETER Experiment Name: At_Drought_P Parameter: Tissue Value: Whole Plant
  misc_feature: MA Experiment 20000436 PARAMETER Experiment Name: At_Drought_P Parameter: Treatment Value: Drought vs. No Drought
  misc_feature: MA Experiment ID: 20000437 Result: Up-regulated in Transcription
  misc_feature: MA Experiment 20000437 PARAMETER Experiment Name: At_Drought_P Parameter: Age (day) Value: 8
  misc_feature: MA Experiment 20000437 PARAMETER Experiment Name: At_Drought_P Parameter: Organism Value: A. thaliana
  misc_feature: MA Experiment 20000437 PARAMETER Experiment Name: At_Drought_P Parameter: Plant Line Value: WS
  misc_feature: MA Experiment 20000437 PARAMETER Experiment Name: At_Drought_P Parameter: Timepoint (hr) Value: 24
  misc_feature: MA Experiment 20000437 PARAMETER Experiment Name: At_Drought_P Parameter: Tissue Value: Whole Plant
  misc_feature: MA Experiment 20000437 PARAMETER Experiment Name: At_Drought_P Parameter: Treatment Value: Drought vs. No Drought
  misc_feature: MA Experiment ID: 20000438 Result: Down-regulated in Transcription
  misc_feature: MA Experiment 20000438 PARAMETER Experiment Name: At_Shoots__P Parameter: Age (day) Value: 14
  misc_feature: MA Experiment 20000438 PARAMETER Experiment Name: At_Shoots__P Parameter: Tissue Value: Shoots vs. Whole Plant
  misc_feature: MA Experiment ID: 20000453 Result: Up-regulated in Transcription
  misc_feature: MA Experiment 20000453 PARAMETER Experiment Name: At_100uM_ABA_P Parameter: Age (day) Value: 15
  misc_feature: MA Experiment 20000453 PARAMETER Experiment Name: At_100uM_ABA_P Parameter: Organism Value: A. thaliana
  misc_feature: MA Experiment 20000453 PARAMETER Experiment Name: At_100uM_ABA_P Parameter: Plant Line Value: WS
  misc_feature: MA Experiment 20000453 PARAMETER Experiment Name: At_100uM_ABA_P Parameter: Timepoint (hr) Value: 24
  misc_feature: MA Experiment 20000453 PARAMETER Experiment Name: At_100uM_ABA_P Parameter: Tissue Value: Aerial
  misc_feature: MA Experiment 20000453 PARAMETER Experiment Name: At_100uM_ABA_P Parameter: Treatment Value: 100uM ABA vs. No Treatment
  misc_feature: MA Experiment ID: 20000455 Result: Up-regulated in Transcription
  misc_feature: MA Experiment 20000455 PARAMETER Experiment Name: At_100uM_ABA_P Parameter: Age (day) Value: 16
  misc_feature: MA Experiment 20000455 PARAMETER Experiment Name: At_100uM_ABA_P Parameter: Organism Value: A. thaliana
  misc_feature: MA Experiment 20000455 PARAMETER Experiment Name: At_100uM_ABA_P Parameter: Plant Line Value: WS
  misc_feature: MA Experiment 20000455 PARAMETER Experiment Name: At_100uM_ABA_P Parameter: Timepoint (hr) Value: 48
  misc_feature: MA Experiment 20000455 PARAMETER Experiment Name: At_100uM_ABA_P Parameter: Tissue Value: Aerial
  misc_feature: MA Experiment 20000455 PARAMETER Experiment Name: At_100uM_ABA_P Parameter: Treatment Value: 100uM ABA vs. No Treatment
  misc_feature: MA Experiment ID: 20000576 Result: Up-regulated in Transcription
  misc_feature: MA Experiment 20000576 PARAMETER Experiment Name: At_100uM_ABA_Mutants__P Parameter: Organism Value: A. thaliana
  misc_feature: MA Experiment 20000576 PARAMETER Experiment Name: At_100uM_ABA_Mutants__P Parameter: Plant Line Value: CS23
  misc_feature: MA Experiment 20000576 PARAMETER Experiment Name: At_100uM_ABA_Mutants__P Parameter: Timepoint (hr) Value: 6
  misc_feature: MA Experiment 20000576 PARAMETER Experiment Name: At_100uM_ABA_Mutants__P Parameter: Tissue Value: Whole Plant
  misc_feature: MA Experiment 20000576 PARAMETER Experiment Name: At_100uM_ABA_Mutants__P Parameter: Treatment Value: 1uM ABA vs. No Treatment
  misc_feature: MA Experiment ID: 20001451 Result: Up-regulated in Transcription
  misc_feature: MA Experiment 20001451 PARAMETER Experiment Name: At_Far-red-induction_P Parameter: Age (day) Value: 7
  misc_feature: MA Experiment 20001451 PARAMETER Experiment Name: At_Far-red-induction_P Parameter: Light Value: Far-red vs. White
  misc_feature: MA Experiment 20001451 PARAMETER Experiment Name: At_Far-red-induction_P Parameter: Organism Value: A. thaliana
  misc_feature: MA Experiment 20001451 PARAMETER Experiment Name: At_Far-red-induction_P Parameter: Plant Line Value: Columbia
  misc_feature: MA Experiment 20001451 PARAMETER Experiment Name: At_Far-red-induction_P Parameter: Timepoint (hr) Value: 24
  misc_feature: MA Experiment 20001451 PARAMETER Experiment Name: At_Far-red-induction_P Parameter: Tissue Value: Whole Plant
  misc_feature: MA Experiment ID: 20001554 Result: Up-regulated in Transcription
  misc_feature: MA Experiment 20001554 PARAMETER Experiment Name: At_Drought_Soil_Dry_P Parameter: Age (day) Value: 21
  misc_feature: MA Experiment 20001554 PARAMETER Experiment Name: At_Drought_Soil_Dry_P Parameter: Organism Value: A. thaliana
  misc_feature: MA Experiment 20001554 PARAMETER Experiment Name: At_Drought_Soil_Dry_P Parameter: Plant Line Value: WS
  misc_feature: MA Experiment 20001554 PARAMETER Experiment Name: At_Drought_Soil_Dry_P Parameter: Post Timepoint (hr) Value: None
  misc_feature: MA Experiment 20001554 PARAMETER Experiment Name: At_Drought_Soil_Dry_P Parameter: Post-Treatment Value: None
  misc_feature: MA Experiment 20001554 PARAMETER Experiment Name: At_Drought_Soil_Dry_P Parameter: Timepoint (day) Value: 7
  misc_feature: MA Experiment 20001554 PARAMETER Experiment Name: At_Drought_Soil_Dry_P Parameter: Treatment Value: Drought vs. No Drought
  misc_feature: MA Experiment ID: 20001555 Result: Up-regulated in Transcription
  misc_feature: MA Experiment 20001555 PARAMETER Experiment Name: At_Drought_Soil_Dry_P Parameter: Age (day) Value: 24
  misc_feature: MA Experiment 20001555 PARAMETER Experiment Name: At_Drought_Soil_Dry_P Parameter: Organism Value: A. thaliana
  misc_feature: MA Experiment 20001555 PARAMETER Experiment Name: At_Drought_Soil_Dry_P Parameter: Plant Line Value: WS
  misc_feature: MA Experiment 20001555 PARAMETER Experiment Name: At_Drought_Soil_Dry_P Parameter: Post Timepoint (hr) Value: None
  misc_feature: MA Experiment 20001555 PARAMETER Experiment Name: At_Drought_Soil_Dry_P Parameter: Post-Treatment Value: None
  misc_feature: MA Experiment 20001555 PARAMETER Experiment Name: At_Drought_Soil_Dry_P Parameter: Timepoint (day) Value: 10
  misc_feature: MA Experiment 20001555 PARAMETER Experiment Name: At_Drought_Soil_Dry_P Parameter: Treatment Value: Drought vs. No Drought
  misc_feature: MA Experiment ID: 20001556 Result: Up-regulated in Transcription
  misc_feature: MA Experiment 20001556 PARAMETER Experiment Name: At_Drought_Soil_Dry_P Parameter: Age (day) Value: 26
  misc_feature: MA Experiment 20001556 PARAMETER Experiment Name: At_Drought_Soil_Dry_P Parameter: Organism Value: A. thaliana
  misc_feature: MA Experiment 20001556 PARAMETER Experiment Name: At_Drought_Soil_Dry_P Parameter: Plant Line Value: WS
  misc_feature: MA Experiment 20001556 PARAMETER Experiment Name: At_Drought_Soil_Dry_P Parameter: Post Timepoint (hr) Value: None
  misc_feature: MA Experiment 20001556 PARAMETER Experiment Name: At_Drought_Soil_Dry_P Parameter: Post-Treatment Value: None
  misc_feature: MA Experiment 20001556 PARAMETER Experiment Name: At_Drought_Soil_Dry_P Parameter: Timepoint (day) Value: 12
  misc_feature: MA Experiment 20001556 PARAMETER Experiment Name: At_Drought_Soil_Dry_P Parameter: Treatment Value: Drought vs. No Drought
  misc_feature: MA Experiment ID: 20001557 Result: Up-regulated in Transcription
  misc_feature: MA Experiment 20001557 PARAMETER Experiment Name: At_Drought_Soil_Dry_P Parameter: Age (day) Value: 27
  misc_feature: MA Experiment 20001557 PARAMETER Experiment Name: At_Drought_Soil_Dry_P Parameter: Organism Value: A. thaliana
  misc_feature: MA Experiment 20001557 PARAMETER Experiment Name: At_Drought_Soil_Dry_P Parameter: Plant Line Value: WS
  misc_feature: MA Experiment 20001557 PARAMETER Experiment Name: At_Drought_Soil_Dry_P Parameter: Post Timepoint (hr) Value: 3
  misc_feature: MA Experiment 20001557 PARAMETER Experiment Name: At_Drought_Soil_Dry_P Parameter: Post-Treatment Value: Re-Water vs. No Drought
  misc_feature: MA Experiment 20001557 PARAMETER Experiment Name: At_Drought_Soil_Dry_P Parameter: Timepoint (day) Value: 13
  misc_feature: MA Experiment 20001557 PARAMETER Experiment Name: At_Drought_Soil_Dry_P Parameter: Treatment Value: Drought vs. No Drought
  misc_feature: MA Experiment ID: 20001559 Result: Up-regulated in Transcription
  misc_feature: MA Experiment 20001559 PARAMETER Experiment Name: At_Drought_Soil_Dry_P Parameter: Age (day) Value: 28
  misc_feature: MA Experiment 20001559 PARAMETER Experiment Name: At_Drought_Soil_Dry_P Parameter: Organism Value: A. thaliana
  misc_feature: MA Experiment 20001559 PARAMETER Experiment Name: At_Drought_Soil_Dry_P Parameter: Plant Line Value: WS
  misc_feature: MA Experiment 20001559 PARAMETER Experiment Name: At_Drought_Soil_Dry_P Parameter: Post Timepoint (hr) Value: 29
  misc_feature: MA Experiment 20001559 PARAMETER Experiment Name: At_Drought_Soil_Dry_P Parameter: Post-Treatment Value: Re-Water vs. No Drought
  misc_feature: MA Experiment 20001559 PARAMETER Experiment Name: At_Drought_Soil_Dry_P Parameter: Timepoint (day) Value: 14
  misc_feature: MA Experiment 20001559 PARAMETER Experiment Name: At_Drought_Soil_Dry_P Parameter: Treatment Value: Drought vs. No Drought
  misc_feature: MA Experiment ID: 20001560 Result: Up-regulated in Transcription
  misc_feature: MA Experiment 20001560 PARAMETER Experiment Name: At_Drought_Soil_Dry_P Parameter: Age (day) Value: 28
  misc_feature: MA Experiment 20001560 PARAMETER Experiment Name: At_Drought_Soil_Dry_P Parameter: Organism Value: A. thaliana
  misc_feature: MA Experiment 20001560 PARAMETER Experiment Name: At_Drought_Soil_Dry_P Parameter: Plant Line Value: WS
  misc_feature: MA Experiment 20001560 PARAMETER Experiment Name: At_Drought_Soil_Dry_P Parameter: Post Timepoint (hr) Value: None
  misc_feature: MA Experiment 20001560 PARAMETER Experiment Name: At_Drought_Soil_Dry_P Parameter: Post-Treatment Value: None
  misc_feature: MA Experiment 20001560 PARAMETER Experiment Name: At_Drought_Soil_Dry_P Parameter: Timepoint (day) Value: 14
  misc_feature: MA Experiment 20001560 PARAMETER Experiment Name: At_Drought_Soil_Dry_P Parameter: Treatment Value: Drought vs. No Drought
  misc_feature: MA Experiment ID: 20001757 Result: Down-regulated in Transcription
  misc_feature: MA Experiment 20001757 PARAMETER Experiment Name: At_50mM_NH4NO3_L-to-H_P Parameter: Timepoint (hr) Value: 6
  misc_feature: MA Experiment 20001757 PARAMETER Experiment Name: At_50mM_NH4NO3_L-to-H_P Parameter: Tissue Value: Leaf
  misc_feature: MA Experiment 20001757 PARAMETER Experiment Name: At_50mM_NH4NO3_L-to-H_P Parameter: Treatment Value: 50mM NH4NO3 vs 100mM Mannitol
  misc_feature: MA Experiment ID: 20001771 Result: Up-regulated in Transcription
  misc_feature: MA Experiment 20001771 PARAMETER Experiment Name: At_Far-red-enriched-adult_P Parameter: Age (day) Value: 28
  misc_feature: MA Experiment 20001771 PARAMETER Experiment Name: At_Far-red-enriched-adult_P Parameter: Light Value: Far-red enriched vs. White
  misc_feature: MA Experiment 20001771 PARAMETER Experiment Name: At_Far-red-enriched-adult_P Parameter: Organism Value: A. thaliana
  misc_feature: MA Experiment 20001771 PARAMETER Experiment Name: At_Far-red-enriched-adult_P Parameter: Plant Line Value: Columbia
  misc_feature: MA Experiment 20001771 PARAMETER Experiment Name: At_Far-red-enriched-adult_P Parameter: Timepoint (hr) Value: 16
  misc_feature: MA Experiment 20001771 PARAMETER Experiment Name: At_Far-red-enriched-adult_P Parameter: Tissue Value: Aerial
  misc_feature: MA Experiment ID: 20001904 Result: Up-regulated in Transcription
  misc_feature: MA Experiment 20001904 PARAMETER Experiment Name: At_Drought_Reproduction_P Parameter: Age (day) Value: 37
  misc_feature: MA Experiment 20001904 PARAMETER Experiment Name: At_Drought_Reproduction_P Parameter: Organism Value: A. thaliana
  misc_feature: MA Experiment 20001904 PARAMETER Experiment Name: At_Drought_Reproduction_P Parameter: Plant Line Value: WS
  misc_feature: MA Experiment 20001904 PARAMETER Experiment Name: At_Drought_Reproduction_P Parameter: Timepoint (day) Value: 7
  misc_feature: MA Experiment 20001904 PARAMETER Experiment Name: At_Drought_Reproduction_P Parameter: Tissue Value: Rosettes
  misc_feature: MA Experiment 20001904 PARAMETER Experiment Name: At_Drought_Reproduction_P Parameter: Treatment Value: Drought vs. No Drought
  misc_feature: MA Experiment ID: 20001905 Result: Up-regulated in Transcription
  misc_feature: MA Experiment 20001905 PARAMETER Experiment Name: At_Drought_Reproduction_P Parameter: Age (day) Value: 40
  misc_feature: MA Experiment 20001905 PARAMETER Experiment Name: At_Drought_Reproduction_P Parameter: Organism Value: A. thaliana
  misc_feature: MA Experiment 20001905 PARAMETER Experiment Name: At_Drought_Reproduction_P Parameter: Plant Line Value: WS
  misc_feature: MA Experiment 20001905 PARAMETER Experiment Name: At_Drought_Reproduction_P Parameter: Timepoint (day) Value: 10
  misc_feature: MA Experiment 20001905 PARAMETER Experiment Name: At_Drought_Reproduction_P Parameter: Tissue Value: Rosettes
  misc_feature: MA Experiment 20001905 PARAMETER Experiment Name: At_Drought_Reproduction_P Parameter: Treatment Value: Drought vs. No Drought
  misc_feature: MA Experiment ID: 20001906 Result: Up-regulated in Transcription
  misc_feature: MA Experiment 20001906 PARAMETER Experiment Name: At_Drought_Reproduction_P Parameter: Age (day) Value: 35
  misc_feature: MA Experiment 20001906 PARAMETER Experiment Name: At_Drought_Reproduction_P Parameter: Organism Value: A. thaliana
  misc_feature: MA Experiment 20001906 PARAMETER Experiment Name: At_Drought_Reproduction_P Parameter: Plant Line Value: WS
  misc_feature: MA Experiment 20001906 PARAMETER Experiment Name: At_Drought_Reproduction_P Parameter: Timepoint (day) Value: 5
  misc_feature: MA Experiment 20001906 PARAMETER Experiment Name: At_Drought_Reproduction_P Parameter: Tissue Value: Siliques
  misc_feature: MA Experiment 20001906 PARAMETER Experiment Name: At_Drought_Reproduction_P Parameter: Treatment Value: Drought vs. No Drought
  misc_feature: MA Experiment ID: 20001907 Result: Up-regulated in Transcription
  misc_feature: MA Experiment 20001907 PARAMETER Experiment Name: At_Drought_Reproduction_P Parameter: Age (day) Value: 37
  misc_feature: MA Experiment 20001907 PARAMETER Experiment Name: At_Drought_Reproduction_P Parameter: Organism Value: A. thaliana
  misc_feature: MA Experiment 20001907 PARAMETER Experiment Name: At_Drought_Reproduction_P Parameter: Plant Line Value: WS
  misc_feature: MA Experiment 20001907 PARAMETER Experiment Name: At_Drought_Reproduction_P Parameter: Timepoint (day) Value: 7
  misc_feature: MA Experiment 20001907 PARAMETER Experiment Name: At_Drought_Reproduction_P Parameter: Tissue Value: Siliques
  misc_feature: MA Experiment 20001907 PARAMETER Experiment Name: At_Drought_Reproduction_P Parameter: Treatment Value: Drought vs. No Drought
  misc_feature: MA Experiment ID: 20001908 Result: Up-regulated in Transcription
  misc_feature: MA Experiment 20001908 PARAMETER Experiment Name: At_Drought_Reproduction_P Parameter: Age (day) Value: 40
  misc_feature: MA Experiment 20001908 PARAMETER Experiment Name: At_Drought_Reproduction_P Parameter: Organism Value: A. thaliana
  misc_feature: MA Experiment 20001908 PARAMETER Experiment Name: At_Drought_Reproduction_P Parameter: Plant Line Value: WS
  misc_feature: MA Experiment 20001908 PARAMETER Experiment Name: At_Drought_Reproduction_P Parameter: Timepoint (day) Value: 10
  misc_feature: MA Experiment 20001908 PARAMETER Experiment Name: At_Drought_Reproduction_P Parameter: Tissue Value: Siliques
  misc_feature: MA Experiment 20001908 PARAMETER Experiment Name: At_Drought_Reproduction_P Parameter: Treatment Value: Drought vs. No Drought
  misc_feature: MA Experiment ID: 20001911 Result: Up-regulated in Transcription
  misc_feature: MA Experiment 20001911 PARAMETER Experiment Name: At_Drought_Reproduction_P Parameter: Age (day) Value: 40
  misc_feature: MA Experiment 20001911 PARAMETER Experiment Name: At_Drought_Reproduction_P Parameter: Organism Value: A. thaliana
  misc_feature: MA Experiment 20001911 PARAMETER Experiment Name: At_Drought_Reproduction_P Parameter: Plant Line Value: WS
  misc_feature: MA Experiment 20001911 PARAMETER Experiment Name: At_Drought_Reproduction_P Parameter: Timepoint (day) Value: 10
  misc_feature: MA Experiment 20001911 PARAMETER Experiment Name: At_Drought_Reproduction_P Parameter: Tissue Value: Flowers
  misc_feature: MA Experiment 20001911 PARAMETER Experiment Name: At_Drought_Reproduction_P Parameter: Treatment Value: Drought vs. No Drought
aaagcttccatggctaatcttgtttaagcttctcttcttcttctctctcctgtgtctcgttcactagttttttttcgggggagagtgatggagtgtgtttgttgaatagttttgacgatcacatggctgagatttgttacgagaacgagactatgatgattgaaacgacggcgacggtggtgaagaaggcaacgacgacaacgaggagacgagaacggagctcgtctcaagcagcgagaagaaggagaatggagatccggaggtttaagtttgtttccggcgaacaagaacctgtcttcgtcgacggtgacttacagaggcggaggagaagagaatccaccgtcgcagcctccacctccaccgtgttttacgaaacggcgaaggaagttgtcgtcctatgcgagtctcttagttcaacggttgtggcattgcctgatcctgaagcttatcctaaatacggcgtcgcttcagtctgtggaagaagacgtgaaatggaagacgccgtcgctgtgcatccgtttttttcccgtcatcagacggaatattcatccaccggatttcactattgcggcgtttacgatggccatggctgttcccatgtagcgatgaaatgtagagaaagactacacgagctagtccgtgaagagtttgaagctgatgctgactgggaaaagtcaatggcgcgtagcttcacgcgcatggacatggaggttgttgcgttgaacgccgatggtgcggcaaaatgccggtgcgagcttcagaggccggactgcgacgcggtgggatccactgcggttgtgtctgtccttacgccggagaaaatcatcgtggcgaattgcggtgactcacgtgccgttctctgtcgtaacggcaaagccattgctttatcctccgatcataagccagaccgtccggacgagctagaccggattcaagcagcgggtggtcgtgttatctactgggatggcccacgtgtccttggagtacttgcaatgtcacgagccattggagataattacttgaagccgtatgtaatcagcagaccggaggtaaccgtgacggaccgggccaacggagacgattttcttattctcgcaagtgacggtctttgggacgttgtttcaaacgaaactgcatgtagcgtcgttcgaatgtgtttgagaggaaaagtcaatggtcaagtatcatcatcaccggaaagggaaatgacaggtgtcggcgccgggaatgtggtggttggaggaggagatttgccagataaagcgtgtgaggaggcgtcgctgttgctgacgaggcttgcgttggctagacaaagttcggacaacgtaagtgttgtggtggttgatctacgacgagacacgtagttgtatttgtctctctcgtaatgtttgttgttttttgtcctgagtcatcgacttttgggctttttcttttaaccttttttgctcttcggtgtaagacaacgaagggtttttaatttagcttgactatgggttatgtcagtcactgtgttgaatcgcggtttagatctacaaagattttcaccagtagtgaaaatggtaaaaagccgtgaaatgtgaaagacttgagttcaatttaattttaaatttaatagaatcagttgatc

SEQ ID NO: 98289 - protein, 413 aa, Arabidopsis thaliana
  peptide (1)..(413): Ceres Seq. ID no. 13593067
  misc_feature (110)..(402): Pfam Name: Protein phosphatase 2C Pfam Description: Protein phosphatase 2C
  misc_feature (1)..(413): Homolog of NCBI NO: 15237839 NR Description: protein phosphatase 2C (PP2C), putative
  misc_feature (1)..(413): Homolog of NCBI NO: 16226419 NR Description: AT5g59220/mnc17_110 [Arabidopsis thaliana]
  misc_feature (1)..(411): Homolog of NCBI NO: 15222398 NR Description: protein phosphatase 2C (PP2C), putative
  misc_feature (1)..(411): Homolog of NCBI NO: 21537020 NR Description: protein phosphatase 2C, putative [Arabidopsis
  misc_feature (12)..(412): Homolog of NCBI NO: 10432446 NR Description: protein phosphatase 2C [Nicotiana tabacum]
  misc_feature (110)..(358): Homolog of NCBI NO: 15227078 NR Description: protein phosphatase 2C (PP2C), putative
  misc_feature (377)..(411): Homolog of NCBI NO: 15227078 NR Description: protein phosphatase 2C (PP2C), putative
  misc_feature (93)..(412): Homolog of NCBI NO: 7768151 NR Description: protein phpsphatase 2C (PP2C) [Fagus sylvatica]
  misc_feature (33)..(357): Homolog of NCBI NO: 15229745 NR Description: protein phosphatase 2C (PP2C), putative thaliana] >gi|1352681|sp|P49598|P2C4_ARATH Protein phosphatase 2C >gi|1076391|pir||S55457 phosphoprotein phosphatase (EC 3.1.3.16)
  misc_feature (362)..(411): Homolog of NCBI NO: 15229745 NR Description: protein phosphatase 2C (PP2C), putative thaliana] >gi|1352681|sp|P49598|P2C4_ARATH Protein phosphatase 2C >gi|1076391|pir||S55457 phosphoprotein phosphatase (EC 3.1.3.16)
MAEICYENETMMIETTATVVKKATTTTRRRERSSSQAARRRRMEIRRFKFVSGEQEPVFVDGDLQRRRRRESTVAASTSTVFYETAKEVVVLCESLSSTVVALPDPEAYPKYGVASVCGRRREMEDAVAVHPFFSRHQTEYSSTGFHYCGVYDGHGCSHVAMKCRERLHELVREEFEADADWEKSMARSFTRMDMEVVALNADGAAKCRCELQRPDCDAVGSTAVVSVLTPEKIIVANCGDSRAVLCRNGKAIALSSDHKPDRPDELDRIQAAGGRVIYWDGPRVLGVLAMSRAIGDNYLKPYVISRPEVTVTDRANGDDFLILASDGLWDVVSNETACSVVRMCLRGKVNGQVSSSPEREMTGVGAGNVVVGGGDLPDKACEEASLLLTRLALARQSSDNVSVVVVDLRRDT

SEQ ID NO: 98290 - protein, 403 aa, Arabidopsis thaliana
  peptide (1)..(403): Ceres Seq. ID no. 13593068
  misc_feature (100)..(392): Pfam Name: Protein phosphatase 2C Pfam Description: Protein phosphatase 2C
  misc_feature (1)..(403): Homolog of NCBI NO: 15237839 NR Description: protein phosphatase 2C (PP2C), putative
  misc_feature (1)..(403): Homolog of NCBI NO: 16226419 NR Description: AT5g59220/mnc17_110 [Arabidopsis thaliana]
  misc_feature (1)..(401): Homolog of NCBI NO: 15222398 NR Description: protein phosphatase 2C (PP2C), putative
  misc_feature (1)..(401): Homolog of NCBI NO: 21537020 NR Description: protein phosphatase 2C, putative [Arabidopsis
  misc_feature (2)..(402): Homolog of NCBI NO: 10432446 NR Description: protein phosphatase 2C [Nicotiana tabacum]
  misc_feature (100)..(348): Homolog of NCBI NO: 15227078 NR Description: protein phosphatase 2C (PP2C), putative
  misc_feature (367)..(401): Homolog of NCBI NO: 15227078 NR Description: protein phosphatase 2C (PP2C), putative
  misc_feature (83)..(402): Homolog of NCBI NO: 7768151 NR Description: protein phpsphatase 2C (PP2C) [Fagus sylvatica]
  misc_feature (23)..(347): Homolog of NCBI NO: 15229745 NR Description: protein phosphatase 2C (PP2C), putative thaliana] >gi|1352681|sp|P49598|P2C4_ARATH Protein phosphatase 2C >gi|1076391|pir||S55457 phosphoprotein phosphatase (EC 3.1.3.16)
  misc_feature (352)..(401): Homolog of NCBI NO: 15229745 NR Description: protein phosphatase 2C (PP2C), putative thaliana] >gi|1352681|sp|P49598|P2C4_ARATH Protein phosphatase 2C >gi|1076391|pir||S55457 phosphoprotein phosphatase (EC 3.1.3.16)
MMIETTATVVKKATTTTRRRERSSSQAARRRRMEIRRFKFVSGEQEPVFVDGDLQRRRRRESTVAASTSTVFYETAKEVVVLCESLSSTVVALPDPEAYPKYGVASVCGRRREMEDAVAVHPFFSRHQTEYSSTGFHYCGVYDGHGCSHVAMKCRERLHELVREEFEADADWEKSMARSFTRMDMEVVALNADGAAKCRCELQRPDCDAVGSTAVVSVLTPEKIIVANCGDSRAVLCRNGKAIALSSDHKPDRPDELDRIQAAGGRVIYWDGPRVLGVLAMSRAIGDNYLKPYVISRPEVTVTDRANGDDFLILASDGLWDVVSNETACSVVRMCLRGKVNGQVSSSPEREMTGVGAGNVVVGGGDLPDKACEEASLLLTRLALARQSSDNVSVVVVDLRRDT

SEQ ID NO: 98291 - protein, 402 aa, Arabidopsis thaliana
  peptide (1)..(402): Ceres Seq. ID no. 13593069
  misc_feature (99)..(391): Pfam Name: Protein phosphatase 2C Pfam Description: Protein phosphatase 2C
  misc_feature (1)..(402): Homolog of NCBI NO: 15237839 NR Description: protein phosphatase 2C (PP2C), putative
  misc_feature (1)..(402): Homolog of NCBI NO: 16226419 NR Description: AT5g59220/mnc17_110 [Arabidopsis thaliana]
  misc_feature (1)..(400): Homolog of NCBI NO: 15222398 NR Description: protein phosphatase 2C (PP2C), putative
  misc_feature (1)..(400): Homolog of NCBI NO: 21537020 NR Description: protein phosphatase 2C, putative [Arabidopsis
  misc_feature (1)..(401): Homolog of NCBI NO: 10432446 NR Description: protein phosphatase 2C [Nicotiana tabacum]
  misc_feature (99)..(347): Homolog of NCBI NO: 15227078 NR Description: protein phosphatase 2C (PP2C), putative
  misc_feature (366)..(400): Homolog of NCBI NO: 15227078 NR Description: protein phosphatase 2C (PP2C), putative
  misc_feature (82)..(401): Homolog of NCBI NO: 7768151 NR Description: protein phpsphatase 2C (PP2C) [Fagus sylvatica]
  misc_feature (22)..(346): Homolog of NCBI NO: 15229745 NR Description: protein phosphatase 2C (PP2C), putative thaliana] >gi|1352681|sp|P49598|P2C4_ARATH Protein phosphatase 2C >gi|1076391|pir||S55457 phosphoprotein phosphatase (EC 3.1.3.16)
  misc_feature (351)..(400): Homolog of NCBI NO: 15229745 NR Description: protein phosphatase 2C (PP2C), putative thaliana] >gi|1352681|sp|P49598|P2C4_ARATH Protein phosphatase 2C >gi|1076391|pir||S55457 phosphoprotein phosphatase (EC 3.1.3.16)
MIETTATVVKKATTTTRRRERSSSQAARRRRMEIRRFKFVSGEQEPVFVDGDLQRRRRRESTVAASTSTVFYETAKEVVVLCESLSSTVVALPDPEAYPKYGVASVCGRRREMEDAVAVHPFFSRHQTEYSSTGFHYCGVYDGHGCSHVAMKCRERLHELVREEFEADADWEKSMARSFTRMDMEVVALNADGAAKCRCELQRPDCDAVGSTAVVSVLTPEKIIVANCGDSRAVLCRNGKAIALSSDHKPDRPDELDRIQAAGGRVIYWDGPRVLGVLAMSRAIGDNYLKPYVISRPEVTVTDRANGDDFLILASDGLWDVVSNETACSVVRMCLRGKVNGQVSSSPEREMTGVGAGNVVVGGGDLPDKACEEASLLLTRLALARQSSDNVSVVVVDLRRDT

SEQ ID NO: 98292 - DNA, 1737 bp, Arabidopsis thaliana
  misc_feature (1)..(1737): Ceres Seq. ID no. 13593086
  misc_feature: MA Experiment ID: 20000171 Result: Up-regulated in Transcription
  misc_feature: MA Experiment 20000171 PARAMETER Experiment Name: At_42deg_Heat_P Parameter: Age (day) Value: 14
  misc_feature: MA Experiment 20000171 PARAMETER Experiment Name: At_42deg_Heat_P Parameter: Organism Value: A. thaliana
  misc_feature: MA Experiment 20000171 PARAMETER Experiment Name: At_42deg_Heat_P Parameter: Plant Line Value: WS
  misc_feature: MA Experiment 20000171 PARAMETER Experiment Name: At_42deg_Heat_P Parameter: Temperature (deg C) Value: 42 vs. 22
  misc_feature: MA Experiment 20000171 PARAMETER Experiment Name: At_42deg_Heat_P Parameter: Timepoint (hr) Value: 1
  misc_feature: MA Experiment 20000171 PARAMETER Experiment Name: At_42deg_Heat_P Parameter: Tissue Value: Aerial
  misc_feature: MA Experiment ID: 20000173 Result: Up-regulated in Transcription
  misc_feature: MA Experiment 20000173 PARAMETER Experiment Name: At_42deg_Heat_P Parameter: Age (day) Value: 14
  misc_feature: MA Experiment 20000173 PARAMETER Experiment Name: At_42deg_Heat_P Parameter: Organism Value: A. thaliana
  misc_feature: MA Experiment 20000173 PARAMETER Experiment Name: At_42deg_Heat_P Parameter: Plant Line Value: WS
  misc_feature: MA Experiment 20000173 PARAMETER Experiment Name: At_42deg_Heat_P Parameter: Temperature (deg C) Value: 42 vs. 22
  misc_feature: MA Experiment 20000173 PARAMETER Experiment Name: At_42deg_Heat_P Parameter: Timepoint (hr) Value: 6
  misc_feature: MA Experiment 20000173 PARAMETER Experiment Name: At_42deg_Heat_P Parameter: Tissue Value: Aerial
  misc_feature: MA Experiment ID: 20000185 Result: Up-regulated in Transcription
  misc_feature: MA Experiment 20000185 PARAMETER Experiment Name: At_Roots__P Parameter: Age (day) Value: 7 vs. 21
  misc_feature: MA Experiment 20000185 PARAMETER Experiment Name: At_Roots__P Parameter: Organism Value: A. thaliana
  misc_feature: MA Experiment 20000185 PARAMETER Experiment Name: At_Roots__P Parameter: Tissue Value: Roots vs. Whole Plant
  misc_feature: MA Experiment ID: 20000234 Result: Down-regulated in Transcription
  misc_feature: MA Experiment 20000234 PARAMETER Experiment Name: At_Siliques_P Parameter: Age (day) Value: 21
  misc_feature: MA Experiment 20000234 PARAMETER Experiment Name: At_Siliques_P Parameter: Organism Value: A. thaliana
  misc_feature: MA Experiment 20000234 PARAMETER Experiment Name: At_Siliques_P Parameter: Plant Line Value: WS
  misc_feature: MA Experiment 20000234 PARAMETER Experiment Name: At_Siliques_P Parameter: Tissue Value: Less Than 5mm Siliques vs. Whole Plant
  misc_feature: MA Experiment ID: 20000235 Result: Down-regulated in Transcription
  misc_feature: MA Experiment 20000235 PARAMETER Experiment Name: At_Siliques_P Parameter: Age (day) Value: 21
  misc_feature: MA Experiment 20000235 PARAMETER Experiment Name: At_Siliques_P Parameter: Organism Value: A. thaliana
  misc_feature: MA Experiment 20000235 PARAMETER Experiment Name: At_Siliques_P Parameter: Plant Line Value: WS
  misc_feature: MA Experiment 20000235 PARAMETER Experiment Name: At_Siliques_P Parameter: Tissue Value: 5-10mm Siliques vs. Whole Plant
  misc_feature: MA Experiment ID: 20000264 Result: Down-regulated in Transcription
  misc_feature: MA Experiment 20000264 PARAMETER Experiment Name: At_Open_Flower_P Parameter: Age (day) Value: 21
  misc_feature: MA Experiment 20000264 PARAMETER Experiment Name: At_Open_Flower_P Parameter: Plant Line Value: WS
  misc_feature: MA Experiment 20000264 PARAMETER Experiment Name: At_Open_Flower_P Parameter: Tissue Value: Open Flower vs. Whole Plant
  misc_feature: MA Experiment ID: 20000265 Result: Down-regulated in Transcription
  misc_feature: MA Experiment 20000265 PARAMETER Experiment Name: At_Open_Flower_P Parameter: Age (day) Value: 21
  misc_feature: MA Experiment 20000265 PARAMETER Experiment Name: At_Open_Flower_P Parameter: Plant Line Value: WS
  misc_feature: MA Experiment 20000265 PARAMETER Experiment Name: At_Open_Flower_P Parameter: Tissue Value: Closed Flower vs. Whole Plant
  misc_feature: MA Experiment ID: 20000286 Result: Down-regulated in Transcription
  misc_feature: MA Experiment 20000286 PARAMETER Experiment Name: At_Open_Flower_P Parameter: Age (day) Value: 21
  misc_feature: MA Experiment 20000286 PARAMETER Experiment Name: At_Open_Flower_P Parameter: Plant Line Value: WS
  misc_feature: MA Experiment 20000286 PARAMETER Experiment Name: At_Open_Flower_P Parameter: Tissue Value: Half Open vs. Whole Plant
  misc_feature: MA Experiment ID: 20000439 Result: Up-regulated in Transcription
  misc_feature: MA Experiment 20000439 PARAMETER Experiment Name: At_Roots__P Parameter: Age (day) Value: 14 vs. 21
  misc_feature: MA Experiment 20000439 PARAMETER Experiment Name: At_Roots__P Parameter: Organism Value: A. thaliana
  misc_feature: MA Experiment 20000439 PARAMETER Experiment Name: At_Roots__P Parameter: Tissue Value: Roots vs. Whole Plant
  misc_feature: MA Experiment ID: 20000451 Result: Down-regulated in Transcription
  misc_feature: MA Experiment 20000451 PARAMETER Experiment Name: At_CS6879_Shoots-Roots_P Parameter: Age (day) Value: 14
  misc_feature: MA Experiment 20000451 PARAMETER Experiment Name: At_CS6879_Shoots-Roots_P Parameter: Organism Value: A. thaliana
  misc_feature: MA Experiment 20000451 PARAMETER Experiment Name: At_CS6879_Shoots-Roots_P Parameter: Plant Line Value: CS6879 vs. WS
  misc_feature: MA Experiment 20000451 PARAMETER Experiment Name: At_CS6879_Shoots-Roots_P Parameter: Tissue Value: Roots
  misc_feature: MA Experiment ID: 20000794 Result: Down-regulated in Transcription
  misc_feature: MA Experiment 20000794 PARAMETER Experiment Name: At_Petals_P Parameter: Age (day) Value: 23-25 days
  misc_feature: MA Experiment 20000794 PARAMETER Experiment Name: At_Petals_P Parameter: Plant Line Value: WS
  misc_feature: MA Experiment 20000794 PARAMETER Experiment Name: At_Petals_P Parameter: Tissue Value: Petals vs. Whole plant
atgagagatagacagagagggaaaacaactacacaagtcaaaatttctgttctaaaaaagtaaaagaagtatggtggaggaaacgagctctggtggtggctcatcggcttctccgatcaaaaccatcgtcgttttggttcaggagaacaggtcgttcgatcacatgttaggttggttcaaggagcttaacccagaaatcgatggagtatccgaatccgaaccaagatccaacccactttctacatctgacccgaactctgctcaaatcttcttcggcaaagaatctcagaacattgatcctgatcccggtcactcttttcaggcgatctacgaacaagtgtttggaaaaccattcagcgacgagagtccgtacccggatccgaagatgaacgggttcgtacaaaacgcagaggcgataacaaaagggatgtcggagaaagtagtgatgcaaggttttccgccggagaaacttccggtattcaaggaactagttcaagaattcgctgtctgcgatcggtggttctcgtcgttgccctcgtccacgcagcctaaccgactctacgtccacgcggcgacatcaaacggtgcgtttagtaatgacactaacacgcttgttcgtggctttcctcagaggacagtgttcgaatcacttgaagagagcggtttcacatttggaatttattaccaatcctttcctaattgcctcttttacaggaacatgaggaaactgaagtacgtggacaacttccatcaataccacttaagcttcaagaggcattgcaaagaagggaagcttccaaactatgtggttatagaaccaaggtacttcaagattttgtcggctccagctaatgatgaccatcccaaaaacgacgtcgttgaaggccaaaatctagtcaaagaaatctacgaagccttaagagctagtcctcagtggaacgagattctcttcgttgttgtttatgatgaacatggtggttattatgaccacgtccctactccagtcattggtgtcccaaatcctgatggtctagttggacctgagccctataactttaagtttgaccggcttggtgttagggttcctgctttgctaatctcgccttggatcgaacctggaacggtgttacacgagccaaatggaccagagccaacgtcgcagttcgaacattcatcaattccggcaacactgaagaaaatattcaacctcaagagctttcttacaaagcgtgacgaatgggctggaacactcgatgctgtcatcaaccggaccagcccaaggacggactgccccgtcacattaccggaacttcctagggcaagagacatagacattggaacacaagaagaagacgaagatctcactgattttcaaatcgaactgattcaagcagcggctgtactaaaaggagatcatatcaaagacatttacccgtttaagctcgcagataaaatgaaggttttggatgcggctaggtacgtagaagaagctttcactagattccatggtgagtccaagaaggctaaagaagaaggccgtgatgagcatgagatcgttgatctttctaaaggatctactcgtcactcgactcctaagtcttttgttcagaagttattctcgtgtttgatttgtgataattgatcttgagttgaaacagatttgatctctgtgagatttggtgtatttctcggattttatgtgaagagcgtttgaaatttgatatttgtttgttttcc

SEQ ID NO: 98293 - protein, 523 aa, Arabidopsis thaliana; identical to SEQ ID NO: 45629
  peptide (1)..(523): Ceres Seq. ID no. 13593087
  misc_feature (16)..(397): Pfam Name: Phosphoesterase family Pfam Description: Phosphoesterase family
  misc_feature (1)..(523): Homolog of NCBI NO: 15228577 NR Description: phosphoesterase family [Arabidopsis thaliana] unknown protein [Arabidopsis thaliana] unknown protein [Arabidopsis thaliana]
  misc_feature (1)..(523): Homolog of NCBI NO: 17529016 NR Description: unknown protein [Arabidopsis thaliana]
  misc_feature (1)..(520): Homolog of NCBI NO: 18396577 NR Description: phosphoesterase family [Arabidopsis thaliana] hypothetical protein [Arabidopsis thaliana] AT3g03530/T21P5_5 [Arabidopsis thaliana] specific phospholipase C
  misc_feature (10)..(509): Homolog of NCBI NO: 18396579 NR Description: phosphoesterase family [Arabidopsis thaliana] unknown protein [Arabidopsis thaliana] putative phospholipase [Arabidopsis thaliana]
  misc_feature (11)..(521): Homolog of NCBI NO: 27573343 NR Description: putative phosphoesterase [Oryza sativa (japonica group)] >gi|29126358|gb|AAO66550.1| putative phosphoesterase
  misc_feature (12)..(503): Homolog of NCBI NO: 15225806 NR Description: phosphoesterase family [Arabidopsis thaliana]
  misc_feature (1)..(514): Homolog of NCBI NO: 21703147 NR Description: At1g07230/F10K1_4 [Arabidopsis thaliana] phosphatidylglycerol specific phospholipase C [Arabidopsis
  misc_feature (11)..(508): Homolog of NCBI NO: 20161866 NR Description: B1139B11.7 [Oryza sativa (japonica
  misc_feature (14)..(510): Homolog of NCBI NO: 34897344 NR Description: putative phospholipase [Oryza sativa] putative phospholipase [Oryza sativa] >gi|18855062|gb|AAL79754.1|
  misc_feature (1)..(514): Homolog of NCBI NO: 15222342 NR Description: phosphoesterase family [Arabidopsis thaliana]

SEQ ID NO: 98294 - protein, 492 aa, Arabidopsis thaliana; identical to SEQ ID NO: 45630
  peptide (1)..(492): Ceres Seq. ID no. 13593088
  misc_feature (1)..(366): Pfam Name: Phosphoesterase family Pfam Description: Phosphoesterase family
  misc_feature (1)..(492): Homolog of NCBI NO: 15228577 NR Description: phosphoesterase family [Arabidopsis thaliana] unknown protein [Arabidopsis thaliana] unknown protein [Arabidopsis thaliana]
  misc_feature (1)..(492): Homolog of NCBI NO: 17529016 NR Description: unknown protein [Arabidopsis thaliana]
  misc_feature (1)..(489): Homolog of NCBI NO: 18396577 NR Description: phosphoesterase family [Arabidopsis thaliana] hypothetical protein [Arabidopsis thaliana] AT3g03530/T21P5_5 [Arabidopsis thaliana] specific phospholipase C
  misc_feature (1)..(478): Homolog of NCBI NO: 18396579 NR Description: phosphoesterase family [Arabidopsis thaliana] unknown protein [Arabidopsis thaliana] putative phospholipase [Arabidopsis thaliana]
  misc_feature (1)..(490): Homolog of NCBI NO: 27573343 NR Description: putative phosphoesterase [Oryza sativa (japonica group)] >gi|29126358|gb|AAO66550.1| putative phosphoesterase
  misc_feature (1)..(472): Homolog of NCBI NO: 15225806 NR Description: phosphoesterase family [Arabidopsis thaliana]
  misc_feature (1)..(483): Homolog of NCBI NO: 21703147 NR Description: At1g07230/F10K1_4 [Arabidopsis thaliana] phosphatidylglycerol specific phospholipase C [Arabidopsis
  misc_feature (1)..(477): Homolog of NCBI NO: 20161866 NR Description: B1139B11.7 [Oryza sativa (japonica
  misc_feature (1)..(479): Homolog of NCBI NO: 34897344 NR Description: putative phospholipase [Oryza sativa] putative phospholipase [Oryza sativa] >gi|18855062|gb|AAL79754.1|
  misc_feature (1)..(483): Homolog of NCBI NO: 15222342 NR Description: phosphoesterase family [Arabidopsis thaliana]

SEQ ID NO: 98295 - protein, 418 aa, Arabidopsis thaliana; identical to SEQ ID NO: 45631
  peptide (1)..(418): Ceres Seq. ID no. 13593089
  misc_feature (1)..(292): Pfam Name: Phosphoesterase family Pfam Description: Phosphoesterase family
  misc_feature (1)..(418): Homolog of NCBI NO: 15228577 NR Description: phosphoesterase family [Arabidopsis thaliana] unknown protein [Arabidopsis thaliana] unknown protein [Arabidopsis thaliana]
  misc_feature (1)..(418): Homolog of NCBI NO: 17529016 NR Description: unknown protein [Arabidopsis thaliana]
  misc_feature (1)..(415): Homolog of NCBI NO: 18396577 NR Description: phosphoesterase family [Arabidopsis thaliana] hypothetical protein [Arabidopsis thaliana] AT3g03530/T21P5_5 [Arabidopsis thaliana] specific phospholipase C
  misc_feature (1)..(404): Homolog of NCBI NO: 18396579 NR Description: phosphoesterase family [Arabidopsis thaliana] unknown protein [Arabidopsis thaliana] putative phospholipase [Arabidopsis thaliana]
  misc_feature (1)..(416): Homolog of NCBI NO: 27573343 NR Description: putative phosphoesterase [Oryza sativa (japonica group)] >gi|29126358|gb|AAO66550.1| putative phosphoesterase
  misc_feature (1)..(398): Homolog of NCBI NO: 15225806 NR Description: phosphoesterase family [Arabidopsis thaliana]
  misc_feature (1)..(409): Homolog of NCBI NO: 21703147 NR Description: At1g07230/F10K1_4 [Arabidopsis thaliana] phosphatidylglycerol specific phospholipase C [Arabidopsis
  misc_feature (1)..(403): Homolog of NCBI NO: 20161866 NR Description: B1139B11.7 [Oryza sativa (japonica
  misc_feature (1)..(405): Homolog of NCBI NO: 34897344 NR Description: putative phospholipase [Oryza sativa] putative phospholipase [Oryza sativa] >gi|18855062|gb|AAL79754.1|
  misc_feature (1)..(409): Homolog of NCBI NO: 15222342 NR Description: phosphoesterase family [Arabidopsis thaliana]

SEQ ID NO: 98296 - DNA, 972 bp, Arabidopsis thaliana
  misc_feature (1)..(972): Ceres Seq. ID no. 13593100
  misc_feature: MA Experiment ID: 20000234 Result: Up-regulated in Transcription
  misc_feature: MA Experiment 20000234 PARAMETER Experiment Name: At_Siliques_P Parameter: Age (day) Value: 21
  misc_feature: MA Experiment 20000234 PARAMETER Experiment Name: At_Siliques_P Parameter: Organism Value: A. thaliana
  misc_feature: MA Experiment 20000234 PARAMETER Experiment Name: At_Siliques_P Parameter: Plant Line Value: WS
  misc_feature: MA Experiment 20000234 PARAMETER Experiment Name: At_Siliques_P Parameter: Tissue Value: Less Than 5mm Siliques vs. Whole Plant
  misc_feature: MA Experiment ID: 20000235 Result: Up-regulated in Transcription
  misc_feature: MA Experiment 20000235 PARAMETER Experiment Name: At_Siliques_P Parameter: Age (day) Value: 21
  misc_feature: MA Experiment 20000235 PARAMETER Experiment Name: At_Siliques_P Parameter: Organism Value: A. thaliana
  misc_feature: MA Experiment 20000235 PARAMETER Experiment Name: At_Siliques_P Parameter: Plant Line Value: WS
  misc_feature: MA Experiment 20000235 PARAMETER Experiment Name: At_Siliques_P Parameter: Tissue Value: 5-10mm Siliques vs. Whole Plant
  misc_feature: MA Experiment ID: 20000265 Result: Up-regulated in Transcription
  misc_feature: MA Experiment 20000265 PARAMETER Experiment Name: At_Open_Flower_P Parameter: Age (day) Value: 21
  misc_feature: MA Experiment 20000265 PARAMETER Experiment Name: At_Open_Flower_P Parameter: Plant Line Value: WS
  misc_feature: MA Experiment 20000265 PARAMETER Experiment Name: At_Open_Flower_P Parameter: Tissue Value: Closed Flower vs. Whole Plant
  misc_feature: MA Experiment ID: 20000286 Result: Up-regulated in Transcription
  misc_feature: MA Experiment 20000286 PARAMETER Experiment Name: At_Open_Flower_P Parameter: Age (day) Value: 21
  misc_feature: MA Experiment 20000286 PARAMETER Experiment Name: At_Open_Flower_P Parameter: Plant Line Value: WS
  misc_feature: MA Experiment 20000286 PARAMETER Experiment Name: At_Open_Flower_P Parameter: Tissue Value: Half Open vs. Whole Plant
  misc_feature: MA Experiment ID: 20000495 Result: Up-regulated in Transcription
  misc_feature: MA Experiment 20000495 PARAMETER Experiment Name: At_Guard_Cells_P Parameter: Harvest Date Value: 8/2/2002
  misc_feature: MA Experiment 20000495 PARAMETER Experiment Name: At_Guard_Cells_P Parameter: Organism Value: A. thaliana
  misc_feature: MA Experiment 20000495 PARAMETER Experiment Name: At_Guard_Cells_P Parameter: Tissue Value: Guard Cells vs. Leaves
  misc_feature: MA Experiment ID: 20001560 Result: Up-regulated in Transcription
  misc_feature: MA Experiment 20001560 PARAMETER Experiment Name: At_Drought_Soil_Dry_P Parameter: Age (day) Value: 28
  misc_feature: MA Experiment 20001560 PARAMETER Experiment Name: At_Drought_Soil_Dry_P Parameter: Organism Value: A. thaliana
  misc_feature: MA Experiment 20001560 PARAMETER Experiment Name: At_Drought_Soil_Dry_P Parameter: Plant Line Value: WS
  misc_feature: MA Experiment 20001560 PARAMETER Experiment Name: At_Drought_Soil_Dry_P Parameter: Post Timepoint (hr) Value: None
  misc_feature: MA Experiment 20001560 PARAMETER Experiment Name: At_Drought_Soil_Dry_P Parameter: Post-Treatment Value: None
  misc_feature: MA Experiment 20001560 PARAMETER Experiment Name: At_Drought_Soil_Dry_P Parameter: Timepoint (day) Value: 14
  misc_feature: MA Experiment 20001560 PARAMETER Experiment Name: At_Drought_Soil_Dry_P Parameter: Treatment Value: Drought vs. No Drought
  misc_feature: MA Experiment ID: 20001904 Result: Up-regulated in Transcription
  misc_feature: MA Experiment 20001904 PARAMETER Experiment Name: At_Drought_Reproduction_P Parameter: Age (day) Value: 37
  misc_feature: MA Experiment 20001904 PARAMETER Experiment Name: At_Drought_Reproduction_P Parameter: Organism Value: A. thaliana
  misc_feature: MA Experiment 20001904 PARAMETER Experiment Name: At_Drought_Reproduction_P Parameter: Plant Line Value: WS
  misc_feature: MA Experiment 20001904 PARAMETER Experiment Name: At_Drought_Reproduction_P Parameter: Timepoint (day) Value: 7
  misc_feature: MA Experiment 20001904 PARAMETER Experiment Name: At_Drought_Reproduction_P Parameter: Tissue Value: Rosettes
  misc_feature: MA Experiment 20001904 PARAMETER Experiment Name: At_Drought_Reproduction_P Parameter: Treatment Value: Drought vs. No Drought
  misc_feature: MA Experiment ID: 20001905 Result: Up-regulated in Transcription
  misc_feature: MA Experiment 20001905 PARAMETER Experiment Name: At_Drought_Reproduction_P Parameter: Age (day) Value: 40
  misc_feature: MA Experiment 20001905 PARAMETER Experiment Name: At_Drought_Reproduction_P Parameter: Organism Value: A. thaliana
  misc_feature: MA Experiment 20001905 PARAMETER Experiment Name: At_Drought_Reproduction_P Parameter: Plant Line Value: WS
  misc_feature: MA Experiment 20001905 PARAMETER Experiment Name: At_Drought_Reproduction_P Parameter: Timepoint (day) Value: 10
  misc_feature: MA Experiment 20001905 PARAMETER Experiment Name: At_Drought_Reproduction_P Parameter: Tissue Value: Rosettes
  misc_feature: MA Experiment 20001905 PARAMETER Experiment Name: At_Drought_Reproduction_P Parameter: Treatment Value: Drought vs. No Drought
atgggagacgaccagctagatttcgagctcccagaagaggttttgtcggtgattccgatggacccttttgagcagctggatctcgcgaggaagattacatcaatggcgatagcttcaagggtgtcgaatctggactctgaggtggttgaattgagacagaagcttctgggtaaggaaagtgttgtccgtgagcttgaggagaaagcgtctcgcctggagagagactgccgcgaggctgattcgagattgaaggtcgttctcgaagataatatgaacctgacaaaggagaaggattcactggcaatgactgtaacgaaactcacccgtgatttggctaagacattcaagcggcagttaatcaaatccctgagcgatgagagtggtccgcaaacagaacctgttgatattaggacatgcgaccagccaggatcatatccaggcaaagatggaaggatcaatgcacactcaattaaacaagcttacagtggatctacagacacgaacaatccagttgttgaagcttcaaaatacactggaaacaaattttcaatgacatcatacatatctccacgtcttaccccaaccgcaacaccaaagatcatctccacaagtgtgtctcctcgaggctattctgcagcaggttctcctaaaagaacatcaggtgcagtttctcccacaaaggcaacactctggtacccgtcaagtcagcaatcatcggctgcgaattctcctcctcgcaaccgcacactcccagctcgtacaccgcggatggatggtaaagaattcttccggcaagccaggagccgattatcctatgaacaattcagttccttcttagctaacatcaaagagctcaacgcccagaagcaaacccgagaggaaactctgaggaaagcagatgagatatttggggaagagaacaaagatctttatttatctttccaaggtctccttaacagaaacatgcgttaa

SEQ ID NO: 98297 - protein, 323 aa, Arabidopsis thaliana
  peptide (1)..(323): Ceres Seq. ID no. 13593101
  misc_feature (1)..(323): Homolog of NCBI NO: 30684901 NR Description: expressed protein [Arabidopsis thaliana] ESTs gb|N38586 and gb|N38613 come from this gene. [Arabidopsis >gi|26452357|dbj|BAC43264.1| unknown protein [Arabidopsis
  misc_feature (7)..(318): Homolog of NCBI NO: 15222835 NR Description: expressed protein [Arabidopsis thaliana]
  misc_feature (6)..(321): Homolog of NCBI NO: 38344261 NR Description: OSJNBa0008M17.14 [Oryza sativa (japonica
  misc_feature (8)..(321): Homolog of NCBI NO: 18414476 NR Description: expressed protein [Arabidopsis thaliana] AT4g15540/dl3810w [Arabidopsis thaliana] AT4g15540/dl3810w [Arabidopsis thaliana]
  misc_feature (7)..(250): Homolog of NCBI NO: 25404089 NR Description: hypothetical protein T6H22.12 [imported] - thaliana >gi|6056378|gb|AAF02842.1|AC009894_13 Hypothetical
  misc_feature (8)..(293): Homolog of NCBI NO: 7485048 NR Description: hypothetical protein - Arabidopsis thaliana hypothetical protein [Arabidopsis thaliana]
  misc_feature (15)..(126): Homolog of NCBI NO: 23489944 NR Description: hypothetical protein [Plasmodium yoelii yoelii]
  misc_feature (242)..(321): Homolog of NCBI NO: 23489944 NR Description: hypothetical protein [Plasmodium yoelii yoelii]
  misc_feature (15)..(126): Homolog of NCBI NO: 23613663 NR Description: hypothetical protein, conserved [Plasmodium
  misc_feature (242)..(321): Homolog of NCBI NO: 23613663 NR Description: hypothetical protein, conserved [Plasmodium
MGDDQLDFELPEEVLSVIPMDPFEQLDLARKITSMAIASRVSNLDSEVVELRQKLLGKESVVRELEEKASRLERDCREADSRLKVVLEDNMNLTKEKDSLAMTVTKLTRDLAKTFKRQLIKSLSDESGPQTEPVDIRTCDQPGSYPGKDGRINAHSIKQAYSGSTDTNNPVVEASKYTGNKFSMTSYISPRLTPTATPKIISTSVSPRGYSAAGSPKRTSGAVSPTKATLWYPSSQQSSAANSPPRNRTLPARTPRMDGKEFFRQARSRLSYEQFSSFLANIKELNAQKQTREETLRKADEIFGEENKDLYLSFQGLLNRNMR

SEQ ID NO: 98298 - protein, 304 aa, Arabidopsis thaliana
  peptide (1)..(304): Ceres Seq. ID no. 13593102
  misc_feature (1)..(304): Homolog of NCBI NO: 30684901 NR Description: expressed protein [Arabidopsis thaliana] ESTs gb|N38586 and gb|N38613 come from this gene. [Arabidopsis >gi|26452357|dbj|BAC43264.1| unknown protein [Arabidopsis
  misc_feature (1)..(299): Homolog of NCBI NO: 15222835 NR Description: expressed protein [Arabidopsis thaliana]
  misc_feature (1)..(302): Homolog of NCBI NO: 38344261 NR Description: OSJNBa0008M17.14 [Oryza sativa (japonica
  misc_feature (1)..(302): Homolog of NCBI NO: 18414476 NR Description: expressed protein [Arabidopsis thaliana] AT4g15540/dl3810w [Arabidopsis thaliana] AT4g15540/dl3810w [Arabidopsis thaliana]
  misc_feature (1)..(231): Homolog of NCBI NO: 25404089 NR Description: hypothetical protein T6H22.12 [imported] - thaliana >gi|6056378|gb|AAF02842.1|AC009894_13 Hypothetical
  misc_feature (1)..(274): Homolog of NCBI NO: 7485048 NR Description: hypothetical protein - Arabidopsis thaliana hypothetical protein [Arabidopsis thaliana]
  misc_feature (1)..(107): Homolog of NCBI NO: 23489944 NR Description: hypothetical protein [Plasmodium yoelii yoelii]
  misc_feature (223)..(302): Homolog of NCBI NO: 23489944 NR Description: hypothetical protein [Plasmodium yoelii yoelii]
  misc_feature (1)..(107): Homolog of NCBI NO: 23613663 NR Description: hypothetical protein, conserved [Plasmodium
  misc_feature (223)..(302): Homolog of NCBI NO: 23613663 NR Description: hypothetical protein, conserved [Plasmodium
MDPFEQLDLARKITSMAIASRVSNLDSEVVELRQKLLGKESVVRELEEKASRLERDCREADSRLKVVLEDNMNLTKEKDSLAMTVTKLTRDLAKTFKRQLIKSLSDESGPQTEPVDIRTCDQPGSYPGKDGRINAHSIKQAYSGSTDTNNPVVEASKYTGNKFSMTSYISPRLTPTATPKIISTSVSPRGYSAAGSPKRTSGAVSPTKATLWYPSSQQSSAANSPPRNRTLPARTPRMDGKEFFRQARSRLSYEQFSSFLANIKELNAQKQTREETLRKADEIFGEENKDLYLSFQGLLNRNMR

SEQ ID NO: 98299 - protein, 289 aa, Arabidopsis thaliana
  peptide (1)..(289): Ceres Seq. ID no. 13593103
  misc_feature (1)..(289): Homolog of NCBI NO: 30684901 NR Description: expressed protein [Arabidopsis thaliana] ESTs gb|N38586 and gb|N38613 come from this gene. [Arabidopsis >gi|26452357|dbj|BAC43264.1| unknown protein [Arabidopsis
  misc_feature (1)..(284): Homolog of NCBI NO: 15222835 NR Description: expressed protein [Arabidopsis thaliana]
  misc_feature (1)..(287): Homolog of NCBI NO: 38344261 NR Description: OSJNBa0008M17.14 [Oryza sativa (japonica
  misc_feature (1)..(287): Homolog of NCBI NO: 18414476 NR Description: expressed protein [Arabidopsis thaliana] AT4g15540/dl3810w [Arabidopsis thaliana] AT4g15540/dl3810w [Arabidopsis thaliana]
  misc_feature (1)..(216): Homolog of NCBI NO: 25404089 NR Description: hypothetical protein T6H22.12 [imported] - thaliana >gi|6056378|gb|AAF02842.1|AC009894_13 Hypothetical
  misc_feature (1)..(259): Homolog of NCBI NO: 7485048 NR Description: hypothetical protein - Arabidopsis thaliana hypothetical protein [Arabidopsis thaliana]
  misc_feature (1)..(92): Homolog of NCBI NO: 23489944 NR Description: hypothetical protein [Plasmodium yoelii yoelii]
  misc_feature (208)..(287): Homolog of NCBI NO: 23489944 NR Description: hypothetical protein [Plasmodium yoelii yoelii]
  misc_feature (1)..(92): Homolog of NCBI NO: 23613663 NR Description: hypothetical protein, conserved [Plasmodium
  misc_feature (208)..(287): Homolog of NCBI NO: 23613663 NR Description: hypothetical protein, conserved [Plasmodium
MAIASRVSNLDSEVVELRQKLLGKESVVRELEEKASRLERDCREADSRLKVVLEDNMNLTKEKDSLAMTVTKLTRDLAKTFKRQLIKSLSDESGPQTEPVDIRTCDQPGSYPGKDGRINAHSIKQAYSGSTDTNNPVVEASKYTGNKFSMTSYISPRLTPTATPKIISTSVSPRGYSAAGSPKRTSGAVSPTKATLWYPSSQQSSAANSPPRNRTLPARTPRMDGKEFFRQARSRLSYEQFSSFLANIKELNAQKQTREETLRKADEIFGEENKDLYLSFQGLLNRNMR

SEQ ID NO: 98300 - DNA, 1450 bp, Arabidopsis thaliana
  misc_feature (1)..(1450): Ceres Seq. ID no. 13593112
  misc_feature: MA Experiment ID: 20000171 Result: Up-regulated in Transcription
  misc_feature: MA Experiment 20000171 PARAMETER Experiment Name: At_42deg_Heat_P Parameter: Age (day) Value: 14
  misc_feature: MA Experiment 20000171 PARAMETER Experiment Name: At_42deg_Heat_P Parameter: Organism Value: A. thaliana
  misc_feature: MA Experiment 20000171 PARAMETER Experiment Name: At_42deg_Heat_P Parameter: Plant Line Value: WS
  misc_feature: MA Experiment 20000171 PARAMETER Experiment Name: At_42deg_Heat_P Parameter: Temperature (deg C) Value: 42 vs. 22
  misc_feature: MA Experiment 20000171 PARAMETER Experiment Name: At_42deg_Heat_P Parameter: Timepoint (hr) Value: 1
  misc_feature: MA Experiment 20000171 PARAMETER Experiment Name: At_42deg_Heat_P Parameter: Tissue Value: Aerial
  misc_feature: MA Experiment ID: 20000437 Result: Up-regulated in Transcription
  misc_feature: MA Experiment 20000437 PARAMETER Experiment Name: At_Drought_P Parameter: Age (day) Value: 8
  misc_feature: MA Experiment 20000437 PARAMETER Experiment Name: At_Drought_P Parameter: Organism Value: A. thaliana
  misc_feature: MA Experiment 20000437 PARAMETER Experiment Name: At_Drought_P Parameter: Plant Line Value: WS
  misc_feature: MA Experiment 20000437 PARAMETER Experiment Name: At_Drought_P Parameter: Timepoint (hr) Value: 24
  misc_feature: MA Experiment 20000437 PARAMETER Experiment Name: At_Drought_P Parameter: Tissue Value: Whole Plant
  misc_feature: MA Experiment 20000437 PARAMETER Experiment Name: At_Drought_P Parameter: Treatment Value: Drought vs. No Drought
  misc_feature: MA Experiment ID: 20001248 Result: Up-regulated in Transcription
  misc_feature: MA Experiment 20001248 PARAMETER Experiment Name: At_Far-red-induction_P Parameter: Age (day) Value: 7
  misc_feature: MA Experiment 20001248 PARAMETER Experiment Name: At_Far-red-induction_P Parameter: Light Value: Far-red vs. White
  misc_feature: MA Experiment 20001248 PARAMETER Experiment Name: At_Far-red-induction_P Parameter: Organism Value: A. thaliana
  misc_feature: MA Experiment 20001248 PARAMETER Experiment Name: At_Far-red-induction_P Parameter: Plant Line Value: Columbia
  misc_feature: MA Experiment 20001248 PARAMETER Experiment Name: At_Far-red-induction_P Parameter: Timepoint (hr) Value: 4
  misc_feature: MA Experiment 20001248 PARAMETER Experiment Name: At_Far-red-induction_P Parameter: Tissue Value: Whole Plant
gcagccaagaaatgcgggacgatggtgatgctcggtgtgctccagcttccctgccgcctccatcactctctcttttactcctcttcccaaattgcttcttctcgccctcaaggtgttgctaaagtggttctgaaaaaaggcaagacacagctcttcaaagacggaagtccaatggtgtacagtggagctgtcgacaggatcatcggaaaaccacctcctcagacaggagatgttgtcattgtagctgatggcactgagaatcccattggttggggtttgtataactctgtttctatgttctgtgttcgccttatgcagcttcaacacgaatccaccagagatccttcttgtgcattgaacattgagaagcttctccaaacaagaatcgctgaagcagttcagttgcgaaagagtttggcacttccctcggctaatactaatgcttatcgtcttgtcaacagtgaaggagatagattgtctggattgattgtggatgtgtttggagatatagctgtggtagcatcctctgctgcttggcttgaaaagtacaggattgaagtggagagttgcttaagatcaattgacggaattaatcatataaactggagaccttctcttgatgttcttaaagaagatggttttgacatctcaagtctgaaacagacacaatcatctactctcccacagagatcaatggtacggtgtgtggtgcccttaatcaggttgtggaaaatgggatctcatacgcaatttcgctagagggacagaagacagggttctacacggatcagcgcgaaaaccgtcacttcatatcaaccatctctgctggtaaaagagttcttgatctttgctgctatagtggtggatttgcactgaatgcagcgagaggaggtgctaccagtgttatcggaattgattcatctttacctgctttggagctcgccagagagaatgtaatcctcaacaatatggatccagagaaggttgttttctttaaacaagattcaacagaattcatgaagggtgcactgtcaagagaagagacatgggacatcgtgatcctagaccctcctaagctagctccgcggaaaaaggttttgcacaacgcttcaggaatgtacagaaatctcaactcgttggcaatgcgattgacaaggagtggcggtcttatgatgacatgctcatgttcaggggcaatgacacagagcgggaagttcttggggatacttcagagtgctgcagcaatgtcaggaaggaagatcacagtggtgcgggaggcaggagctgcgtctgaccacccactcgacccatcttaccctcaaggccaatatctctccaaccttctgcttcgggtgctgtgagcgcacggaagtttggtttgttagttcaacttttttttgtccgtagtttgtaaccatacatagaagacttataaaaggcagatttgggg

SEQ ID NO: 98301 - protein, 252 aa, Arabidopsis thaliana
  peptide (1)..(252): Ceres Seq. ID no. 13593113
  misc_feature (8)..(252): Homolog of NCBI NO: 18404875 NR Description: expressed protein [Arabidopsis thaliana] At1g54310/F20D21_13 [Arabidopsis thaliana]
  misc_feature (1)..(245): Homolog of NCBI NO: 25405715 NR Description: hypothetical protein F20D21.13 [imported] - thaliana >gi|4585975|gb|AAD25611.1|AC005287_13 Hypothetical
  misc_feature (41)..(217): Homolog of NCBI NO: 33347501 NR Description: putative oxidoreductase [Escherichia coli K12] Hypothetical protein yccW >gi|4062534|dbj|BAA35732.1|
  misc_feature (41)..(217): Homolog of NCBI NO: 38703907 NR Description: putative oxidoreductase [Escherichia coli O157:H7]
  misc_feature (52)..(229): Homolog of NCBI NO: 21233648 NR Description: oxidoreductase [Xanthomonas campestris pv. str. ATCC 33913] >gi|21115519|gb|AAM43447.1| oxidoreductase
  misc_feature (41)..(217): Homolog of NCBI NO: 26246990 NR Description: Hypothetical protein yccW [Escherichia coli >gi|26107390|gb|AAN79573.1|AE016758_177 Hypothetical protein yccW
  misc_feature (41)..(217): Homolog of NCBI NO: 24112380 NR Description: orf, conserved hypothetical protein [Shigella
  misc_feature (41)..(214): Homolog of NCBI NO: 29349739 NR Description: conserved hypothetical protein [Bacteroides
  misc_feature (39)..(214): Homolog of NCBI NO: 20807963 NR Description: predicted SAM-dependent methyltransferases
  misc_feature (44)..(200): Homolog of NCBI NO: 23137970 NR Description: hypothetical protein [Cytophaga hutchinsonii]
AAKKCGTMVMLGVLQLPCRLHHSLFYSSSQIASSRPQGVAKVVLKKGKTQLFKDGSPMVYSGAVDRIIGKPPPQTGDVVIVADGTENPIGWGLYNSVSMFCVRLMQLQHESTRDPSCALNIEKLLQTRIAEAVQLRKSLALPSANTNAYRLVNSEGDRLSGLIVDVFGDIAVVASSAAWLEKYRIEVESCLRSIDGINHINWRPSLDVLKEDGFDISSLKQTQSSTLPQRSMVRCVVPLIRLWKMGSHTQFR

SEQ ID NO: 98302 - protein, 245 aa, Arabidopsis thaliana
  peptide (1)..(245): Ceres Seq. ID no. 13593114
  misc_feature (1)..(245): Homolog of NCBI NO: 18404875 NR Description: expressed protein [Arabidopsis thaliana] At1g54310/F20D21_13 [Arabidopsis thaliana]
  misc_feature (1)..(238): Homolog of NCBI NO: 25405715 NR Description: hypothetical protein F20D21.13 [imported] - thaliana >gi|4585975|gb|AAD25611.1|AC005287_13 Hypothetical
  misc_feature (34)..(210): Homolog of NCBI NO: 33347501 NR Description: putative oxidoreductase [Escherichia coli K12] Hypothetical protein yccW >gi|4062534|dbj|BAA35732.1|
  misc_feature (34)..(210): Homolog of NCBI NO: 38703907 NR Description: putative oxidoreductase [Escherichia coli O157:H7]
  misc_feature (45)..(222): Homolog of NCBI NO: 21233648 NR Description: oxidoreductase [Xanthomonas campestris pv. str. ATCC 33913] >gi|21115519|gb|AAM43447.1| oxidoreductase
  misc_feature (34)..(210): Homolog of NCBI NO: 26246990 NR Description: Hypothetical protein yccW [Escherichia coli >gi|26107390|gb|AAN79573.1|AE016758_177 Hypothetical protein yccW
  misc_feature (34)..(210): Homolog of NCBI NO: 24112380 NR Description: orf, conserved hypothetical protein [Shigella
  misc_feature (34)..(207): Homolog of NCBI NO: 29349739 NR Description: conserved hypothetical protein [Bacteroides
  misc_feature (32)..(207): Homolog of NCBI NO: 20807963 NR Description: predicted SAM-dependent methyltransferases
  misc_feature (37)..(193): Homolog of NCBI NO: 23137970 NR Description: hypothetical protein [Cytophaga hutchinsonii]
MVMLGVLQLPCRLHHSLFYSSSQIASSRPQGVAKVVLKKGKTQLFKDGSPMVYSGAVDRIIGKPPPQTGDVVIVADGTENPIGWGLYNSVSMFCVRLMQLQHESTRDPSCALNIEKLLQTRIAEAVQLRKSLALPSANTNAYRLVNSEGDRLSGLIVDVFGDIAVVASSAAWLEKYRIEVESCLRSIDGINHINWRPSLDVLKEDGFDISSLKQTQSSTLPQRSMVRCVVPLIRLWKMGSHTQFR

SEQ ID NO: 98303 - protein, 243 aa, Arabidopsis thaliana
  peptide (1)..(243): Ceres Seq. ID no. 13593115
  misc_feature (1)..(243): Homolog of NCBI NO: 18404875 NR Description: expressed protein [Arabidopsis thaliana] At1g54310/F20D21_13 [Arabidopsis thaliana]
  misc_feature (1)..(236): Homolog of NCBI NO: 25405715 NR Description: hypothetical protein F20D21.13 [imported] - thaliana >gi|4585975|gb|AAD25611.1|AC005287_13 Hypothetical
  misc_feature (32)..(208): Homolog of NCBI NO: 33347501 NR Description: putative oxidoreductase [Escherichia coli K12] Hypothetical protein yccW >gi|4062534|dbj|BAA35732.1|
  misc_feature (32)..(208): Homolog of NCBI NO: 38703907 NR Description: putative oxidoreductase [Escherichia coli O157:H7]
  misc_feature (43)..(220): Homolog of NCBI NO: 21233648 NR Description: oxidoreductase [Xanthomonas campestris pv. str. ATCC 33913] >gi|21115519|gb|AAM43447.1| oxidoreductase
  misc_feature (32)..(208): Homolog of NCBI NO: 26246990 NR Description: Hypothetical protein yccW [Escherichia coli >gi|26107390|gb|AAN79573.1|AE016758_177 Hypothetical protein yccW
  misc_feature (32)..(208): Homolog of NCBI NO: 24112380 NR Description: orf, conserved hypothetical protein [Shigella
  misc_feature (32)..(205): Homolog of NCBI NO: 29349739 NR Description: conserved hypothetical protein [Bacteroides
  misc_feature (30)..(205): Homolog of NCBI NO: 20807963 NR Description: predicted SAM-dependent methyltransferases
  misc_feature (35)..(191): Homolog of NCBI NO: 23137970 NR Description: hypothetical protein [Cytophaga hutchinsonii]
MLGVLQLPCRLHHSLFYSSSQIASSRPQGVAKVVLKKGKTQLFKDGSPMVYSGAVDRIIGKPPPQTGDVVIVADGTENPIGWGLYNSVSMFCVRLMQLQHESTRDPSCALNIEKLLQTRIAEAVQLRKSLALPSANTNAYRLVNSEGDRLSGLIVDVFGDIAVVASSAAWLEKYRIEVESCLRSIDGINHINWRPSLDVLKEDGFDISSLKQTQSSTLPQRSMVRCVVPLIRLWKMGSHTQFR

SEQ ID NO: 98304 - DNA, 1199 bp, Arabidopsis thaliana
  misc_feature (1)..(1199): Ceres Seq. ID no. 13593116
  misc_feature: MA Experiment ID: 108434 Result: Up-regulated in Transcription
  misc_feature: MA Experiment 108434 PARAMETER Experiment Name: At_Root_Tips_cDNA_P Parameter: Tissue Value: Root Tips
  misc_feature: MA Experiment ID: 108435 Result: Down-regulated in Transcription
  misc_feature: MA Experiment 108435 PARAMETER Experiment Name: At_stm_Mutants_cDNA_P Parameter: Plant Line Value: wt Landsburg vs stm
  misc_feature: MA Experiment 108435 PARAMETER Experiment Name: At_stm_Mutants_cDNA_P Parameter: Tissue Value: Shoot Apical Meristem Region
  misc_feature: MA Experiment ID: 108463 Result: Down-regulated in Transcription
  misc_feature: MA Experiment 108463 PARAMETER Experiment Name: At_Germinating_Seeds_cDNA_P Parameter: Age (day) Value: 3 vs. 0
  misc_feature: MA Experiment 108463 PARAMETER Experiment Name: At_Germinating_Seeds_cDNA_P Parameter: Tissue Value: Germinating Seeds
  misc_feature: MA Experiment ID: 108595 Result: Down-regulated in Transcription
  misc_feature: MA Experiment 108595 PARAMETER Experiment Name: At_Ler-pi_Ovule_cDNA_P Parameter: Plant Line Value: null
  misc_feature: MA Experiment ID: 20000069 Result: Down-regulated in Transcription
  misc_feature: MA Experiment 20000069 PARAMETER Experiment Name: At_100uM_ABA_Mutants_cDNA_P Parameter: Plant Line Value: CS23
  misc_feature: MA Experiment 20000069 PARAMETER Experiment Name: At_100uM_ABA_Mutants_cDNA_P Parameter: Timepoint (hr) Value: 6
  misc_feature: MA Experiment 20000069 PARAMETER Experiment Name: At_100uM_ABA_Mutants_cDNA_P Parameter: Tissue Value: Aerial
  misc_feature: MA Experiment 20000069 PARAMETER Experiment Name: At_100uM_ABA_Mutants_cDNA_P Parameter: Treatment Value: 100uM ABA vs. No Treatment
  misc_feature: MA Experiment ID: 20000070 Result: Down-regulated in Transcription
  misc_feature: MA Experiment 20000070 PARAMETER Experiment Name: At_100uM_ABA_Mutants_cDNA_P Parameter: Plant Line Value: CS24
  misc_feature: MA Experiment 20000070 PARAMETER Experiment Name: At_100uM_ABA_Mutants_cDNA_P Parameter: Timepoint (hr) Value: 6
  misc_feature: MA Experiment 20000070 PARAMETER Experiment Name: At_100uM_ABA_Mutants_cDNA_P Parameter: Tissue Value: Aerial
  misc_feature: MA Experiment 20000070 PARAMETER Experiment Name: At_100uM_ABA_Mutants_cDNA_P Parameter: Treatment Value: 100uM ABA vs. No Treatment
  misc_feature: MA Experiment ID: 20000071 Result: Down-regulated in Transcription
  misc_feature: MA Experiment 20000071 PARAMETER Experiment Name: At_100uM_ABA_Mutants_cDNA_P Parameter: Plant Line Value: CS8104
  misc_feature: MA Experiment 20000071 PARAMETER Experiment Name: At_100uM_ABA_Mutants_cDNA_P Parameter: Timepoint (hr) Value: 6
  misc_feature: MA Experiment 20000071 PARAMETER Experiment Name: At_100uM_ABA_Mutants_cDNA_P Parameter: Tissue Value: Aerial
  misc_feature: MA Experiment 20000071 PARAMETER Experiment Name: At_100uM_ABA_Mutants_cDNA_P Parameter: Treatment Value: 100uM ABA vs. No Treatment
  misc_feature: MA Experiment ID: 20000072 Result: Down-regulated in Transcription
  misc_feature: MA Experiment 20000072 PARAMETER Experiment Name: At_100uM_ABA_Mutants_cDNA_P Parameter: Plant Line Value: CS8105
  misc_feature: MA Experiment 20000072 PARAMETER Experiment Name: At_100uM_ABA_Mutants_cDNA_P Parameter: Timepoint (hr) Value: 6
  misc_feature: MA Experiment 20000072 PARAMETER Experiment Name: At_100uM_ABA_Mutants_cDNA_P Parameter: Tissue Value: Aerial
  misc_feature: MA Experiment 20000072 PARAMETER Experiment Name: At_100uM_ABA_Mutants_cDNA_P Parameter: Treatment Value: 100uM ABA vs. No Treatment
  misc_feature: MA Experiment ID: 20000086 Result: Down-regulated in Transcription
  misc_feature: MA Experiment 20000086 PARAMETER Experiment Name: At_100uM_ABA_Mutants_cDNA_P Parameter: Plant Line Value: CS22
  misc_feature: MA Experiment 20000086 PARAMETER Experiment Name: At_100uM_ABA_Mutants_cDNA_P Parameter: Timepoint (hr) Value: 6
  misc_feature: MA Experiment 20000086 PARAMETER Experiment Name: At_100uM_ABA_Mutants_cDNA_P Parameter: Tissue Value: Aerial
  misc_feature: MA Experiment 20000086 PARAMETER Experiment Name: At_100uM_ABA_Mutants_cDNA_P Parameter: Treatment Value: 100uM ABA vs. No Treatment
  misc_feature: MA Experiment ID: 20000087 Result: Down-regulated in Transcription
  misc_feature: MA Experiment 20000087 PARAMETER Experiment Name: At_100uM_ABA_Mutants_cDNA_P Parameter: Plant Line Value: WS
  misc_feature: MA Experiment 20000087 PARAMETER Experiment Name: At_100uM_ABA_Mutants_cDNA_P Parameter: Timepoint (hr) Value: 6
  misc_feature: MA Experiment 20000087 PARAMETER Experiment Name: At_100uM_ABA_Mutants_cDNA_P Parameter: Tissue Value: Aerial
  misc_feature: MA Experiment 20000087 PARAMETER Experiment Name: At_100uM_ABA_Mutants_cDNA_P Parameter: Treatment Value: 100uM ABA vs. No Treatment
  misc_feature: MA Experiment ID: 20000088 Result: Down-regulated in Transcription
  misc_feature: MA Experiment 20000088 PARAMETER Experiment Name: At_100uM_ABA_Mutants_cDNA_P Parameter: Plant Line Value: Landsberg
  misc_feature: MA Experiment 20000088 PARAMETER Experiment Name: At_100uM_ABA_Mutants_cDNA_P Parameter: Timepoint (hr) Value: 6
  misc_feature: MA Experiment 20000088 PARAMETER Experiment Name: At_100uM_ABA_Mutants_cDNA_P Parameter: Tissue Value: Aerial
  misc_feature: MA Experiment 20000088 PARAMETER Experiment Name: At_100uM_ABA_Mutants_cDNA_P Parameter: Treatment Value: 100uM ABA vs. No Treatment
  misc_feature: MA Experiment ID: 20000117 Result: Down-regulated in Transcription
  misc_feature: MA Experiment 20000117 PARAMETER Experiment Name: At_100uM_ABA_Mutants_cDNA_P Parameter: Plant Line Value: Columbia
  misc_feature: MA Experiment 20000117 PARAMETER Experiment Name: At_100uM_ABA_Mutants_cDNA_P Parameter: Timepoint (hr) Value: 6
  misc_feature: MA Experiment 20000117 PARAMETER Experiment Name: At_100uM_ABA_Mutants_cDNA_P Parameter: Tissue Value: Aerial
  misc_feature: MA Experiment 20000117 PARAMETER Experiment Name: At_100uM_ABA_Mutants_cDNA_P Parameter: Treatment Value: 100uM ABA vs. No Treatment
  misc_feature: MA Experiment ID: 20000185 Result: Down-regulated in Transcription
  misc_feature: MA Experiment 20000185 PARAMETER Experiment Name: At_Roots__P Parameter: Age (day) Value: 7 vs. 21
  misc_feature: MA Experiment 20000185 PARAMETER Experiment Name: At_Roots__P Parameter: Organism Value: A. thaliana
  misc_feature: MA Experiment 20000185 PARAMETER Experiment Name: At_Roots__P Parameter: Tissue Value: Roots vs. Whole Plant
  misc_feature: MA Experiment ID: 20000439 Result: Down-regulated in Transcription
  misc_feature: MA Experiment 20000439 PARAMETER Experiment Name: At_Roots__P Parameter: Age (day) Value: 14 vs. 21
  misc_feature: MA Experiment 20000439 PARAMETER Experiment Name: At_Roots__P Parameter: Organism Value: A. thaliana
  misc_feature: MA Experiment 20000439 PARAMETER Experiment Name: At_Roots__P Parameter: Tissue Value: Roots vs. Whole Plant
  misc_feature: MA Experiment ID: 20000794 Result: Down-regulated in Transcription
  misc_feature: MA Experiment 20000794 PARAMETER Experiment Name: At_Petals_P Parameter: Age (day) Value: 23-25 days
  misc_feature: MA Experiment 20000794 PARAMETER Experiment Name: At_Petals_P Parameter: Plant Line Value: WS
  misc_feature: MA Experiment 20000794 PARAMETER Experiment Name: At_Petals_P Parameter: Tissue Value: Petals vs. Whole plant
  misc_feature: MA Experiment ID: 20001757 Result: Up-regulated in Transcription
  misc_feature: MA Experiment 20001757 PARAMETER Experiment Name: At_50mM_NH4NO3_L-to-H_P Parameter: Timepoint (hr) Value: 6
  misc_feature: MA Experiment 20001757 PARAMETER Experiment Name: At_50mM_NH4NO3_L-to-H_P Parameter: Tissue Value: Leaf
  misc_feature: MA Experiment 20001757 PARAMETER Experiment Name: At_50mM_NH4NO3_L-to-H_P Parameter: Treatment Value: 50mM NH4NO3 vs 100mM Mannitol
  misc_feature: MA Experiment ID: 20001906 Result: Down-regulated in Transcription
  misc_feature: MA Experiment 20001906 PARAMETER Experiment Name: At_Drought_Reproduction_P Parameter: Age (day) Value: 35
  misc_feature: MA Experiment 20001906 PARAMETER Experiment Name: At_Drought_Reproduction_P Parameter: Organism Value: A. thaliana
  misc_feature: MA Experiment 20001906 PARAMETER Experiment Name: At_Drought_Reproduction_P Parameter: Plant Line Value: WS
  misc_feature: MA Experiment 20001906 PARAMETER Experiment Name: At_Drought_Reproduction_P Parameter: Timepoint (day) Value: 5
  misc_feature: MA Experiment 20001906 PARAMETER Experiment Name: At_Drought_Reproduction_P Parameter: Tissue Value: Siliques
  misc_feature: MA Experiment 20001906 PARAMETER Experiment Name: At_Drought_Reproduction_P Parameter: Treatment Value: Drought vs. No Drought
ttcctcttcttttctcttctccttccacttccacttcttctatctctcacaattcagcaatggcttcttctatagttacctctagcttgaagcctttagccatggccgattcttcctcttctaccattttctcccatccttccatctcctctaccatctcttcctccagaattcgcagctccagtgtttccctccttaccggacgcattaacctgcccctctctttctctcgcgtctctctatctcttaaaaccaaaacccaccttaaaaaatccccctttgtctccttcgttgcccagacttcggattgggctgaagaaggtggagaaggaagcgtcgctgttgaggagaccgagaacagtttagagtcacaagatgtgagcgaaggagatgagagcgaaggagatgcgagcgaaggagatgtgagcgaaggagatgagagcgaaggagatgtgagcgaaggagctgtgagcgaaagagctgagttcccggagccatcggaagaagccaagcttttcgtcggaaatttggcttatgatgttaatagccaagctttggctatgctctttgagcaagccggtactgttgaaatcgccgaggttatatacaatagggaaactgaccagagtcgtgggtttggatttgtgacaatgagttctgtggacgaagctgagacagctgtggagaagttcaaccgttatgatcttaacggacgtctactaactgtaaacaaggcagctccaagaggatcacgtccagaacgtgcgcctcgggtatatgaacctgcattcagagtatatgtagggaatctaccatgggatgtggacaatggccgtctagaacagcttttcagtgagcatggtaaagttgtggaagctagggtggtttacgaccgtgagacaggtcgttcacgtggattcgggtttgtcacaatgtctgacgtggatgaactcaacgaagccatctctgccctcgatggacagaacttggagggtagagcaatcagagtgaatgtagcggaagagcgtcctccaaggcgtggatattaaagctgagatctagctgtgccctctctctctccctatcttgcattttgtttagacgagattcttacactcttcaacgattgtttttggctgaactctgaatgtgaaagttaagctgcttctaaagtaatttgtatcgcttgtttttgatga

SEQ ID NO: 98305 - protein, 348 aa, Arabidopsis thaliana
  peptide (1)..(348): Ceres Seq. ID no. 13593117
  misc_feature (265)..(336): Pfam Name: RNA recognition motif. (a.k.a. RRM, RBD, or RNP domain) Pfam Description: RNA recognition motif. (a.k.a. RRM, RBD, or RNP
  misc_feature (20)..(348): Homolog of NCBI NO: 15233980 NR Description: 31 kDa ribonucleoprotein, chloroplast
  misc_feature (20)..(348): Homolog of NCBI NO: 15294254 NR Description: AT4g24770/F22K18_30 [Arabidopsis thaliana]
  misc_feature (34)..(348): Homolog of NCBI NO: 475719 NR Description: RNA-binding protein 2
  misc_feature (20)..(348): Homolog of NCBI NO: 1076305 NR Description: RNA-binding protein cp31 precursor - Arabidopsis
  misc_feature (30)..(348): Homolog of NCBI NO: 681908 NR Description: cp31 [Arabidopsis thaliana]
  misc_feature (85)..(348): Homolog of NCBI NO: 629557 NR Description: RNA-binding protein RNP-D precursor - Arabidopsis (fragment) >gi|510240|emb|CAA43420.1| RNA binding protein
  misc_feature (105)..(348): Homolog of NCBI NO: 99684 NR Description: DNA-binding protein - Arabidopsis thaliana
  misc_feature (72)..(348): Homolog of NCBI NO: 19032260 NR Description: RNA-binding protein precursor [Persea americana]
  misc_feature (187)..(348): Homolog of NCBI NO: 475720 NR Description: RNA-binding protein 3
  misc_feature (123)..(345): Homolog of NCBI NO: 15240641 NR Description: 31 kDa ribonucleoprotein, chloroplast
PLLFSSPSTSTSSISHNSAMASSIVTSSLKPLAMADSSSSTIFSHPSISSTISSSRIRSSSVSLLTGRINLPLSFSRVSLSLKTKTHLKKSPFVSFVAQTSDWAEEGGEGSVAVEETENSLESQDVSEGDESEGDASEGDVSEGDESEGDVSEGAVSERAEFPEPSEEAKLFVGNLAYDVNSQALAMLFEQAGTVEIAEVIYNRETDQSRGFGFVTMSSVDEAETAVEKFNRYDLNGRLLTVNKAAPRGSRPERAPRVYEPAFRVYVGNLPWDVDNGRLEQLFSEHGKVVEARVVYDRETGRSRGFGFVTMSDVDELNEAISALDGQNLEGRAIRVNVAEERPPRRGY

SEQ ID NO: 98306 - protein, 329 aa, Arabidopsis thaliana
  peptide (1)..(329): Ceres Seq. ID no. 13593118
  misc_feature (246)..(317): Pfam Name: RNA recognition motif. (a.k.a. RRM, RBD, or RNP domain) Pfam Description: RNA recognition motif. (a.k.a. RRM, RBD, or RNP
  misc_feature (1)..(329): Homolog of NCBI NO: 15233980 NR Description: 31 kDa ribonucleoprotein, chloroplast
  misc_feature (1)..(329): Homolog of NCBI NO: 15294254 NR Description: AT4g24770/F22K18_30 [Arabidopsis thaliana]
  misc_feature (15)..(329): Homolog of NCBI NO: 475719 NR Description: RNA-binding protein 2
  misc_feature (1)..(329): Homolog of NCBI NO: 1076305 NR Description: RNA-binding protein cp31 precursor - Arabidopsis
  misc_feature (11)..(329): Homolog of NCBI NO: 681908 NR Description: cp31 [Arabidopsis thaliana]
  misc_feature (66)..(329): Homolog of NCBI NO: 629557 NR Description: RNA-binding protein RNP-D precursor - Arabidopsis (fragment) >gi|510240|emb|CAA43420.1| RNA binding protein
  misc_feature (86)..(329): Homolog of NCBI NO: 99684 NR Description: DNA-binding protein - Arabidopsis thaliana
  misc_feature (53)..(329): Homolog of NCBI NO: 19032260 NR Description: RNA-binding protein precursor [Persea americana]
  misc_feature (168)..(329): Homolog of NCBI NO: 475720 NR Description: RNA-binding protein 3
  misc_feature (104)..(326): Homolog of NCBI NO: 15240641 NR Description: 31 kDa ribonucleoprotein, chloroplast
MASSIVTSSLKPLAMADSSSSTIFSHPSISSTISSSRIRSSSVSLLTGRINLPLSFSRVSLSLKTKTHLKKSPFVSFVAQTSDWAEEGGEGSVAVEETENSLESQDVSEGDESEGDASEGDVSEGDESEGDVSEGAVSERAEFPEPSEEAKLFVGNLAYDVNSQALAMLFEQAGTVEIAEVIYNRETDQSRGFGFVTMSSVDEAETAVEKFNRYDLNGRLLTVNKAAPRGSRPERAPRVYEPAFRVYVGNLPWDVDNGRLEQLFSEHGKVVEARVVYDRETGRSRGFGFVTMSDVDELNEAISALDGQNLEGRAIRVNVAEERPPRRGY

SEQ ID NO: 98307 - protein, 315 aa, Arabidopsis thaliana
  peptide (1)..(315): Ceres Seq. ID no. 13593119
  misc_feature (232)..(303): Pfam Name: RNA recognition motif. (a.k.a. RRM, RBD, or RNP domain) Pfam Description: RNA recognition motif. (a.k.a. RRM, RBD, or RNP
  misc_feature (1)..(315): Homolog of NCBI NO: 15233980 NR Description: 31 kDa ribonucleoprotein, chloroplast
  misc_feature (1)..(315): Homolog of NCBI NO: 15294254 NR Description: AT4g24770/F22K18_30 [Arabidopsis thaliana]
  misc_feature (1)..(315): Homolog of NCBI NO: 475719 NR Description: RNA-binding protein 2
  misc_feature (1)..(315): Homolog of NCBI NO: 1076305 NR Description: RNA-binding protein cp31 precursor - Arabidopsis
  misc_feature (1)..(315): Homolog of NCBI NO: 681908 NR Description: cp31 [Arabidopsis thaliana]
  misc_feature (52)..(315): Homolog of NCBI NO: 629557 NR Description: RNA-binding protein RNP-D precursor - Arabidopsis (fragment) >gi|510240|emb|CAA43420.1| RNA binding protein
  misc_feature (72)..(315): Homolog of NCBI NO: 99684 NR Description: DNA-binding protein - Arabidopsis thaliana
  misc_feature (39)..(315): Homolog of NCBI NO: 19032260 NR Description: RNA-binding protein precursor [Persea americana]
  misc_feature (154)..(315): Homolog of NCBI NO: 475720 NR Description: RNA-binding protein 3
  misc_feature (90)..(312): Homolog of NCBI NO: 15240641 NR Description: 31 kDa ribonucleoprotein, chloroplast
MADSSSSTIFSHPSISSTISSSRIRSSSVSLLTGRINLPLSFSRVSLSLKTKTHLKKSPFVSFVAQTSDWAEEGGEGSVAVEETENSLESQDVSEGDESEGDASEGDVSEGDESEGDVSEGAVSERAEFPEPSEEAKLFVGNLAYDVNSQALAMLFEQAGTVEIAEVIYNRETDQSRGFGFVTMSSVDEAETAVEKFNRYDLNGRLLTVNKAAPRGSRPERAPRVYEPAFRVYVGNLPWDVDNGRLEQLFSEHGKVVEARVVYDRETGRSRGFGFVTMSDVDELNEAISALDGQNLEGRAIRVNVAEERPPRRGY

SEQ ID NO: 98308 - DNA, 3181 bp, Arabidopsis thaliana
  misc_feature (1)..(3181): Ceres Seq. ID no. 13593125
  misc_feature: MA Experiment ID: 20001247 Result: Up-regulated in Transcription
  misc_feature: MA Experiment 20001247 PARAMETER Experiment Name: At_Far-red-induction_P Parameter: Age (day) Value: 7
  misc_feature: MA Experiment 20001247 PARAMETER Experiment Name: At_Far-red-induction_P Parameter: Light Value: Far-red vs. White
  misc_feature: MA Experiment 20001247 PARAMETER Experiment Name: At_Far-red-induction_P Parameter: Organism Value: A. thaliana
  misc_feature: MA Experiment 20001247 PARAMETER Experiment Name: At_Far-red-induction_P Parameter: Plant Line Value: Columbia
  misc_feature: MA Experiment 20001247 PARAMETER Experiment Name: At_Far-red-induction_P Parameter: Timepoint (hr) Value: 1
  misc_feature: MA Experiment 20001247 PARAMETER Experiment Name: At_Far-red-induction_P Parameter: Tissue Value: Whole Plant
  misc_feature: MA Experiment ID: 20001248 Result: Up-regulated in Transcription
  misc_feature: MA Experiment 20001248 PARAMETER Experiment Name: At_Far-red-induction_P Parameter: Age (day) Value: 7
  misc_feature: MA Experiment 20001248 PARAMETER Experiment Name: At_Far-red-induction_P Parameter: Light Value: Far-red vs. White
  misc_feature: MA Experiment 20001248 PARAMETER Experiment Name: At_Far-red-induction_P Parameter: Organism Value: A. thaliana
  misc_feature: MA Experiment 20001248 PARAMETER Experiment Name: At_Far-red-induction_P Parameter: Plant Line Value: Columbia
  misc_feature: MA Experiment 20001248 PARAMETER Experiment Name: At_Far-red-induction_P Parameter: Timepoint (hr) Value: 4
  misc_feature: MA Experiment 20001248 PARAMETER Experiment Name: At_Far-red-induction_P Parameter: Tissue Value: Whole Plant
gtcttcatcactttcctcaaatcccatcactctctttctttcgtttggtccctcaaaaactatataaaatcccaatttcccagctctattaaaaaaaccatatacgtacacacatacaaatactctctgattattttttgtatgtgtgtacgaaaacgcatagctctttgttgtctttgatcgagatttttgctgaatctatcttcgcagtgagatcgattttgttatttgatttcgtttactcgtcaatcggaagttcgatcggaaattgaatgcgtggatctgattacgatcaaatgacctccagcttaagggctactgacattaaggaaattggcaatgggagagacgggagatgatgctgggccatcagagcaaggaccttctaatcaaacctggtggccttcagaatttgtggagaaatttggttctgtttatctgggatcgcaagaagagacatctagtactaaagactcacctagaaatcttgggcaagatgggctgccatctagtactgcttcgaatattctttggagtactggttcactttctgagcccatcccaaatggcttctactctgtgatcccggataatagattgaagcagctatttaataacattcctacattggaagatcttcatgctctgggtgacgaaggtcttaaggctgatgtgattctagttgattttcagaaagataaaaagcttttcaggcagaagcagttgattaccaaacttgtcagtggattgaactcaaagccagctactattattaagaaaattgctggactggtagcagatgtttataagcaatcaactctgcagagtccagcaaaaagtacgcagtcatttgaaaactgtggtattcaactgctaggacagatcaagcatggttcttgtcgtcctcgagcaatcttgttcaaagtcttagctgatactgttggcctgcaaagtcgacttgtagtgggtttgccaagtgatggagctgctgagagtgtggactcatatagtcatatttctgtcactgttttgctgaattctgtggaaatgctggttgacctaatgcgatttcctggtcagcttattcctctatcaaccaaagcaatttttatgagtcatatctcagcggcaggggaaagtgattctgcagagaatgactcttgtgattcacctttggagccaaacagtcccatgtttggttatccagagaaatttgaccatgaaaatgcagaaaaagatgaaaacctttcgttgcacaggaaactggatgggtctccaaatacgtctggtccaccatcaaggaatatgctgttacgatctgcctctgcgctagagaggaaattaagtttctcacagagcgagtcaaacatggctaacgagttttggcggcagagccggaggaaggtcattgctgatcagcggactgctagttccagtcccgaacatctttccttccgagcccgtacaaagtccatgctaagtggcgacaagaacttggcacgagatttcaccggggatgttgccacatcaagctgcaaatctgttggaggagcaaaaatggaaactaagagaataaggaggagaagcatcagtataactcctgagattggcgatgatattgtcagggcagtacgagcgatgaatgaagccttgaagcagaatcgcctctcaaaagagcaaggggatgatgattcatctcctaactctccaaatgacagaaccgagagctctcatctccagaaaaatgtctctggttttcatcttgatgcccatgaccaagtttctggtggaaggtcgacactttcaagggaaccactagatccgcagaaggcaatctcactaccttcttctccccagaactaccgaagccaatatgaacagagtggatcgtcacatcgcaatataagccacatctgggataaagtattgggatctcccatgttccagaataagccattattaccttatgaagaatggaacatagacttctctgagctgactgttgggacacgtgtcggaattggatttttcggagaagtattccgtgggatctggaacgggacagacgttgctatcaaagtgttccttgagcaagaccttacagctgagaacatggaggatttctgcaatgagatatcaattcttagccgacttagacatcccaatgttatactgttccttggagcatgcacaaagcctccacgattatcactgatcactgagtacatggaaatgggatctttgtattacttgctccacttgagtggacaaaaaaagaggttaagctggcggaggaagctaaagatgctgcgggacatttgcaggggattgatgtgtatacaccggatggggatagtacaccgtgatataaagagtgcaaactgtcttttgagcaacaaatggacagtcaagatctgtgattttgggctgtcgagaataatgacagggacaacaatgagagacacagtctctgcaggaactccagagtggatggctcctgaacttatccgcaatgagcccttctcagaaaagtgtgatatcttcagtttaggtgtaataatgtgggagctatgcactttaaccagaccttgggaaggagtaccgcctgaacgggttgtttatgctattgcttacgagggagctcggcttgagattcctgaaggaccactgggaaagcttattgcagattgttggacagaaccggaacaaagaccgagttgcaatgagatactctctcgtttgctggattgtgagtattcgctttgctaactttctctcaatcatattttccttctgtgaatataaaactttgcagcgagagaggtttttgttttcttcgtttcttttttttgaatattgttggctttctcctttgagtttgtacaaaagaactttggcgctttcacatccacaaaaagctttgtggaactcttttccgtttaatcatttgcaaattcgtaaatttcaaaacctctgaaacaaaaaagtaagtcttataaattttacaaaaggtgagaagagttgctcattctttcagtttaaatgatcaagcttgctactctttttcgtaccataaggtttgttccctgctttgcatttgctataagaaaattacggacaaatacatgtacttttcgtttatatttcgtgccttaagaaatgaaaaggagctttgattgac

SEQ ID NO: 98309 - protein, 809 aa, Arabidopsis thaliana; identical to SEQ ID NO: 76093
  peptide (1)..(809): Ceres Seq. ID no. 13593126
  misc_feature (1)..(470): Homolog of NCBI NO: 18086321 NR Description: AT3g58640/F14P22_230 [Arabidopsis thaliana]
  misc_feature (1)..(297): Homolog of NCBI NO: 34911062 NR Description: P0485G01.18 [Oryza sativa (japonica
  misc_feature (663)..(808): Homolog of NCBI NO: 34911062 NR Description: P0485G01.18 [Oryza sativa (japonica
  misc_feature (385)..(515): Homolog of NCBI NO: 34911062 NR Description: P0485G01.18 [Oryza sativa (japonica
  misc_feature (539)..(610): Homolog of NCBI NO: 34911062 NR Description: P0485G01.18 [Oryza sativa (japonica
  misc_feature (499)..(809): Homolog of NCBI NO: 30684784 NR Description: protein kinase family [Arabidopsis thaliana]
  misc_feature (438)..(809): Homolog of NCBI NO: 15227972 NR Description: protein kinase family [Arabidopsis thaliana]
  misc_feature (499)..(782): Homolog of NCBI NO: 25408119 NR Description: probable protein kinase [imported] - Arabidopsis >gi|3201626|gb|AAC20735.1| putative protein kinase [Arabidopsis
  misc_feature (1)..(297): Homolog of NCBI NO: 15224595 NR Description: hypothetical protein [Arabidopsis thaliana]
  misc_feature (545)..(801): Homolog of NCBI NO: 11127921 NR Description: EDR1 [Oryza sativa]

SEQ ID NO: 98310 - protein, 573 aa, Arabidopsis thaliana; identical to SEQ ID NO: 76094
  peptide (1)..(573): Ceres Seq. ID no. 13593127
  misc_feature (1)..(234): Homolog of NCBI NO: 18086321 NR Description: AT3g58640/F14P22_230 [Arabidopsis thaliana]
  misc_feature (1)..(61): Homolog of NCBI NO: 34911062 NR Description: P0485G01.18 [Oryza sativa (japonica
  misc_feature (427)..(572): Homolog of NCBI NO: 34911062 NR Description: P0485G01.18 [Oryza sativa (japonica
  misc_feature (149)..(279): Homolog of NCBI NO: 34911062 NR Description: P0485G01.18 [Oryza sativa (japonica
  misc_feature (303)..(374): Homolog of NCBI NO: 34911062 NR Description: P0485G01.18 [Oryza sativa (japonica
  misc_feature (263)..(573): Homolog of NCBI NO: 30684784 NR Description: protein kinase family [Arabidopsis thaliana]
  misc_feature (202)..(573): Homolog of NCBI NO: 15227972 NR Description: protein kinase family [Arabidopsis thaliana]
  misc_feature (263)..(546): Homolog of NCBI NO: 25408119 NR Description: probable protein kinase [imported] - Arabidopsis >gi|3201626|gb|AAC20735.1| putative protein kinase [Arabidopsis
  misc_feature (1)..(61): Homolog of NCBI NO: 15224595 NR Description: hypothetical protein [Arabidopsis thaliana]
  misc_feature (309)..(565): Homolog of NCBI NO: 11127921 NR Description: EDR1 [Oryza sativa]

SEQ ID NO: 98311 - protein, 568 aa, Arabidopsis thaliana; identical to SEQ ID NO: 76095
  peptide (1)..(568): Ceres Seq. ID no. 13593128
  misc_feature (1)..(229): Homolog of NCBI NO: 18086321 NR Description: AT3g58640/F14P22_230 [Arabidopsis thaliana]
  misc_feature (1)..(56): Homolog of NCBI NO: 34911062 NR Description: P0485G01.18 [Oryza sativa (japonica
  misc_feature (422)..(567): Homolog of NCBI NO: 34911062 NR Description: P0485G01.18 [Oryza sativa (japonica
  misc_feature (144)..(274): Homolog of NCBI NO: 34911062 NR Description: P0485G01.18 [Oryza sativa (japonica
  misc_feature (298)..(369): Homolog of NCBI NO: 34911062 NR Description: P0485G01.18 [Oryza sativa (japonica
  misc_feature (258)..(568): Homolog of NCBI NO: 30684784 NR Description: protein kinase family [Arabidopsis thaliana]
  misc_feature (197)..(568): Homolog of NCBI NO: 15227972 NR Description: protein kinase family [Arabidopsis thaliana]
  misc_feature (258)..(541): Homolog of NCBI NO: 25408119 NR Description: probable protein kinase [imported] - Arabidopsis >gi|3201626|gb|AAC20735.1| putative protein kinase [Arabidopsis
  misc_feature (1)..(56): Homolog of NCBI NO: 15224595 NR Description: hypothetical protein [Arabidopsis thaliana]
  misc_feature (304)..(560): Homolog of NCBI NO: 11127921 NR Description: EDR1 [Oryza sativa]

SEQ ID NO: 98312 - DNA, 1540 bp, Arabidopsis thaliana
  misc_feature (1)..(1540): Ceres Seq. ID no. 13593139
  misc_feature: MA Experiment ID: 20001557 Result: Up-regulated in Transcription
  misc_feature: MA Experiment 20001557 PARAMETER Experiment Name: At_Drought_Soil_Dry_P Parameter: Age (day) Value: 27
  misc_feature: MA Experiment 20001557 PARAMETER Experiment Name: At_Drought_Soil_Dry_P Parameter: Organism Value: A. thaliana
  misc_feature: MA Experiment 20001557 PARAMETER Experiment Name: At_Drought_Soil_Dry_P Parameter: Plant Line Value: WS
  misc_feature: MA Experiment 20001557 PARAMETER Experiment Name: At_Drought_Soil_Dry_P Parameter: Post Timepoint (hr) Value: 3
  misc_feature: MA Experiment 20001557 PARAMETER Experiment Name: At_Drought_Soil_Dry_P Parameter: Post-Treatment Value: Re-Water vs. No Drought
  misc_feature: MA Experiment 20001557 PARAMETER Experiment Name: At_Drought_Soil_Dry_P Parameter: Timepoint (day) Value: 13
  misc_feature: MA Experiment 20001557 PARAMETER Experiment Name: At_Drought_Soil_Dry_P Parameter: Treatment Value: Drought vs. No Drought
  misc_feature: MA Experiment ID: 20001558 Result: Up-regulated in Transcription
  misc_feature: MA Experiment 20001558 PARAMETER Experiment Name: At_Drought_Soil_Dry_P Parameter: Age (day) Value: 27
  misc_feature: MA Experiment 20001558 PARAMETER Experiment Name: At_Drought_Soil_Dry_P Parameter: Organism Value: A. thaliana
  misc_feature: MA Experiment 20001558 PARAMETER Experiment Name: At_Drought_Soil_Dry_P Parameter: Plant Line Value: WS
  misc_feature: MA Experiment 20001558 PARAMETER Experiment Name: At_Drought_Soil_Dry_P Parameter: Post Timepoint (hr) Value: 6
  misc_feature: MA Experiment 20001558 PARAMETER Experiment Name: At_Drought_Soil_Dry_P Parameter: Post-Treatment Value: Re-Water vs. No Drought
  misc_feature: MA Experiment 20001558 PARAMETER Experiment Name: At_Drought_Soil_Dry_P Parameter: Timepoint (day) Value: 13
  misc_feature: MA Experiment 20001558 PARAMETER Experiment Name: At_Drought_Soil_Dry_P Parameter: Treatment Value: Drought vs. No Drought
  misc_feature: MA Experiment ID: 20001560 Result: Up-regulated in Transcription
  misc_feature: MA Experiment 20001560 PARAMETER Experiment Name: At_Drought_Soil_Dry_P Parameter: Age (day) Value: 28
  misc_feature: MA Experiment 20001560 PARAMETER Experiment Name: At_Drought_Soil_Dry_P Parameter: Organism Value: A. thaliana
  misc_feature: MA Experiment 20001560 PARAMETER Experiment Name: At_Drought_Soil_Dry_P Parameter: Plant Line Value: WS
  misc_feature: MA Experiment 20001560 PARAMETER Experiment Name: At_Drought_Soil_Dry_P Parameter: Post Timepoint (hr) Value: None
  misc_feature: MA Experiment 20001560 PARAMETER Experiment Name: At_Drought_Soil_Dry_P Parameter: Post-Treatment Value: None
  misc_feature: MA Experiment 20001560 PARAMETER Experiment Name: At_Drought_Soil_Dry_P Parameter: Timepoint (day) Value: 14
  misc_feature: MA Experiment 20001560 PARAMETER Experiment Name: At_Drought_Soil_Dry_P Parameter: Treatment Value: Drought vs. No Drought
aattttgaatctgagaattcgtgcctccgatctctctccctctcgccgtggatagagatggagagcttaccaacgacggtctcagggaaatcagaccggcgaggtaggttttccaagtctcagaacacctccaagccctctcttatcttggccttcttctcttgtcttgcttggctctacgtcgctggccggttatggcaagatgcgcagtacagagcagcactcaatactgtgcttaagatgaattatgatcagaggcctaaggttcttacggtggaggacaaacttgtggtccttggatgcaaagatcttgagaggagaattgttgaaactgaaatggagttggcacaggcaaagagtcaaggctatcttaaaaaacagaaaagtgtctcttcttcagggaagaaaatgctagctgttattggagtttacacaggctttggaagtcacttgaagcgcaataaatttagaggctcttggatgccacgagatgatgctcttaaaaaacttgaggaaagaggagttgtcatacgctttgtgattggtcggagtgctaaccgaggtgatagcctagatagaaaaattgacgaagaaaatcgtgcaactaaagactttttgattcttgagaatcacgaggaagcccaagaagagttaccgaagaaagtgaagttcttctacagtgctgctgttcagaattgggacgcagagttttatgtcaaagttgatgacaacgttgacttggatcttgaggggatgattgcgcttcttgaaagtcgtcgtagtcaagatggtgcttacattgggtgcatgaaatctggagatgtgattactgaagagggaagtcaatggtatgagcctgagtggtggaaatttggggacgacaaatcgtatttccgtcatgcaactggttcgctggtaatactctcaaagaatctggctcagtatgtcaatataaacagtggattgttgaagacatatgcgtttgatgataccaccattggatcatggatgattggcgtccaggcaacatatatagacgacaatcgcctttgctgcagcagcacaagacaagaaaaagtgtgttccatggcatgatcactgcatagatgatcctcttgtcccagagcaaagacggcggtttctcatcgcattcatggcgctccgatactcttttggggcagattcttggaccggatactgaacttatcattagttttgttagaatgggagtatgattaggccattcattacagtttatgattagaggcatgcgtatcccttgagctttggagtaagaaaatggggaaatggtatagatgtgaatgaagtataatttttcctttggtatcatatcaccatcatttgtccgtccattctagcccaatctctggcaggcgtttaatgttcgaaccttaagtttgcatttttggttgctggtttttaaaaatgtgttagttaagacttaagaggacaaaagaaaatcgtctgctttaagctcataaacacttcggaccaatacgtggttaaaaatacttcattg

SEQ ID NO: 98313 - protein, 364 aa, Arabidopsis thaliana
  peptide (1)..(364): Ceres Seq. ID no. 13593140
  misc_feature (151)..(348): Pfam Name: Galactosyltransferase Pfam Description: Galactosyltransferase
  misc_feature (20)..(364): Homolog of NCBI NO: 15236681 NR Description: galactosyltransferase family [Arabidopsis >gi|15292683|gb|AAK92710.1| unknown protein [Arabidopsis >gi|21281129|gb|AAM44999.1| unknown protein [Arabidopsis
  misc_feature (81)..(364): Homolog of NCBI NO: 26451702 NR Description: unknown protein [Arabidopsis thaliana]
  misc_feature (20)..(357): Homolog of NCBI NO: 15224704 NR Description: galactosyltransferase family [Arabidopsis
  misc_feature (38)..(364): Homolog of NCBI NO: 34898462 NR Description: ESTs D47620(S13223),AU029621(E31157) correspond a region of the predicted gene.~Similar to Arabidopsis thaliana
  misc_feature (33)..(362): Homolog of NCBI NO: 40253477 NR Description: putative Avr9 elicitor response protein [Oryza
  misc_feature (36)..(364): Homolog of NCBI NO: 20372915 NR Description: beta 1,3-glycosyltransferase-like protein I
  misc_feature (47)..(354): Homolog of NCBI NO: 22553068 NR Description: beta 1,3-glycosyltransferase-like protein I
  misc_feature (33)..(362): Homolog of NCBI NO: 18423501 NR Description: galactosyltransferase family [Arabidopsis
  misc_feature (33)..(359): Homolog of NCBI NO: 9759181 NR Description: Avr9 elicitor response protein-like [Arabidopsis
  misc_feature (20)..(163): Homolog of NCBI NO: 7485371 NR Description: hypothetical protein F10N7.70 - Arabidopsis >gi|2827625|emb|CAA16577.1| putative protein [Arabidopsis >gi|7270116|emb|CAB79930.1| putative protein [Arabidopsis
NFESENSCLRSLSLSPWIEMESLPTTVSGKSDRRGRFSKSQNTSKPSLILAFFSCLAWLYVAGRLWQDAQYRAALNTVLKMNYDQRPKVLTVEDKLVVLGCKDLERRIVETEMELAQAKSQGYLKKQKSVSSSGKKMLAVIGVYTGFGSHLKRNKFRGSWMPRDDALKKLEERGVVIRFVIGRSANRGDSLDRKIDEENRATKDFLILENHEEAQEELPKKVKFFYSAAVQNWDAEFYVKVDDNVDLDLEGMIALLESRRSQDGAYIGCMKSGDVITEEGSQWYEPEWWKFGDDKSYFRHATGSLVILSKNLAQYVNINSGLLKTYAFDDTTIGSWMIGVQATYIDDNRLCCSSTRQEKVCSMA

SEQ ID NO: 98314 - protein, 345 aa, Arabidopsis thaliana
  peptide (1)..(345): Ceres Seq. ID no. 13593141
  misc_feature (132)..(329): Pfam Name: Galactosyltransferase Pfam Description: Galactosyltransferase
  misc_feature (1)..(345): Homolog of NCBI NO: 15236681 NR Description: galactosyltransferase family [Arabidopsis >gi|15292683|gb|AAK92710.1| unknown protein [Arabidopsis >gi|21281129|gb|AAM44999.1| unknown protein [Arabidopsis
  misc_feature (62)..(345): Homolog of NCBI NO: 26451702 NR Description: unknown protein [Arabidopsis thaliana]
  misc_feature (1)..(338): Homolog of NCBI NO: 15224704 NR Description: galactosyltransferase family [Arabidopsis
  misc_feature (19)..(345): Homolog of NCBI NO: 34898462 NR Description: ESTs D47620(S13223),AU029621(E31157) correspond a region of the predicted gene.~Similar to Arabidopsis thaliana
  misc_feature (14)..(343): Homolog of NCBI NO: 40253477 NR Description: putative Avr9 elicitor response protein [Oryza
  misc_feature (17)..(345): Homolog of NCBI NO: 20372915 NR Description: beta 1,3-glycosyltransferase-like protein I
  misc_feature (28)..(335): Homolog of NCBI NO: 22553068 NR Description: beta 1,3-glycosyltransferase-like protein I
  misc_feature (14)..(343): Homolog of NCBI NO: 18423501 NR Description: galactosyltransferase family [Arabidopsis
  misc_feature (14)..(340): Homolog of NCBI NO: 9759181 NR Description: Avr9 elicitor response protein-like [Arabidopsis
  misc_feature (1)..(144): Homolog of NCBI NO: 7485371 NR Description: hypothetical protein F10N7.70 - Arabidopsis >gi|2827625|emb|CAA16577.1| putative protein [Arabidopsis >gi|7270116|emb|CAB79930.1| putative protein [Arabidopsis
MESLPTTVSGKSDRRGRFSKSQNTSKPSLILAFFSCLAWLYVAGRLWQDAQYRAALNTVLKMNYDQRPKVLTVEDKLVVLGCKDLERRIVETEMELAQAKSQGYLKKQKSVSSSGKKMLAVIGVYTGFGSHLKRNKFRGSWMPRDDALKKLEERGVVIRFVIGRSANRGDSLDRKIDEENRATKDFLILENHEEAQEELPKKVKFFYSAAVQNWDAEFYVKVDDNVDLDLEGMIALLESRRSQDGAYIGCMKSGDVITEEGSQWYEPEWWKFGDDKSYFRHATGSLVILSKNLAQYVNINSGLLKTYAFDDTTIGSWMIGVQATYIDDNRLCCSSTRQEKVCSMA

SEQ ID NO: 98315 - protein, 284 aa, Arabidopsis thaliana
  peptide (1)..(284): Ceres Seq. ID no. 13593142
  misc_feature (71)..(268): Pfam Name: Galactosyltransferase Pfam Description: Galactosyltransferase
  misc_feature (1)..(284): Homolog of NCBI NO: 15236681 NR Description: galactosyltransferase family [Arabidopsis >gi|15292683|gb|AAK92710.1| unknown protein [Arabidopsis >gi|21281129|gb|AAM44999.1| unknown protein [Arabidopsis
  misc_feature (1)..(284): Homolog of NCBI NO: 26451702 NR Description: unknown protein [Arabidopsis thaliana]
  misc_feature (1)..(277): Homolog of NCBI NO: 15224704 NR Description: galactosyltransferase family [Arabidopsis
  misc_feature (1)..(284): Homolog of NCBI NO: 34898462 NR Description: ESTs D47620(S13223),AU029621(E31157) correspond a region of the predicted gene.~Similar to Arabidopsis thaliana
  misc_feature (1)..(282): Homolog of NCBI NO: 40253477 NR Description: putative Avr9 elicitor response protein [Oryza
  misc_feature (1)..(284): Homolog of NCBI NO: 20372915 NR Description: beta 1,3-glycosyltransferase-like protein I
  misc_feature (1)..(274): Homolog of NCBI NO: 22553068 NR Description: beta 1,3-glycosyltransferase-like protein I
  misc_feature (1)..(282): Homolog of NCBI NO: 18423501 NR Description: galactosyltransferase family [Arabidopsis
  misc_feature (1)..(279): Homolog of NCBI NO: 9759181 NR Description: Avr9 elicitor response protein-like [Arabidopsis
  misc_feature (1)..(83): Homolog of NCBI NO: 7485371 NR Description: hypothetical protein F10N7.70 - Arabidopsis >gi|2827625|emb|CAA16577.1| putative protein [Arabidopsis >gi|7270116|emb|CAB79930.1| putative protein [Arabidopsis
MNYDQRPKVLTVEDKLVVLGCKDLERRIVETEMELAQAKSQGYLKKQKSVSSSGKKMLAVIGVYTGFGSHLKRNKFRGSWMPRDDALKKLEERGVVIRFVIGRSANRGDSLDRKIDEENRATKDFLILENHEEAQEELPKKVKFFYSAAVQNWDAEFYVKVDDNVDLDLEGMIALLESRRSQDGAYIGCMKSGDVITEEGSQWYEPEWWKFGDDKSYFRHATGSLVILSKNLAQYVNINSGLLKTYAFDDTTIGSWMIGVQATYIDDNRLCCSSTRQEKVCSMA

SEQ ID NO: 98316 - DNA, 1805 bp, Arabidopsis thaliana
  misc_feature (1)..(1805): Ceres Seq. ID no. 13593143
  misc_feature: MA Experiment ID: 20000180 Result: Down-regulated in Transcription
  misc_feature: MA Experiment 20000180 PARAMETER Experiment Name: At_Germinating_Seeds_P Parameter: Age (hr) Value: 24 vs. 0
  misc_feature: MA Experiment 20000180 PARAMETER Experiment Name: At_Germinating_Seeds_P Parameter: Tissue Value: Germinating Seeds
  misc_feature: MA Experiment ID: 20000227 Result: Up-regulated in Transcription
  misc_feature: MA Experiment 20000227 PARAMETER Experiment Name: At_Root-Tips-vs-Tops_P Parameter: Tissue Value: Root Tips vs. Root Tops
  misc_feature: MA Experiment ID: 20000234 Result: Up-regulated in Transcription
  misc_feature: MA Experiment 20000234 PARAMETER Experiment Name: At_Siliques_P Parameter: Age (day) Value: 21
  misc_feature: MA Experiment 20000234 PARAMETER Experiment Name: At_Siliques_P Parameter: Organism Value: A. thaliana
  misc_feature: MA Experiment 20000234 PARAMETER Experiment Name: At_Siliques_P Parameter: Plant Line Value: WS
  misc_feature: MA Experiment 20000234 PARAMETER Experiment Name: At_Siliques_P Parameter: Tissue Value: Less Than 5mm Siliques vs. Whole Plant
  misc_feature: MA Experiment ID: 20000495 Result: Up-regulated in Transcription
  misc_feature: MA Experiment 20000495 PARAMETER Experiment Name: At_Guard_Cells_P Parameter: Harvest Date Value: 8/2/2002
  misc_feature: MA Experiment 20000495 PARAMETER Experiment Name: At_Guard_Cells_P Parameter: Organism Value: A. thaliana
  misc_feature: MA Experiment 20000495 PARAMETER Experiment Name: At_Guard_Cells_P Parameter: Tissue Value: Guard Cells vs. Leaves
  misc_feature: MA Experiment ID: 20001458 Result: Up-regulated in Transcription
  misc_feature: MA Experiment 20001458 PARAMETER Experiment Name: At_50mM_NH4NO3_L-to-H_P Parameter: Age (day) Value: Undefined
  misc_feature: MA Experiment 20001458 PARAMETER Experiment Name: At_50mM_NH4NO3_L-to-H_P Parameter: Organism Value: Undefined
  misc_feature: MA Experiment 20001458 PARAMETER Experiment Name: At_50mM_NH4NO3_L-to-H_P Parameter: Plant Line Value: Undefined
  misc_feature: MA Experiment 20001458 PARAMETER Experiment Name: At_50mM_NH4NO3_L-to-H_P Parameter: Timepoint (hr) Value: 2
  misc_feature: MA Experiment 20001458 PARAMETER Experiment Name: At_50mM_NH4NO3_L-to-H_P Parameter: Tissue Value: Siliques
  misc_feature: MA Experiment 20001458 PARAMETER Experiment Name: At_50mM_NH4NO3_L-to-H_P Parameter: Treatment Value: 50mM NH4NO3 vs. 100mM Manitol
  misc_feature: MA Experiment ID: 20001557 Result: Up-regulated in Transcription
  misc_feature: MA Experiment 20001557 PARAMETER Experiment Name: At_Drought_Soil_Dry_P Parameter: Age (day) Value: 27
  misc_feature: MA Experiment 20001557 PARAMETER Experiment Name: At_Drought_Soil_Dry_P Parameter: Organism Value: A. thaliana
  misc_feature: MA Experiment 20001557 PARAMETER Experiment Name: At_Drought_Soil_Dry_P Parameter: Plant Line Value: WS
  misc_feature: MA Experiment 20001557 PARAMETER Experiment Name: At_Drought_Soil_Dry_P Parameter: Post Timepoint (hr) Value: 3
  misc_feature: MA Experiment 20001557 PARAMETER Experiment Name: At_Drought_Soil_Dry_P Parameter: Post-Treatment Value: Re-Water vs. No Drought
  misc_feature: MA Experiment 20001557 PARAMETER Experiment Name: At_Drought_Soil_Dry_P Parameter: Timepoint (day) Value: 13
  misc_feature: MA Experiment 20001557 PARAMETER Experiment Name: At_Drought_Soil_Dry_P Parameter: Treatment Value: Drought vs. No Drought
  misc_feature: MA Experiment ID: 20001560 Result: Up-regulated in Transcription
  misc_feature: MA Experiment 20001560 PARAMETER Experiment Name: At_Drought_Soil_Dry_P Parameter: Age (day) Value: 28
  misc_feature: MA Experiment 20001560 PARAMETER Experiment Name: At_Drought_Soil_Dry_P Parameter: Organism Value: A. thaliana
  misc_feature: MA Experiment 20001560 PARAMETER Experiment Name: At_Drought_Soil_Dry_P Parameter: Plant Line Value: WS
  misc_feature: MA Experiment 20001560 PARAMETER Experiment Name: At_Drought_Soil_Dry_P Parameter: Post Timepoint (hr) Value: None
  misc_feature: MA Experiment 20001560 PARAMETER Experiment Name: At_Drought_Soil_Dry_P Parameter: Post-Treatment Value: None
  misc_feature: MA Experiment 20001560 PARAMETER Experiment Name: At_Drought_Soil_Dry_P Parameter: Timepoint (day) Value: 14
  misc_feature: MA Experiment 20001560 PARAMETER Experiment Name: At_Drought_Soil_Dry_P Parameter: Treatment Value: Drought vs. No Drought
actctctctctctctcacattttctcattctctcctacaacaagtttccgccgctaagccactcactacgcagccatggcaaatcctgaccatgtttcagatgtgctacataatttgtcgattgatccaacaaccaaggctttagctcctgattctgaaacaaagggggcttatggcggaaacggtaatgacttcttgctcaatgatgagttagtggaggctaccaaaattggtaaacctagtcttttgtctaaagatggaggtgtgaccaaagacaagggatccaaccttaagaaactcgggtaccaaagtgcagcttataacgcaaagggttcatatgggaagggtgcctatgcttatgggtactatcccccagcatatcagtacccaagacatggttacactgggagctatgcttcagggaaaaccaatcttcagtatcagtacctgactcagcagggaagatcagctggtaatggtcaatcttatggaggatacatggacaacatttactccaattatgggatgtgtggaccttacacgaatggctatgggtatggctcttacggttatgactcatggaaatacatgcccaattggtatgcggttaacaatacctacaagccaagaaacgggtatcatggatatggcaaagaaaacattgaggggttaaatgagatgaatagaggtccacgagctaagggtttcaacagccaagatggttccaaggtgatggctgtgtctttgaaggagcagagagtgactgagactgagaaactcagtgaagatgtgtctcttttagatcccaaggactacaataagatagatttccctgagacctacacagaagcaaagttttatgtaatcaaatcgtacagtgaagatgatattcataaaagtatcaaatacagtgtttggtccagcactcctaatggtaacaagaagctggatgcctcatataacgaggcaaaacagaagtcagatggctgtcccgtgtttctacttttctctgtaaacactagtggacaatttgttggtttagccgagatggtaggccctgttgatttcaataagactgttgaatactggcaacaggacaaatggattggttgcttccctgttaagtggcatttcgttaaagatatccctaatagctccttgaggcatataactctggagaacaatgagaacaagccggttactaatagcagagacacacaggaagtaaagctcgagcaaggcattaaagtcatcaagattttcaaggaccacgcaagcaagacatgcatcctcgatgattttgagttctatgagaatcgtcaaaagattatccaagaaaggaaaagcaaacacctgcagatcaaaaaacagacattggtggccaatgcagacaaaggtgtaatgtcaaaaattaatcttgtgaaacctcaagagtctactacagcctcagaagatgcagcagcactaggagttgcggctgaagtgactaaagaatcgaaagtggtgaaagagaccgagttacctgtggagaaaaatgctgttgctactgcctgctgaaccaacctttggttttaagtgggaactgggtgggctgttttaggctatttagagcgtttctctagttttgtttccattcctgaatttgcagacttttttttttttttttttggaaccgagttgagagggtagtggcttagtagatgaagttttggcatgagcattcatcatcttgcagttattctctatccctttagtaatggtccaacatatgaggatatgggtaaaagattggtattgaatcagct

SEQ ID NO: 98317 - protein, 493 aa, Arabidopsis thaliana
  peptide (1)..(493): Ceres Seq. ID no. 13593144
  misc_feature (309)..(399): Pfam Name: YT521-B-like family Pfam Description: YT521-B-like family
  misc_feature (1)..(493): Homolog of NCBI NO: 30697466 NR Description: expressed protein [Arabidopsis thaliana] contains similarity to unknown [Arabidopsis thaliana] >gi|17529254|gb|AAL38854.1| unknown
  misc_feature (1)..(493): Homolog of NCBI NO: 30697464 NR Description: expressed protein [Arabidopsis thaliana]
  misc_feature (1)..(493): Homolog of NCBI NO: 15912287 NR Description: AT5g61020/maf19_20 [Arabidopsis thaliana]
  misc_feature (117)..(493): Homolog of NCBI NO: 25084169 NR Description: Unknown protein [Arabidopsis thaliana]
  misc_feature (117)..(493): Homolog of NCBI NO: 30682683 NR Description: expressed protein [Arabidopsis thaliana]
  misc_feature (117)..(493): Homolog of NCBI NO: 30682679 NR Description: expressed protein [Arabidopsis thaliana] gb|AAD10646.1~gene_id:MRP15.12~strong similarity to unknown [Arabidopsis thaliana] >gi|21703124|gb|AAM74503.1|
  misc_feature (91)..(434): Homolog of NCBI NO: 18396717 NR Description: expressed protein [Arabidopsis thaliana]
  misc_feature (91)..(434): Homolog of NCBI NO: 30678991 NR Description: expressed protein [Arabidopsis thaliana] AT3g03950/T11I18_6 [Arabidopsis thaliana]
  misc_feature (91)..(432): Homolog of NCBI NO: 6223640 NR Description: unknown protein [Arabidopsis thaliana]
  misc_feature (76)..(437): Homolog of NCBI NO: 25372787 NR Description: Rubisco subunit binding-protein beta subunit - Arabidopsis thaliana >gi|4204265|gb|AAD10646.1| Hypothetical
MANPDHVSDVLHNLSIDPTTKALAPDSETKGAYGGNGNDFLLNDELVEATKIGKPSLLSKDGGVTKDKGSNLKKLGYQSAAYNAKGSYGKGAYAYGYYPPAYQYPRHGYTGSYASGKTNLQYQYLTQQGRSAGNGQSYGGYMDNIYSNYGMCGPYTNGYGYGSYGYDSWKYMPNWYAVNNTYKPRNGYHGYGKENIEGLNEMNRGPRAKGFNSQDGSKVMAVSLKEQRVTETEKLSEDVSLLDPKDYNKIDFPETYTEAKFYVIKSYSEDDIHKSIKYSVWSSTPNGNKKLDASYNEAKQKSDGCPVFLLFSVNTSGQFVGLAEMVGPVDFNKTVEYWQQDKWIGCFPVKWHFVKDIPNSSLRHITLENNENKPVTNSRDTQEVKLEQGIKVIKIFKDHASKTCILDDFEFYENRQKIIQERKSKHLQIKKQTLVANADKGVMSKINLVKPQESTTASEDAAALGVAAEVTKESKVVKETELPVEKNAVATAC

SEQ ID NO: 98318 - protein, 352 aa, Arabidopsis thaliana; identical to SEQ ID NO: 40623
  peptide (1)..(352): Ceres Seq. ID no. 13593145
  misc_feature (168)..(258): Pfam Name: YT521-B-like family Pfam Description: YT521-B-like family
  misc_feature (1)..(352): Homolog of NCBI NO: 30697466 NR Description: expressed protein [Arabidopsis thaliana] contains similarity to unknown [Arabidopsis thaliana] >gi|17529254|gb|AAL38854.1| unknown
  misc_feature (1)..(352): Homolog of NCBI NO: 30697464 NR Description: expressed protein [Arabidopsis thaliana]
  misc_feature (1)..(352): Homolog of NCBI NO: 15912287 NR Description: AT5g61020/maf19_20 [Arabidopsis thaliana]
  misc_feature (1)..(352): Homolog of NCBI NO: 25084169 NR Description: Unknown protein [Arabidopsis thaliana]
  misc_feature (1)..(352): Homolog of NCBI NO: 30682679 NR Description: expressed protein [Arabidopsis thaliana] gb|AAD10646.1~gene_id:MRP15.12~strong similarity to unknown [Arabidopsis thaliana] >gi|21703124|gb|AAM74503.1|
  misc_feature (1)..(352): Homolog of NCBI NO: 30682683 NR Description: expressed protein [Arabidopsis thaliana]
  misc_feature (1)..(293): Homolog of NCBI NO: 18396717 NR Description: expressed protein [Arabidopsis thaliana]
  misc_feature (1)..(293): Homolog of NCBI NO: 30678991 NR Description: expressed protein [Arabidopsis thaliana] AT3g03950/T11I18_6 [Arabidopsis thaliana]
  misc_feature (1)..(291): Homolog of NCBI NO: 6223640 NR Description: unknown protein [Arabidopsis thaliana]
  misc_feature (1)..(296): Homolog of NCBI NO: 25372787 NR Description: Rubisco subunit binding-protein beta subunit - Arabidopsis thaliana >gi|4204265|gb|AAD10646.1| Hypothetical

SEQ ID NO: 98319 - protein, 343 aa, Arabidopsis thaliana; identical to SEQ ID NO: 40624
  peptide (1)..(343): Ceres Seq. ID no. 13593146
  misc_feature (159)..(249): Pfam Name: YT521-B-like family Pfam Description: YT521-B-like family
  misc_feature (1)..(343): Homolog of NCBI NO: 30697466 NR Description: expressed protein [Arabidopsis thaliana] contains similarity to unknown [Arabidopsis thaliana] >gi|17529254|gb|AAL38854.1| unknown
  misc_feature (1)..(343): Homolog of NCBI NO: 30697464 NR Description: expressed protein [Arabidopsis thaliana]
  misc_feature (1)..(343): Homolog of NCBI NO: 15912287 NR Description: AT5g61020/maf19_20 [Arabidopsis thaliana]
  misc_feature (1)..(343): Homolog of NCBI NO: 25084169 NR Description: Unknown protein [Arabidopsis thaliana]
  misc_feature (1)..(343): Homolog of NCBI NO: 30682679 NR Description: expressed protein [Arabidopsis thaliana] gb|AAD10646.1~gene_id:MRP15.12~strong similarity to unknown [Arabidopsis thaliana] >gi|21703124|gb|AAM74503.1|
  misc_feature (1)..(343): Homolog of NCBI NO: 30682683 NR Description: expressed protein [Arabidopsis thaliana]
  misc_feature (1)..(284): Homolog of NCBI NO: 18396717 NR Description: expressed protein [Arabidopsis thaliana]
  misc_feature (1)..(284): Homolog of NCBI NO: 30678991 NR Description: expressed protein [Arabidopsis thaliana] AT3g03950/T11I18_6 [Arabidopsis thaliana]
  misc_feature (1)..(282): Homolog of NCBI NO: 6223640 NR Description: unknown protein [Arabidopsis thaliana]
  misc_feature (1)..(287): Homolog of NCBI NO: 25372787 NR Description: Rubisco subunit binding-protein beta subunit - Arabidopsis thaliana >gi|4204265|gb|AAD10646.1| Hypothetical

SEQ ID NO: 98320 - DNA, 2445 bp, Arabidopsis thaliana
  misc_feature (1)..(2445): Ceres Seq. ID no. 13593147
  misc_feature: MA Experiment ID: 20000184 Result: Down-regulated in Transcription
  misc_feature: MA Experiment 20000184 PARAMETER Experiment Name: At_Shoots__P Parameter: Age (day) Value: 7
  misc_feature: MA Experiment 20000184 PARAMETER Experiment Name: At_Shoots__P Parameter: Tissue Value: Shoots vs. Whole Plant
  misc_feature: MA Experiment ID: 20001248 Result: Up-regulated in Transcription
  misc_feature: MA Experiment 20001248 PARAMETER Experiment Name: At_Far-red-induction_P Parameter: Age (day) Value: 7
  misc_feature: MA Experiment 20001248 PARAMETER Experiment Name: At_Far-red-induction_P Parameter: Light Value: Far-red vs. White
  misc_feature: MA Experiment 20001248 PARAMETER Experiment Name: At_Far-red-induction_P Parameter: Organism Value: A. thaliana
  misc_feature: MA Experiment 20001248 PARAMETER Experiment Name: At_Far-red-induction_P Parameter: Plant Line Value: Columbia
  misc_feature: MA Experiment 20001248 PARAMETER Experiment Name: At_Far-red-induction_P Parameter: Timepoint (hr) Value: 4
  misc_feature: MA Experiment 20001248 PARAMETER Experiment Name: At_Far-red-induction_P Parameter: Tissue Value: Whole Plant
  misc_feature: MA Experiment ID: 20001450 Result: Up-regulated in Transcription
  misc_feature: MA Experiment 20001450 PARAMETER Experiment Name: At_Far-red-induction_P Parameter: Age (day) Value: 7
  misc_feature: MA Experiment 20001450 PARAMETER Experiment Name: At_Far-red-induction_P Parameter: Light Value: Far-red vs. White
  misc_feature: MA Experiment 20001450 PARAMETER Experiment Name: At_Far-red-induction_P Parameter: Organism Value: A. thaliana
  misc_feature: MA Experiment 20001450 PARAMETER Experiment Name: At_Far-red-induction_P Parameter: Plant Line Value: Columbia
  misc_feature: MA Experiment 20001450 PARAMETER Experiment Name: At_Far-red-induction_P Parameter: Timepoint (hr) Value: 8
  misc_feature: MA Experiment 20001450 PARAMETER Experiment Name: At_Far-red-induction_P Parameter: Tissue Value: Whole Plant
atcccgcgcaactttttcttctcagtttcagtttctctacatcgattcatcgattccactctcttgattgctgtttagatcaatccgtctcgaacccaggggttagtatatagtggatcaaactgatccgacccgacccgacccgaattattaatgtcggaagttaatgagatgagtggtggttctattggcggcgaattgttgagagcgtcgccgaaggttttaacggccggtgatcggaaattactcaaggtggagcttcggccaggggatacgacgtatgtttcgtggaagaagcttatgagggatgctggtaaggtcaatggtttatcggcttcggttcccgacccgcctcctaatgctaaccctaaccttgagtttcgaattgcaccggggcatccagtagagattgaaacgaatgaacaacctcattctaaccgtttcaacgctgttattgagaagatagagaggctctataaggggaacgatagcagtgatggggaagagttagacggtgctcctgatgatgatgagtatgacactgaagattcatttatagatgatgctgaactggatgagtatttcgaagttgataattcaacagttaaacatgatggattttatgtaaatagaggcaagttggagcggatggaaccttcaacaacatctaaccagcaacccaaaaaacggcgacgaaaagattcagcaaaaccctgtcgtgatgcagttgacgtatccgataaacacaccaagttgtctataacagctaggaaaaaggatcaatcaactgctcctgggtcctggaaaacacaggagtcacctttgccttctggagcgcaagatgcaaatacttcagtacctctggatgatgtgaagcattctgatagagcaaatcatcagtctaggaatgatacaagtcacaagtcaagggaaactggatcctctagtgcccttcatcagaaatacagcaacaaaagcttacaccaacaatctacgtccctgctaggaaaatctccccccaatgtctttgcagaggtaacagtagtccgtcagaaagaaaacaatggtatgcatcagctggcaaatgtaacgggaagcagacaatctagtcaagcgtctaaaaaagatggttctaatgtgaagtctaaaacctcaatcctcgagaaagccataagggaactggagaaggtggttgtggaatcaaggcctcctgctatcactgaaaatcaagaagctgatacctcatcccaggcagtgaagagaagattgcccagggatgttaaattgaaacttgctaaagttgctaggattgcgcaggcaagccagggaaaacattcaacagagttaatcaaccgtcttatgagcattgttggtcacctaatccagcttaggtctcttaagaggaacttgaaaatcatgattgatatgggagattctgcaacccgagaaaaggatactaggttcaagcaaatcaacaatgaagttcttgatatgataaaggccaaagtttctttgatggaatcacaggcaatcaaaccagaaggtgcaacatcagacgattttcaggactcagtagaaaagccatctttgaagaagtttgtcatggatgcggcattggaggataaattgtgtgacctatatgacatatttatcgacggattggatgaagatcaaggtccacaaacaaaaaagctatatgtcaatttggctgaactctggccaaatagattgatggattatcgtgggatcaaacatgcaattttccgggcaaaggagagacgaaaagcattgtatggaaaccttgcgaaagagatggatcaaacaaagatgaagaagagtatgaagcagttggtaccaagaacagactgtactgctcagcccaacaccgaattagtggttcagagacaacacagtggggaaaaaaaattgattgttgatccaaatgcaaccagcacttccgtggtcactagtcaaactatggttgacagatcaaatcagcagcagcctgagaagctaaagggaatctcaagctcttgcaatcctacagaggaaacaagagtggtcaagagaaagaacgaggctgtaatggctgagaaacaagtcgttcttgccctgaagaagcccgaacatccacagacacgtgtaatcccagctcctcagaatctgaacatcccacgaacaaccccggacctgaacttgccaagttgacatcacgattgacaaaggagctcttagaaacgccggagacaataacctctggcctcttccttccttgtattttgaggtggcacggcattagtcctggcgatgccgatgcttggtttttttagctacaaagcatggtttataaagttgtctgtattccagtttggctcttattaagttagttactctatttacgtgtcctttttcaaaactctaatgtataaagttatgattttacgg

SEQ ID NO: 98321 - protein, 684 aa, Arabidopsis thaliana
  peptide (1)..(684): Ceres Seq. ID no. 13593148
  misc_feature (10)..(684): Homolog of NCBI NO: 15223894 NR Description: expressed protein [Arabidopsis thaliana]
  misc_feature (10)..(501): Homolog of NCBI NO: 7486999 NR Description: hypothetical protein T14N5.16 - Arabidopsis >gi|3540209|gb|AAC34359.1| Hypothetical protein [Arabidopsis
  misc_feature (212)..(666): Homolog of NCBI NO: 20161447 NR Description: B1065E10.22 [Oryza sativa (japonica
  misc_feature (20)..(185): Homolog of NCBI NO: 20161447 NR Description: B1065E10.22 [Oryza sativa (japonica
  misc_feature (316)..(437): Homolog of NCBI NO: 16506638 NR Description: wound-responsive protein 14.05 [Castanea sativa]
  misc_feature (503)..(663): Homolog of NCBI NO: 4106388 NR Description: unknown [Arabidopsis thaliana]
MSEVNEMSGGSIGGELLRASPKVLTAGDRKLLKVELRPGDTTYVSWKKLMRDAGKVNGLSASVPDPPPNANPNLEFRIAPGHPVEIETNEQPHSNRFNAVIEKIERLYKGNDSSDGEELDGAPDDDEYDTEDSFIDDAELDEYFEVDNSTVKHDGFYVNRGKLERMEPSTTSNQQPKKRRRKDSAKPCRDAVDVSDKHTKLSITARKKDQSTAPGSWKTQESPLPSGAQDANTSVPLDDVKHSDRANHQSRNDTSHKSRETGSSSALHQKYSNKSLHQQSTSLLGKSPPNVFAEVTVVRQKENNGMHQLANVTGSRQSSQASKKDGSNVKSKTSILEKAIRELEKVVVESRPPAITENQEADTSSQAVKRRLPRDVKLKLAKVARIAQASQGKHSTELINRLMSIVGHLIQLRSLKRNLKIMIDMGDSATREKDTRFKQINNEVLDMIKAKVSLMESQAIKPEGATSDDFQDSVEKPSLKKFVMDAALEDKLCDLYDIFIDGLDEDQGPQTKKLYVNLAELWPNRLMDYRGIKHAIFRAKERRKALYGNLAKEMDQTKMKKSMKQLVPRTDCTAQPNTELVVQRQHSGEKKLIVDPNATSTSVVTSQTMVDRSNQQQPEKLKGISSSCNPTEETRVVKRKNEAVMAEKQVVLALKKPEHPQTRVIPAPQNLNIPRTTPDLNLPS

SEQ ID NO: 98322 - protein, 678 aa, Arabidopsis thaliana
  peptide (1)..(678): Ceres Seq. ID no. 13593149
  misc_feature (4)..(678): Homolog of NCBI NO: 15223894 NR Description: expressed protein [Arabidopsis thaliana]
  misc_feature (4)..(495): Homolog of NCBI NO: 7486999 NR Description: hypothetical protein T14N5.16 - Arabidopsis >gi|3540209|gb|AAC34359.1| Hypothetical protein [Arabidopsis
  misc_feature (206)..(660): Homolog of NCBI NO: 20161447 NR Description: B1065E10.22 [Oryza sativa (japonica
  misc_feature (14)..(179): Homolog of NCBI NO: 20161447 NR Description: B1065E10.22 [Oryza sativa (japonica
  misc_feature (310)..(431): Homolog of NCBI NO: 16506638 NR Description: wound-responsive protein 14.05 [Castanea sativa]
  misc_feature (497)..(657): Homolog of NCBI NO: 4106388 NR Description: unknown [Arabidopsis thaliana]
MSGGSIGGELLRASPKVLTAGDRKLLKVELRPGDTTYVSWKKLMRDAGKVNGLSASVPDPPPNANPNLEFRIAPGHPVEIETNEQPHSNRFNAVIEKIERLYKGNDSSDGEELDGAPDDDEYDTEDSFIDDAELDEYFEVDNSTVKHDGFYVNRGKLERMEPSTTSNQQPKKRRRKDSAKPCRDAVDVSDKHTKLSITARKKDQSTAPGSWKTQESPLPSGAQDANTSVPLDDVKHSDRANHQSRNDTSHKSRETGSSSALHQKYSNKSLHQQSTSLLGKSPPNVFAEVTVVRQKENNGMHQLANVTGSRQSSQASKKDGSNVKSKTSILEKAIRELEKVVVESRPPAITENQEADTSSQAVKRRLPRDVKLKLAKVARIAQASQGKHSTELINRLMSIVGHLIQLRSLKRNLKIMIDMGDSATREKDTRFKQINNEVLDMIKAKVSLMESQAIKPEGATSDDFQDSVEKPSLKKFVMDAALEDKLCDLYDIFIDGLDEDQGPQTKKLYVNLAELWPNRLMDYRGIKHAIFRAKERRKALYGNLAKEMDQTKMKKSMKQLVPRTDCTAQPNTELVVQRQHSGEKKLIVDPNATSTSVVTSQTMVDRSNQQQPEKLKGISSSCNPTEETRVVKRKNEAVMAEKQVVLALKKPEHPQTRVIPAPQNLNIPRTTPDLNLPS

SEQ ID NO: 98323 - protein, 635 aa, Arabidopsis thaliana
  peptide (1)..(635): Ceres Seq. ID no. 13593150
  misc_feature (1)..(635): Homolog of NCBI NO: 15223894 NR Description: expressed protein [Arabidopsis thaliana]
  misc_feature (1)..(452): Homolog of NCBI NO: 7486999 NR Description: hypothetical protein T14N5.16 - Arabidopsis >gi|3540209|gb|AAC34359.1| Hypothetical protein [Arabidopsis
  misc_feature (163)..(617): Homolog of NCBI NO: 20161447 NR Description: B1065E10.22 [Oryza sativa (japonica
  misc_feature (1)..(136): Homolog of NCBI NO: 20161447 NR Description: B1065E10.22 [Oryza sativa (japonica
  misc_feature (267)..(388): Homolog of NCBI NO: 16506638 NR Description: wound-responsive protein 14.05 [Castanea sativa]
  misc_feature (454)..(614): Homolog of NCBI NO: 4106388 NR Description: unknown [Arabidopsis thaliana]
MRDAGKVNGLSASVPDPPPNANPNLEFRIAPGHPVEIETNEQPHSNRFNAVIEKIERLYKGNDSSDGEELDGAPDDDEYDTEDSFIDDAELDEYFEVDNSTVKHDGFYVNRGKLERMEPSTTSNQQPKKRRRKDSAKPCRDAVDVSDKHTKLSITARKKDQSTAPGSWKTQESPLPSGAQDANTSVPLDDVKHSDRANHQSRNDTSHKSRETGSSSALHQKYSNKSLHQQSTSLLGKSPPNVFAEVTVVRQKENNGMHQLANVTGSRQSSQASKKDGSNVKSKTSILEKAIRELEKVVVESRPPAITENQEADTSSQAVKRRLPRDVKLKLAKVARIAQASQGKHSTELINRLMSIVGHLIQLRSLKRNLKIMIDMGDSATREKDTRFKQINNEVLDMIKAKVSLMESQAIKPEGATSDDFQDSVEKPSLKKFVMDAALEDKLCDLYDIFIDGLDEDQGPQTKKLYVNLAELWPNRLMDYRGIKHAIFRAKERRKALYGNLAKEMDQTKMKKSMKQLVPRTDCTAQPNTELVVQRQHSGEKKLIVDPNATSTSVVTSQTMVDRSNQQQPEKLKGISSSCNPTEETRVVKRKNEAVMAEKQVVLALKKPEHPQTRVIPAPQNLNIPRTTPDLNLPS

SEQ ID NO: 98324 - DNA, 1966 bp, Arabidopsis thaliana
  misc_feature (1)..(1966): Ceres Seq. ID no. 13593151
  misc_feature: MA Experiment ID: 20000173 Result: Down-regulated in Transcription
  misc_feature: MA Experiment 20000173 PARAMETER Experiment Name: At_42deg_Heat_P Parameter: Age (day) Value: 14
  misc_feature: MA Experiment 20000173 PARAMETER Experiment Name: At_42deg_Heat_P Parameter: Organism Value: A. thaliana
  misc_feature: MA Experiment 20000173 PARAMETER Experiment Name: At_42deg_Heat_P Parameter: Plant Line Value: WS
  misc_feature: MA Experiment 20000173 PARAMETER Experiment Name: At_42deg_Heat_P Parameter: Temperature (deg C) Value: 42 vs. 22
  misc_feature: MA Experiment 20000173 PARAMETER Experiment Name: At_42deg_Heat_P Parameter: Timepoint (hr) Value: 6
  misc_feature: MA Experiment 20000173 PARAMETER Experiment Name: At_42deg_Heat_P Parameter: Tissue Value: Aerial
  misc_feature: MA Experiment ID: 20000184 Result: Down-regulated in Transcription
  misc_feature: MA Experiment 20000184 PARAMETER Experiment Name: At_Shoots__P Parameter: Age (day) Value: 7
  misc_feature: MA Experiment 20000184 PARAMETER Experiment Name: At_Shoots__P Parameter: Tissue Value: Shoots vs. Whole Plant
aaacctaacagcatttttctccaattccttcttcttcttcttcttcttctgtaacctcgtcttcttcagcttatactcatagctataccaaagaaaacctcttaaaacccttcttctctcgatccatcgatcagcaacaattcacttctaatcgatcaagagctttccgatctcgtcgatcccaattaacatggcttccaacggcgcttctccgagaattgttgatgctactgagaacagcttggataagatcaagcgacaattggcatctggctctggtcggaacttgctacaaggacctcttttcaagcgatctgaaactctgagaaaatggaacgaacgatgggtgatacttgatccaacaacagggaaaatggagtataagacgaggcgaaatgagccaactatcaagggaacaattttgtttgacgaaaatagcacaatctccatctctcctgtcaacttccaggggcttccaaaatataatggttgctgtatttatattggtaccccacagaagaaagattactttttgtgtgcagagactcctggtgcagctaaagcttgggtcacaaccttacatgcgacacagctagttctaaaggcccataaggaggctgtcgaatctctaagtggaagtggttctgcaacacttggtaccgttgcaaccgttgttgccgctgccaattcaacagcattggaatgttccagagaaattcaagcagcaatgcagatctctttgaggaatgcattgaaaataacgccaaataaaccgattgatggaccactagatgatttgacaataatgaaggaaactctgcgtgtcaaagatgaagaattacataatttagccagggaacttcgttctcgtgactcaatgataaaggaaatagcagataagctatctgagactgctgaagcagctgtagctgcagcatctgctgctcatacaatggatgaacaaaggaaaatcgtttgtgtggaatttgagcgcttgactacagactcacagagacagcaagaagccacaaaattaaagctcaaggaattggaagagaagacctttactttgagtaaggaaaaagatcaattggttaaggaaagagacgctgctctccaagaggcacatatgtggcggtctgagcttgggaaagccagagagcgtgttgtcatacttgaaggagctgttgtgagggccgaagagaaagtgagggttgcagaagcaagcggtgaagcaaaatcaaaagaggcttctcagagagaagcaactgcttggacagagaagcaagagcttttagcatatgtgaatatgttacaaactcagcttcaaaggcagcaactagagacaaagcaagtgtgtgaggagaagactgagtctactaacggcgaagcttctcttccaatgacaaaggaaacagaaaagaatgtggataaagcatgtctgagcatttcaagaacagcctctataccgggagagaatgtagtccatatgagtgaagagcaggtagtaaacgctcagcctccggtgggagaaaacgaatggaatgatattcaggcaacagaggcaagagtttctgatgtaagagaaatatctgcagagactgaacgggacagaagaaacagcttggatatcccggtagtgtctcctgaacctaacgttccacgcaatgatccgccttccgaatcatttcatcaccagccttgaataaagattggtagatcttcgtacattttaatatactctttgatggtctggtaatgtttggagagttgattcttctaacaacaaaaagaatttgtctttttagttttcttgtacattcaagagttgttatgtatctgccgctcttgaatttgtctgactagggaatgattctttttcccttttattacaacatgaagaacagagagatatgtgttaaactttgacttatgtttttggattcatataaaccagttttcatat

SEQ ID NO: 98325 - protein, 504 aa, Arabidopsis thaliana; identical to SEQ ID NO: 45556
  peptide (1)..(504): Ceres Seq. ID no. 13593152
  misc_feature (32)..(135): Pfam Name: PH domain Pfam Description: PH domain
  misc_feature (132)..(504): Homolog of NCBI NO: 25408106 NR Description: hypothetical protein At2g30880 [imported] - thaliana >gi|3201615|gb|AAC20722.1| unknown protein [Arabidopsis
  misc_feature (9)..(105): Homolog of NCBI NO: 25408106 NR Description: hypothetical protein At2g30880 [imported] - thaliana >gi|3201615|gb|AAC20722.1| unknown protein [Arabidopsis
  misc_feature (1)..(504): Homolog of NCBI NO: 30684745 NR Description: expressed protein [Arabidopsis thaliana] At2g30880/F7F1.9 [Arabidopsis thaliana]
  misc_feature (1)..(488): Homolog of NCBI NO: 40538917 NR Description: putative PH domain containing protein [Oryza
  misc_feature (1)..(485): Homolog of NCBI NO: 34394392 NR Description: unknown protein [Oryza sativa (japonica
  misc_feature (105)..(485): Homolog of NCBI NO: 34394393 NR Description: unknown protein [Oryza sativa (japonica
  misc_feature (165)..(425): Homolog of NCBI NO: 4063845 NR Description: response regulator homolog [Myxococcus xanthus]

SEQ ID NO: 98326 - protein, 443 aa, Arabidopsis thaliana; identical to SEQ ID NO: 45557
  peptide (1)..(443): Ceres Seq. ID no. 13593153
  misc_feature (1)..(74): Pfam Name: PH domain Pfam Description: PH domain
  misc_feature (71)..(443): Homolog of NCBI NO: 25408106 NR Description: hypothetical protein At2g30880 [imported] - thaliana >gi|3201615|gb|AAC20722.1| unknown protein [Arabidopsis
  misc_feature (1)..(44): Homolog of NCBI NO: 25408106 NR Description: hypothetical protein At2g30880 [imported] - thaliana >gi|3201615|gb|AAC20722.1| unknown protein [Arabidopsis
  misc_feature (1)..(443): Homolog of NCBI NO: 30684745 NR Description: expressed protein [Arabidopsis thaliana] At2g30880/F7F1.9 [Arabidopsis thaliana]
  misc_feature (1)..(427): Homolog of NCBI NO: 40538917 NR Description: putative PH domain containing protein [Oryza
  misc_feature (1)..(424): Homolog of NCBI NO: 34394392 NR Description: unknown protein [Oryza sativa (japonica
  misc_feature (44)..(424): Homolog of NCBI NO: 34394393 NR Description: unknown protein [Oryza sativa (japonica
  misc_feature (104)..(364): Homolog of NCBI NO: 4063845 NR Description: response regulator homolog [Myxococcus xanthus]

SEQ ID NO: 98327 - protein, 325 aa, Arabidopsis thaliana; identical to SEQ ID NO: 45558
  peptide (1)..(325): Ceres Seq. ID no. 13593154
  misc_feature (17)..(234): Pfam Name: Tropomyosin Pfam Description: Tropomyosin
  misc_feature (1)..(325): Homolog of NCBI NO: 25408106 NR Description: hypothetical protein At2g30880 [imported] - thaliana >gi|3201615|gb|AAC20722.1| unknown protein [Arabidopsis
  misc_feature (1)..(325): Homolog of NCBI NO: 30684745 NR Description: expressed protein [Arabidopsis thaliana] At2g30880/F7F1.9 [Arabidopsis thaliana]
  misc_feature (1)..(309): Homolog of NCBI NO: 40538917 NR Description: putative PH domain containing protein [Oryza
  misc_feature (1)..(306): Homolog of NCBI NO: 34394392 NR Description: unknown protein [Oryza sativa (japonica
  misc_feature (1)..(306): Homolog of NCBI NO: 34394393 NR Description: unknown protein [Oryza sativa (japonica
  misc_feature (1)..(246): Homolog of NCBI NO: 4063845 NR Description: response regulator homolog [Myxococcus xanthus]

SEQ ID NO: 98328 - DNA, 915 bp, Arabidopsis thaliana
  misc_feature (1)..(915): Ceres Seq. ID no. 13593155
  misc_feature: MA Experiment ID: 20000315 Result: Down-regulated in Transcription
  misc_feature: MA Experiment 20000315 PARAMETER Experiment Name: At_14day_Shoots-Roots_Sub_P Parameter: Age (day) Value: 14
  misc_feature: MA Experiment 20000315 PARAMETER Experiment Name: At_14day_Shoots-Roots_Sub_P Parameter: Organism Value: A. thaliana
  misc_feature: MA Experiment 20000315 PARAMETER Experiment Name: At_14day_Shoots-Roots_Sub_P Parameter: Plant Line Value: WS
  misc_feature: MA Experiment 20000315 PARAMETER Experiment Name: At_14day_Shoots-Roots_Sub_P Parameter: Tissue Value: Shoots vs. Whole Plant
  misc_feature: MA Experiment ID: 20000328 Result: Down-regulated in Transcription
  misc_feature: MA Experiment 20000328 PARAMETER Experiment Name: At_42deg_Heat_Sub_P Parameter: Age (day) Value: 14
  misc_feature: MA Experiment 20000328 PARAMETER Experiment Name: At_42deg_Heat_Sub_P Parameter: Organism Value: A. thaliana
  misc_feature: MA Experiment 20000328 PARAMETER Experiment Name: At_42deg_Heat_Sub_P Parameter: Plant Line Value: WS
  misc_feature: MA Experiment 20000328 PARAMETER Experiment Name: At_42deg_Heat_Sub_P Parameter: Temperature (deg C) Value: 42 vs. 22
  misc_feature: MA Experiment 20000328 PARAMETER Experiment Name: At_42deg_Heat_Sub_P Parameter: Timepoint (hr) Value: 6
  misc_feature: MA Experiment 20000328 PARAMETER Experiment Name: At_42deg_Heat_Sub_P Parameter: Tissue Value: Aerial
atgaaagggcttacgaggcttctcaattctctttcgcgacatacagcttccgtaacttgttctccatcttcttcttctcttctgatatcacgtcgctctctgtttatctcggcggcgacacactttccggtgaatttctcggagtcgataacaactaatgcttctcgtaactgttcgagatcttcttcatttcccttcaattggatcgagcaaaggaggacaatgtttatccaaacacaatcaacaccaaacccctcttctctaatgtttagtcctggtaaaccagttatggagattggaagtgctgacttccctaattctcgctctgctatgagttcacctttagctaaagccattttcgccattgatggtattcctcgtcttttgctacaacatacaattgtttcctcctcatataatccgtgttttgtgactaagattgtctctgttgatgcaggtgtagttcgagttttctatgggtcagattttgttactgtaacaaagtcagatgatgtaacatgggatatactcaagcctgatatctttgcagtggtaatggacttttactcttctggtcagcctttgtttctcgactcacaagctacagctgccaaggataccgctattcatgaggatgactctgaaactgtagcaatgattaaggaactcttggagacgcgtatccgaccatcagtccaagatgatggaggggacatcgagtattgtggattcgatacggaaactggtatagtgaagcttagaatgcaaggagcttgtagcggttgtccaagttcatctgttactttgaaatccggaattgagaatatgcttatgcattatgtttccgaggtcaaaggtgttgagcaagaattcgatggtgaagaggagggaacatcttctggtccaatggagtag

SEQ ID NO: 98329 - protein, 304 aa, Arabidopsis thaliana
  peptide (1)..(304): Ceres Seq. ID no. 13593156
  misc_feature (220)..(290): Pfam Name: NifU-like domain Pfam Description: NifU-like domain
  misc_feature (1)..(304): Homolog of NCBI NO: 15223842 NR Description: expressed protein [Arabidopsis thaliana]
  misc_feature (28)..(304): Homolog of NCBI NO: 25405462 NR Description: unknown protein, 90320-88994 [imported] -
  misc_feature (135)..(303): Homolog of NCBI NO: 18402817 NR Description: expressed protein [Arabidopsis thaliana] gb|AAD30650.1~gene_id:MFD22.10~similar to unknown protein thaliana] >gi|13899085|gb|AAK48964.1|AF370537_1 Unknown protein
  misc_feature (43)..(304): Homolog of NCBI NO: 34897632 NR Description: hypothetical protein [Oryza sativa]
  misc_feature (1)..(161): Homolog of NCBI NO: 25405462 NR Description: unknown protein, 90320-88994 [imported] -
  misc_feature (153)..(295): Homolog of NCBI NO: 26324295 NR Description: unnamed protein product [Mus musculus]
  misc_feature (75)..(125): Homolog of NCBI NO: 26324295 NR Description: unnamed protein product [Mus musculus]
  misc_feature (153)..(295): Homolog of NCBI NO: 34856373 NR Description: similar to HIRA-interacting protein 5 (mHIRIP5)
  misc_feature (73)..(125): Homolog of NCBI NO: 34856373 NR Description: similar to HIRA-interacting protein 5 (mHIRIP5)
  misc_feature (153)..(295): Homolog of NCBI NO: 12834577 NR Description: unnamed protein product [Mus musculus]
MKGLTRLLNSLSRHTASVTCSPSSSSLLISRRSLFISAATHFPVNFSESITTNASRNCSRSSSFPFNWIEQRRTMFIQTQSTPNPSSLMFSPGKPVMEIGSADFPNSRSAMSSPLAKAIFAIDGIPRLLLQHTIVSSSYNPCFVTKIVSVDAGVVRVFYGSDFVTVTKSDDVTWDILKPDIFAVVMDFYSSGQPLFLDSQATAAKDTAIHEDDSETVAMIKELLETRIRPSVQDDGGDIEYCGFDTETGIVKLRMQGACSGCPSSSVTLKSGIENMLMHYVSEVKGVEQEFDGEEEGTSSGPME

SEQ ID NO: 98330 - protein, 230 aa, Arabidopsis thaliana
  peptide (1)..(230): Ceres Seq. ID no. 13593157
  misc_feature (146)..(216): Pfam Name: NifU-like domain Pfam Description: NifU-like domain
  misc_feature (1)..(230): Homolog of NCBI NO: 15223842 NR Description: expressed protein [Arabidopsis thaliana]
  misc_feature (1)..(230): Homolog of NCBI NO: 25405462 NR Description: unknown protein, 90320-88994 [imported] -
  misc_feature (61)..(229): Homolog of NCBI NO: 18402817 NR Description: expressed protein [Arabidopsis thaliana] gb|AAD30650.1~gene_id:MFD22.10~similar to unknown protein thaliana] >gi|13899085|gb|AAK48964.1|AF370537_1 Unknown protein
  misc_feature (1)..(230): Homolog of NCBI NO: 34897632 NR Description: hypothetical protein [Oryza sativa]
  misc_feature (1)..(87): Homolog of NCBI NO: 25405462 NR Description: unknown protein, 90320-88994 [imported] -
  misc_feature (79)..(221): Homolog of NCBI NO: 26324295 NR Description: unnamed protein product [Mus musculus]
  misc_feature (1)..(51): Homolog of NCBI NO: 26324295 NR Description: unnamed protein product [Mus musculus]
  misc_feature (79)..(221): Homolog of NCBI NO: 34856373 NR Description: similar to HIRA-interacting protein 5 (mHIRIP5)
  misc_feature (1)..(51): Homolog of NCBI NO: 34856373 NR Description: similar to HIRA-interacting protein 5 (mHIRIP5)
  misc_feature (79)..(221): Homolog of NCBI NO: 12834577 NR Description: unnamed protein product [Mus musculus]
MFIQTQSTPNPSSLMFSPGKPVMEIGSADFPNSRSAMSSPLAKAIFAIDGIPRLLLQHTIVSSSYNPCFVTKIVSVDAGVVRVFYGSDFVTVTKSDDVTWDILKPDIFAVVMDFYSSGQPLFLDSQATAAKDTAIHEDDSETVAMIKELLETRIRPSVQDDGGDIEYCGFDTETGIVKLRMQGACSGCPSSSVTLKSGIENMLMHYVSEVKGVEQEFDGEEEGTSSGPME

SEQ ID NO: 98331 - protein, 216 aa, Arabidopsis thaliana
  peptide (1)..(216): Ceres Seq. ID no. 13593158
  misc_feature (132)..(202): Pfam Name: NifU-like domain Pfam Description: NifU-like domain
  misc_feature (1)..(216): Homolog of NCBI NO: 15223842 NR Description: expressed protein [Arabidopsis thaliana]
  misc_feature (1)..(216): Homolog of NCBI NO: 25405462 NR Description: unknown protein, 90320-88994 [imported] -
  misc_feature (47)..(215): Homolog of NCBI NO: 18402817 NR Description: expressed protein [Arabidopsis thaliana] gb|AAD30650.1~gene_id:MFD22.10~similar to unknown protein thaliana] >gi|13899085|gb|AAK48964.1|AF370537_1 Unknown protein
  misc_feature (1)..(216): Homolog of NCBI NO: 34897632 NR Description: hypothetical protein [Oryza sativa]
  misc_feature (1)..(73): Homolog of NCBI NO: 25405462 NR Description: unknown protein, 90320-88994 [imported] -
  misc_feature (65)..(207): Homolog of NCBI NO: 26324295 NR Description: unnamed protein product [Mus musculus]
  misc_feature (1)..(37): Homolog of NCBI NO: 26324295 NR Description: unnamed protein product [Mus musculus]
  misc_feature (65)..(207): Homolog of NCBI NO: 34856373 NR Description: similar to HIRA-interacting protein 5 (mHIRIP5)
  misc_feature (1)..(37): Homolog of NCBI NO: 34856373 NR Description: similar to HIRA-interacting protein 5 (mHIRIP5)
  misc_feature (65)..(207): Homolog of NCBI NO: 12834577 NR Description: unnamed protein product [Mus musculus]
MFSPGKPVMEIGSADFPNSRSAMSSPLAKAIFAIDGIPRLLLQHTIVSSSYNPCFVTKIVSVDAGVVRVFYGSDFVTVTKSDDVTWDILKPDIFAVVMDFYSSGQPLFLDSQATAAKDTAIHEDDSETVAMIKELLETRIRPSVQDDGGDIEYCGFDTETGIVKLRMQGACSGCPSSSVTLKSGIENMLMHYVSEVKGVEQEFDGEEEGTSSGPME

SEQ ID NO: 98332 - DNA, 1703 bp, Arabidopsis thaliana
  misc_feature (1)..(1703): Ceres Seq. ID no. 13593159
  misc_feature: MA Experiment ID: 20000184 Result: Up-regulated in Transcription
  misc_feature: MA Experiment 20000184 PARAMETER Experiment Name: At_Shoots__P Parameter: Age (day) Value: 7
  misc_feature: MA Experiment 20000184 PARAMETER Experiment Name: At_Shoots__P Parameter: Tissue Value: Shoots vs. Whole Plant
  misc_feature: MA Experiment ID: 20001451 Result: Up-regulated in Transcription
  misc_feature: MA Experiment 20001451 PARAMETER Experiment Name: At_Far-red-induction_P Parameter: Age (day) Value: 7
  misc_feature: MA Experiment 20001451 PARAMETER Experiment Name: At_Far-red-induction_P Parameter: Light Value: Far-red vs. White
  misc_feature: MA Experiment 20001451 PARAMETER Experiment Name: At_Far-red-induction_P Parameter: Organism Value: A. thaliana
  misc_feature: MA Experiment 20001451 PARAMETER Experiment Name: At_Far-red-induction_P Parameter: Plant Line Value: Columbia
  misc_feature: MA Experiment 20001451 PARAMETER Experiment Name: At_Far-red-induction_P Parameter: Timepoint (hr) Value: 24
  misc_feature: MA Experiment 20001451 PARAMETER Experiment Name: At_Far-red-induction_P Parameter: Tissue Value: Whole Plant
tatcacaacacactacactctaatggctcgtgcgacggaatttcaaggctcattcctgagtcgaatcagcatccgccgtaatcagatcgtctccatggatgtcaatcacgagcaagagctcgaagaactcgagtatttccagaaacacgtagccgaacgtttctcggatttaatcacatctccatctccgcctccttcctcctcctcttccgccgtctctcagccgtctgatccgattctctcgatcccttggttacagaatcttctagatgtttttatgtcctgtgaagcagagttcaaggcggtgttgagcacgacccagatctcgaaatcgccgtctttagaaagggttttgccggaaatgcttgatcggattttaaaggcgttagatttatgtaacgccgtcgttaacgggattgattccgttagacagagccgacgttttgcggagatagctgtcacggcgcttaagcaacggccgttatgtgacggaagcgttcgtagagctaagcgtgctttaacaagtctcctcattggcttaaacgctgatgagaggagagatagaaacagtggaggaagtggttgcagtaaccaaagaaggacgacgtcacggtcttggtcgtttggaacgcgtagcaatgtcaccggaggaggattatatggccaagtcgtcagcaagaattggtctgcttcgaagcagattcaggcgatggtggccaatctggtgctgccacgtggagctgaagcttccggaccggcaatgccggtttacataatgagcagtgttatggttctggtgatgtgggtgctagtggcggcggttccttgtcagacaagcagtgttcttgtggcgccattgccgcttccaaaacaccagaattgggctagcgccgctatgagtattcaggagaggattggtgaagagataaaacggaaggagaagcgttgtggtggtggtggattgatggaggagatgcagaggatggagaagattgggttatctttaatggaattcgcggagaggtttaggtttccggcagatgaagaagaggaggtggaagttgcggagaaggtggatgagatggaggagatttgccggcgaatggaagtgggattggaggatttgcagagacaagtgaggcaagtgttccatagattggtgagaagcaggattgagattgtttcactgcttgagcaagctcctgcaatctaatcttgtaaatcctcaataacaacaaaaacttttctcttttttcttttctttggcgatttttagtcttaaaaactaatctttcaaaaatattgatgtgtataatctacaaatcgtatacgtacacaccaatgttactgtttttggtatatgatgatcactgcaaaactctattactgagattagattcatgttgctttcctgaatctgttcttctgtggctttcgtgtctcttttcctgacttgtgattgtttccagaagcttccctttgttttccgaagcttctgttaccggggcgctgtggtcctgttctactttgattaatgtcggaagcaggtgtgtgttgttgatatgttctcttttgccgtttgaatttgttgccatcttgtttggctgtagtttctgatgaagcttctctgtaatttcttttccgcggcctgtaagaaagaaccaattgttattttgtatgcatataatgagcaagcagtgatt

SEQ ID NO: 98333 - protein, 403 aa, Arabidopsis thaliana
  peptide (1)..(403): Ceres Seq. ID no. 13593160
  misc_feature (9)..(397): Pfam Name: Protein of unknown function (DUF793) Pfam Description: Protein of unknown function (DUF793)
  misc_feature (8)..(403): Homolog of NCBI NO: 15236522 NR Description: expressed protein [Arabidopsis thaliana]
  misc_feature (8)..(398): Homolog of NCBI NO: 15237130 NR Description: expressed protein [Arabidopsis thaliana]
  misc_feature (8)..(398): Homolog of NCBI NO: 21553882 NR Description: unknown [Arabidopsis thaliana]
  misc_feature (8)..(400): Homolog of NCBI NO: 15222577 NR Description: hypothetical protein [Arabidopsis thaliana]
  misc_feature (11)..(397): Homolog of NCBI NO: 18394649 NR Description: expressed protein [Arabidopsis thaliana]
  misc_feature (11)..(397): Homolog of NCBI NO: 21593634 NR Description: unknown [Arabidopsis thaliana]
  misc_feature (11)..(392): Homolog of NCBI NO: 18410617 NR Description: expressed protein [Arabidopsis thaliana]
  misc_feature (11)..(392): Homolog of NCBI NO: 21536674 NR Description: unknown [Arabidopsis thaliana]
  misc_feature (13)..(397): Homolog of NCBI NO: 15218428 NR Description: hypothetical protein [Arabidopsis thaliana]
  misc_feature (9)..(399): Homolog of NCBI NO: 38345505 NR Description: OSJNBa0039K24.3 [Oryza sativa (japonica
ITTHYTLMARATEFQGSFLSRISIRRNQIVSMDVNHEQELEELEYFQKHVAERFSDLITSPSPPPSSSSSAVSQPSDPILSIPWLQNLLDVFMSCEAEFKAVLSTTQISKSPSLERVLPEMLDRILKALDLCNAVVNGIDSVRQSRRFAEIAVTALKQRPLCDGSVRRAKRALTSLLIGLNADERRDRNSGGSGCSNQRRTTSRSWSFGTRSNVTGGGLYGQVVSKNWSASKQIQAMVANLVLPRGAEASGPAMPVYIMSSVMVLVMWVLVAAVPCQTSSVLVAPLPLPKHQNWASAAMSIQERIGEEIKRKEKRCGGGGLMEEMQRMEKIGLSLMEFAERFRFPADEEEEVEVAEKVDEMEEICRRMEVGLEDLQRQVRQVFHRLVRSRIEIVSLLEQAPAI

SEQ ID NO: 98334 - protein, 396 aa, Arabidopsis thaliana
  peptide (1)..(396): Ceres Seq. ID no. 13593161
  misc_feature (2)..(390): Pfam Name: Protein of unknown function (DUF793) Pfam Description: Protein of unknown function (DUF793)
  misc_feature (1)..(396): Homolog of NCBI NO: 15236522 NR Description: expressed protein [Arabidopsis thaliana]
  misc_feature (1)..(391): Homolog of NCBI NO: 15237130 NR Description: expressed protein [Arabidopsis thaliana]
  misc_feature (1)..(391): Homolog of NCBI NO: 21553882 NR Description: unknown [Arabidopsis thaliana]
  misc_feature (1)..(393): Homolog of NCBI NO: 15222577 NR Description: hypothetical protein [Arabidopsis thaliana]
  misc_feature (4)..(390): Homolog of NCBI NO: 18394649 NR Description: expressed protein [Arabidopsis thaliana]
  misc_feature (4)..(390): Homolog of NCBI NO: 21593634 NR Description: unknown [Arabidopsis thaliana]
  misc_feature (4)..(385): Homolog of NCBI NO: 18410617 NR Description: expressed protein [Arabidopsis thaliana]
  misc_feature (4)..(385): Homolog of NCBI NO: 21536674 NR Description: unknown [Arabidopsis thaliana]
  misc_feature (6)..(390): Homolog of NCBI NO: 15218428 NR Description: hypothetical protein [Arabidopsis thaliana]
  misc_feature (2)..(392): Homolog of NCBI NO: 38345505 NR Description: OSJNBa0039K24.3 [Oryza sativa (japonica
MARATEFQGSFLSRISIRRNQIVSMDVNHEQELEELEYFQKHVAERFSDLITSPSPPPSSSSSAVSQPSDPILSIPWLQNLLDVFMSCEAEFKAVLSTTQISKSPSLERVLPEMLDRILKALDLCNAVVNGIDSVRQSRRFAEIAVTALKQRPLCDGSVRRAKRALTSLLIGLNADERRDRNSGGSGCSNQRRTTSRSWSFGTRSNVTGGGLYGQVVSKNWSASKQIQAMVANLVLPRGAEASGPAMPVYIMSSVMVLVMWVLVAAVPCQTSSVLVAPLPLPKHQNWASAAMSIQERIGEEIKRKEKRCGGGGLMEEMQRMEKIGLSLMEFAERFRFPADEEEEVEVAEKVDEMEEICRRMEVGLEDLQRQVRQVFHRLVRSRIEIVSLLEQAPAI

SEQ ID NO: 98335 - protein, 372 aa, Arabidopsis thaliana
  peptide (1)..(372): Ceres Seq. ID no. 13593162
  misc_feature (1)..(366): Pfam Name: Protein of unknown function (DUF793) Pfam Description: Protein of unknown function (DUF793)
  misc_feature (1)..(372): Homolog of NCBI NO: 15236522 NR Description: expressed protein [Arabidopsis thaliana]
  misc_feature (1)..(367): Homolog of NCBI NO: 15237130 NR Description: expressed protein [Arabidopsis thaliana]
  misc_feature (1)..(367): Homolog of NCBI NO: 21553882 NR Description: unknown [Arabidopsis thaliana]
  misc_feature (1)..(369): Homolog of NCBI NO: 15222577 NR Description: hypothetical protein [Arabidopsis thaliana]
  misc_feature (1)..(366): Homolog of NCBI NO: 18394649 NR Description: expressed protein [Arabidopsis thaliana]
  misc_feature (1)..(366): Homolog of NCBI NO: 21593634 NR Description: unknown [Arabidopsis thaliana]
  misc_feature (1)..(361): Homolog of NCBI NO: 18410617 NR Description: expressed protein [Arabidopsis thaliana]
  misc_feature (1)..(361): Homolog of NCBI NO: 21536674 NR Description: unknown [Arabidopsis thaliana]
  misc_feature (1)..(366): Homolog of NCBI NO: 15218428 NR Description: hypothetical protein [Arabidopsis thaliana]
  misc_feature (1)..(368): Homolog of NCBI NO: 38345505 NR Description: OSJNBa0039K24.3 [Oryza sativa (japonica
MDVNHEQELEELEYFQKHVAERFSDLITSPSPPPSSSSSAVSQPSDPILSIPWLQNLLDVFMSCEAEFKAVLSTTQISKSPSLERVLPEMLDRILKALDLCNAVVNGIDSVRQSRRFAEIAVTALKQRPLCDGSVRRAKRALTSLLIGLNADERRDRNSGGSGCSNQRRTTSRSWSFGTRSNVTGGGLYGQVVSKNWSASKQIQAMVANLVLPRGAEASGPAMPVYIMSSVMVLVMWVLVAAVPCQTSSVLVAPLPLPKHQNWASAAMSIQERIGEEIKRKEKRCGGGGLMEEMQRMEKIGLSLMEFAERFRFPADEEEEVEVAEKVDEMEEICRRMEVGLEDLQRQVRQVFHRLVRSRIEIVSLLEQAPAI

SEQ ID NO: 98336 - DNA, 1323 bp, Arabidopsis thaliana
  misc_feature (1)..(1323): Ceres Seq. ID no. 13593171
  misc_feature: MA Experiment ID: 20000180 Result: Down-regulated in Transcription
  misc_feature: MA Experiment 20000180 PARAMETER Experiment Name: At_Germinating_Seeds_P Parameter: Age (hr) Value: 24 vs. 0
  misc_feature: MA Experiment 20000180 PARAMETER Experiment Name: At_Germinating_Seeds_P Parameter: Tissue Value: Germinating Seeds
  misc_feature: MA Experiment ID: 20000227 Result: Up-regulated in Transcription
  misc_feature: MA Experiment 20000227 PARAMETER Experiment Name: At_Root-Tips-vs-Tops_P Parameter: Tissue Value: Root Tips vs. Root Tops
  misc_feature: MA Experiment ID: 20000437 Result: Down-regulated in Transcription
  misc_feature: MA Experiment 20000437 PARAMETER Experiment Name: At_Drought_P Parameter: Age (day) Value: 8
  misc_feature: MA Experiment 20000437 PARAMETER Experiment Name: At_Drought_P Parameter: Organism Value: A. thaliana
  misc_feature: MA Experiment 20000437 PARAMETER Experiment Name: At_Drought_P Parameter: Plant Line Value: WS
  misc_feature: MA Experiment 20000437 PARAMETER Experiment Name: At_Drought_P Parameter: Timepoint (hr) Value: 24
  misc_feature: MA Experiment 20000437 PARAMETER Experiment Name: At_Drought_P Parameter: Tissue Value: Whole Plant
  misc_feature: MA Experiment 20000437 PARAMETER Experiment Name: At_Drought_P Parameter: Treatment Value: Drought vs. No Drought
  misc_feature: MA Experiment ID: 20001451 Result: Down-regulated in Transcription
  misc_feature: MA Experiment 20001451 PARAMETER Experiment Name: At_Far-red-induction_P Parameter: Age (day) Value: 7
  misc_feature: MA Experiment 20001451 PARAMETER Experiment Name: At_Far-red-induction_P Parameter: Light Value: Far-red vs. White
  misc_feature: MA Experiment 20001451 PARAMETER Experiment Name: At_Far-red-induction_P Parameter: Organism Value: A. thaliana
  misc_feature: MA Experiment 20001451 PARAMETER Experiment Name: At_Far-red-induction_P Parameter: Plant Line Value: Columbia
  misc_feature: MA Experiment 20001451 PARAMETER Experiment Name: At_Far-red-induction_P Parameter: Timepoint (hr) Value: 24
  misc_feature: MA Experiment 20001451 PARAMETER Experiment Name: At_Far-red-induction_P Parameter: Tissue Value: Whole Plant
  misc_feature: MA Experiment ID: 20001458 Result: Up-regulated in Transcription
  misc_feature: MA Experiment 20001458 PARAMETER Experiment Name: At_50mM_NH4NO3_L-to-H_P Parameter: Age (day) Value: Undefined
  misc_feature: MA Experiment 20001458 PARAMETER Experiment Name: At_50mM_NH4NO3_L-to-H_P Parameter: Organism Value: Undefined
  misc_feature: MA Experiment 20001458 PARAMETER Experiment Name: At_50mM_NH4NO3_L-to-H_P Parameter: Plant Line Value: Undefined
  misc_feature: MA Experiment 20001458 PARAMETER Experiment Name: At_50mM_NH4NO3_L-to-H_P Parameter: Timepoint (hr) Value: 2
  misc_feature: MA Experiment 20001458 PARAMETER Experiment Name: At_50mM_NH4NO3_L-to-H_P Parameter: Tissue Value: Siliques
  misc_feature: MA Experiment 20001458 PARAMETER Experiment Name: At_50mM_NH4NO3_L-to-H_P Parameter: Treatment Value: 50mM NH4NO3 vs. 100mM Manitol
  misc_feature: MA Experiment ID: 20001556 Result: Up-regulated in Transcription
  misc_feature: MA Experiment 20001556 PARAMETER Experiment Name: At_Drought_Soil_Dry_P Parameter: Age (day) Value: 26
  misc_feature: MA Experiment 20001556 PARAMETER Experiment Name: At_Drought_Soil_Dry_P Parameter: Organism Value: A. thaliana
  misc_feature: MA Experiment 20001556 PARAMETER Experiment Name: At_Drought_Soil_Dry_P Parameter: Plant Line Value: WS
  misc_feature: MA Experiment 20001556 PARAMETER Experiment Name: At_Drought_Soil_Dry_P Parameter: Post Timepoint (hr) Value: None
  misc_feature: MA Experiment 20001556 PARAMETER Experiment Name: At_Drought_Soil_Dry_P Parameter: Post-Treatment Value: None
  misc_feature: MA Experiment 20001556 PARAMETER Experiment Name: At_Drought_Soil_Dry_P Parameter: Timepoint (day) Value: 12
  misc_feature: MA Experiment 20001556 PARAMETER Experiment Name: At_Drought_Soil_Dry_P Parameter: Treatment Value: Drought vs. No Drought
  misc_feature: MA Experiment ID: 20001557 Result: Up-regulated in Transcription
  misc_feature: MA Experiment 20001557 PARAMETER Experiment Name: At_Drought_Soil_Dry_P Parameter: Age (day) Value: 27
  misc_feature: MA Experiment 20001557 PARAMETER Experiment Name: At_Drought_Soil_Dry_P Parameter: Organism Value: A. thaliana
  misc_feature: MA Experiment 20001557 PARAMETER Experiment Name: At_Drought_Soil_Dry_P Parameter: Plant Line Value: WS
  misc_feature: MA Experiment 20001557 PARAMETER Experiment Name: At_Drought_Soil_Dry_P Parameter: Post Timepoint (hr) Value: 3
  misc_feature: MA Experiment 20001557 PARAMETER Experiment Name: At_Drought_Soil_Dry_P Parameter: Post-Treatment Value: Re-Water vs. No Drought
  misc_feature: MA Experiment 20001557 PARAMETER Experiment Name: At_Drought_Soil_Dry_P Parameter: Timepoint (day) Value: 13
  misc_feature: MA Experiment 20001557 PARAMETER Experiment Name: At_Drought_Soil_Dry_P Parameter: Treatment Value: Drought vs. No Drought
  misc_feature: MA Experiment ID: 20001558 Result: Up-regulated in Transcription
  misc_feature: MA Experiment 20001558 PARAMETER Experiment Name: At_Drought_Soil_Dry_P Parameter: Age (day) Value: 27
  misc_feature: MA Experiment 20001558 PARAMETER Experiment Name: At_Drought_Soil_Dry_P Parameter: Organism Value: A. thaliana
  misc_feature: MA Experiment 20001558 PARAMETER Experiment Name: At_Drought_Soil_Dry_P Parameter: Plant Line Value: WS
  misc_feature: MA Experiment 20001558 PARAMETER Experiment Name: At_Drought_Soil_Dry_P Parameter: Post Timepoint (hr) Value: 6
  misc_feature: MA Experiment 20001558 PARAMETER Experiment Name: At_Drought_Soil_Dry_P Parameter: Post-Treatment Value: Re-Water vs. No Drought
  misc_feature: MA Experiment 20001558 PARAMETER Experiment Name: At_Drought_Soil_Dry_P Parameter: Timepoint (day) Value: 13
  misc_feature: MA Experiment 20001558 PARAMETER Experiment Name: At_Drought_Soil_Dry_P Parameter: Treatment Value: Drought vs. No Drought
  misc_feature: MA Experiment ID: 20001757 Result: Up-regulated in Transcription
  misc_feature: MA Experiment 20001757 PARAMETER Experiment Name: At_50mM_NH4NO3_L-to-H_P Parameter: Timepoint (hr) Value: 6
  misc_feature: MA Experiment 20001757 PARAMETER Experiment Name: At_50mM_NH4NO3_L-to-H_P Parameter: Tissue Value: Leaf
  misc_feature: MA Experiment 20001757 PARAMETER Experiment Name: At_50mM_NH4NO3_L-to-H_P Parameter: Treatment Value: 50mM NH4NO3 vs 100mM Mannitol
atggggaagaagaacaagagaagtcaagacgagtctgagctcgaattggagccagagctaacgaaaataatcgatggagactctaaaaagaagaaaaataagaataagaagaagagaagccatgaagatacggagatagaaccggagcaaaagatgagtctcgacggagactcgaaggaggagaagataaagaagaagaggaagaacaagaaccaagaggaggagccagagcttgtgacggagaaaacgaaagtccaagaggaggaaaagggaaatgtagaagagggtagagccactgttagcatagccatagctggttcaatcatccacaacactcaatcacttgagctcgccacacgcgtaatctctctttctctctatctctcccttcgtttctctgtttttccattcccagataatttaaagtccccttcttccatttctaacatttctcagctcgccggccaaattgctcgtgcagctacaattttccgaatcgacgagatcgtagtgttcgacaataagagcagctcagaaatcgaatcagctgctacgaatgcttctgatagcaatgaaagtggtgcctcctttctcgttcgtatcttgaagtatctagagacaccacaatatttgaggaaatctctcttccccaagcaaaatgatcttagatatgtgggtatgttgccacctcttgatgctcctcaccatctgcgtaagcacgagtgggaacaataccgtgaaggtgtgacactgagtgaaaaggctccaaattctgagggtacattggttgatgtgggtttaagcaagattgacctttattcgatgctcgtgatgcagagtgttgttgttgatcaagtgctgggtccaggaattagagtcacggtagccatgggaactgaccacgatttagatttggtacgccagattgttccaccctctaagccaagggaagaagcaggaatgtattggggatacaaagtacgatatgcatcacaattaagttcagtattcaaggaatgccctttcgagggtggttacgattatttgattggtacctcggagcacggcctggtaattagttcatctgagctgaaaataccaacatttaggcacctattgattgcatttggtggacttgctgggcttgaagaaagtattgaagatgataatcagtataaggggaaaaacgttcgagatgtgtttaatgtatacttgaatacttgtccacatcaaggtagccgaaccattcgagcagaggaagcgatgtttatatcacttcagtacttccaggaacccatcagcagggcagtgagaagactttaa

SEQ ID NO: 98337 - protein, 440 aa, Arabidopsis thaliana
  peptide (1)..(440): Ceres Seq. ID no. 13593172
  misc_feature (139)..(430): Pfam Name: Uncharacterized ACR, COG2106 Pfam Description: Uncharacterized ACR, COG2106
  misc_feature (1)..(440): Homolog of NCBI NO: 15239710 NR Description: hypothetical protein [Arabidopsis thaliana]
  misc_feature (153)..(419): Homolog of NCBI NO: 38346841 NR Description: OSJNBa0091C12.1 [Oryza sativa (japonica
  misc_feature (139)..(439): Homolog of NCBI NO: 34783965 NR Description: Unknown (protein for IMAGE:6142267) [Homo sapiens]
  misc_feature (139)..(439): Homolog of NCBI NO: 38679912 NR Description: hypothetical protein HSPC109 [Homo sapiens]
  misc_feature (139)..(439): Homolog of NCBI NO: 7512808 NR Description: hypothetical protein DKFZp566D143.1 - human
  misc_feature (139)..(439): Homolog of NCBI NO: 39794258 NR Description: Unknown (protein for MGC:75017) [Homo sapiens]
  misc_feature (139)..(439): Homolog of NCBI NO: 27369948 NR Description: DNA segment, Chr 2, Wayne State University 81, [Mus musculus] >gi|26337855|dbj|BAC32613.1| unnamed protein
  misc_feature (153)..(437): Homolog of NCBI NO: 21428350 NR Description: GM02932p [Drosophila melanogaster]
  misc_feature (153)..(437): Homolog of NCBI NO: 20129839 NR Description: CG12128-PA [Drosophila melanogaster]
  misc_feature (3)..(430): Homolog of NCBI NO: 23480219 NR Description: Uncharacterized ACR, COG2106, putative
MGKKNKRSQDESELELEPELTKIIDGDSKKKKNKNKKKRSHEDTEIEPEQKMSLDGDSKEEKIKKKRKNKNQEEEPELVTEKTKVQEEEKGNVEEGRATVSIAIAGSIIHNTQSLELATRVISLSLYLSLRFSVFPFPDNLKSPSSISNISQLAGQIARAATIFRIDEIVVFDNKSSSEIESAATNASDSNESGASFLVRILKYLETPQYLRKSLFPKQNDLRYVGMLPPLDAPHHLRKHEWEQYREGVTLSEKAPNSEGTLVDVGLSKIDLYSMLVMQSVVVDQVLGPGIRVTVAMGTDHDLDLVRQIVPPSKPREEAGMYWGYKVRYASQLSSVFKECPFEGGYDYLIGTSEHGLVISSSELKIPTFRHLLIAFGGLAGLEESIEDDNQYKGKNVRDVFNVYLNTCPHQGSRTIRAEEAMFISLQYFQEPISRAVRRL

SEQ ID NO: 98338 - protein, 389 aa, Arabidopsis thaliana
  peptide (1)..(389): Ceres Seq. ID no. 13593173
  misc_feature (88)..(379): Pfam Name: Uncharacterized ACR, COG2106 Pfam Description: Uncharacterized ACR, COG2106
  misc_feature (1)..(389): Homolog of NCBI NO: 15239710 NR Description: hypothetical protein [Arabidopsis thaliana]
  misc_feature (102)..(368): Homolog of NCBI NO: 38346841 NR Description: OSJNBa0091C12.1 [Oryza sativa (japonica
  misc_feature (88)..(388): Homolog of NCBI NO: 34783965 NR Description: Unknown (protein for IMAGE:6142267) [Homo sapiens]
  misc_feature (88)..(388): Homolog of NCBI NO: 38679912 NR Description: hypothetical protein HSPC109 [Homo sapiens]
  misc_feature (88)..(388): Homolog of NCBI NO: 7512808 NR Description: hypothetical protein DKFZp566D143.1 - human
  misc_feature (88)..(388): Homolog of NCBI NO: 39794258 NR Description: Unknown (protein for MGC:75017) [Homo sapiens]
  misc_feature (88)..(388): Homolog of NCBI NO: 27369948 NR Description: DNA segment, Chr 2, Wayne State University 81, [Mus musculus] >gi|26337855|dbj|BAC32613.1| unnamed protein
  misc_feature (102)..(386): Homolog of NCBI NO: 21428350 NR Description: GM02932p [Drosophila melanogaster]
  misc_feature (102)..(386): Homolog of NCBI NO: 20129839 NR Description: CG12128-PA [Drosophila melanogaster]
  misc_feature (1)..(379): Homolog of NCBI NO: 23480219 NR Description: Uncharacterized ACR, COG2106, putative
MSLDGDSKEEKIKKKRKNKNQEEEPELVTEKTKVQEEEKGNVEEGRATVSIAIAGSIIHNTQSLELATRVISLSLYLSLRFSVFPFPDNLKSPSSISNISQLAGQIARAATIFRIDEIVVFDNKSSSEIESAATNASDSNESGASFLVRILKYLETPQYLRKSLFPKQNDLRYVGMLPPLDAPHHLRKHEWEQYREGVTLSEKAPNSEGTLVDVGLSKIDLYSMLVMQSVVVDQVLGPGIRVTVAMGTDHDLDLVRQIVPPSKPREEAGMYWGYKVRYASQLSSVFKECPFEGGYDYLIGTSEHGLVISSSELKIPTFRHLLIAFGGLAGLEESIEDDNQYKGKNVRDVFNVYLNTCPHQGSRTIRAEEAMFISLQYFQEPISRAVRRL

SEQ ID NO: 98339 - DNA, 1796 bp, Arabidopsis thaliana
  misc_feature (1)..(1796): Ceres Seq. ID no. 13593202
  misc_feature: MA Experiment ID: 20000451 Result: Up-regulated in Transcription
  misc_feature: MA Experiment 20000451 PARAMETER Experiment Name: At_CS6879_Shoots-Roots_P Parameter: Age (day) Value: 14
  misc_feature: MA Experiment 20000451 PARAMETER Experiment Name: At_CS6879_Shoots-Roots_P Parameter: Organism Value: A. thaliana
  misc_feature: MA Experiment 20000451 PARAMETER Experiment Name: At_CS6879_Shoots-Roots_P Parameter: Plant Line Value: CS6879 vs. WS
  misc_feature: MA Experiment 20000451 PARAMETER Experiment Name: At_CS6879_Shoots-Roots_P Parameter: Tissue Value: Roots
  misc_feature: MA Experiment ID: 20001451 Result: Down-regulated in Transcription
  misc_feature: MA Experiment 20001451 PARAMETER Experiment Name: At_Far-red-induction_P Parameter: Age (day) Value: 7
  misc_feature: MA Experiment 20001451 PARAMETER Experiment Name: At_Far-red-induction_P Parameter: Light Value: Far-red vs. White
  misc_feature: MA Experiment 20001451 PARAMETER Experiment Name: At_Far-red-induction_P Parameter: Organism Value: A. thaliana
  misc_feature: MA Experiment 20001451 PARAMETER Experiment Name: At_Far-red-induction_P Parameter: Plant Line Value: Columbia
  misc_feature: MA Experiment 20001451 PARAMETER Experiment Name: At_Far-red-induction_P Parameter: Timepoint (hr) Value: 24
  misc_feature: MA Experiment 20001451 PARAMETER Experiment Name: At_Far-red-induction_P Parameter: Tissue Value: Whole Plant
ggaacccagaaaaaagattcataaaaccaggcaatagaaatttcatctgaagaaaagaaaaagtaaagctattaaaaatcaaagccacgagaagaaagtagaaaaagttacagtctctgtctatcaaaatcccaacggtaactgaaaatcgccggaaccgaatctgcggcgagccaaaacttgtggatcttttaatgaaaacttgaagattcctctttccacggttgcttctagggttttctcttcgattcaccacatcgtcatgaaccaaatctctttctggtgcctttctttactccttacggtggtgattgctgcagaagagactcctatcactcgtatagccttcggatcatgcgctaatcaaagtgctccacagccgatatgggatgcgataaacaagtttgatccgcaactgtttatttggttgggtgataacatctacggagatataagaagaccacttacagtcattgggaaagagagaacttttgggccatggaggaattcaccgaggtttgtaccttcttcagaggaagaaatgaaactaagatacgctaaagccaaagctaatcctggatattctcgtattcagagaaaagctaaggttattggtacatgggatgatcatgattacggattgaatgacgctggaaaagagtttgatcgtaaagtcattaaccaaaaacttatgcttgatttcttgaatgagcctcttgatagtcctaggagaaagcaagctggtgtttatgcttcttatacttatggtccgcctaatcggaaagttaaggttatagttttagatactagatatcatagagaccctttaagaagtgacgggagcatattgggtgatacgcagtgggactggctcgaaaatgaattgagcggtccccgaagcgaaatcactatcataggatcctctgttcaggtgatatcaaatctttctgctaccactggacctctcttttatatggaatcatggggtcgttttccaaaggaaaggaaacgtctttttaaactgatagcagatactaagagagatggagttatattcatcagtggagatgtacattttggagaaatcacgagatatgattgttctgttgggtacccattatatgatgtcacctccagtggtctagtacaatctgttgagaaagttgtccctcgtcccttgcgttccatagttaggcttcttttttggtatactccaagcacgatgagagttatcaatgataactgcaaattcaaatcttgcacatacggacaacaaaattttggagcaatatcgatagattggaatgcaaatccggttaccataaagctcgagatcagagatgttaacggagacactgtactaggcacgaatgtttcattatctgaactccaaccaggaggctcgaattctttaaaagatacaacaactaagggaaagtctcaacgatattgcacactcgaaattgaattaccaggaacgaccagataccgattggcagttctcatctacttcaccattgctgtcttggcaatggcgatattaggacttatcattggagctgtattggccataacagcatgcgtttataaatgcaaggtcgattgattgttgatgacattaatcaactttttttggtccaacaaaagtgtctttatgacttataatctgtattagttggattattcagggattacaattcggatgtagcttataatgttaaaaattgttgaacacatggattttgatcttgtgatgggaattctaagcttgagctgttattaattaaacttctttg

SEQ ID NO: 98340 - protein, 447 aa, Arabidopsis thaliana; identical to SEQ ID NO: 45740
  peptide (1)..(447): Ceres Seq. ID no. 13593203
  misc_feature (1)..(447): Homolog of NCBI NO: 15238950 NR Description: expressed protein [Arabidopsis thaliana] gene_id:MDH9.6~similar to unknown protein~sp|P42251 [Arabidopsis >gi|23296303|gb|AAN13036.1| unknown protein [Arabidopsis
  misc_feature (1)..(447): Homolog of NCBI NO: 13430796 NR Description: unknown protein [Arabidopsis thaliana]
  misc_feature (191)..(370): Homolog of NCBI NO: 23613643 NR Description: hypothetical protein, conserved [Plasmodium
  misc_feature (98)..(188): Homolog of NCBI NO: 23613643 NR Description: hypothetical protein, conserved [Plasmodium
  misc_feature (191)..(370): Homolog of NCBI NO: 23491463 NR Description: Arabidopsis thaliana P42251 [Plasmodium yoelii
  misc_feature (94)..(188): Homolog of NCBI NO: 23491463 NR Description: Arabidopsis thaliana P42251 [Plasmodium yoelii
  misc_feature (89)..(300): Homolog of NCBI NO: 37519932 NR Description: hypothetical protein gll0363 [Gloeobacter

SEQ ID NO: 98341 - protein, 354 aa, Arabidopsis thaliana; identical to SEQ ID NO: 45741
  peptide (1)..(354): Ceres Seq. ID no. 13593204
  misc_feature (1)..(354): Homolog of NCBI NO: 15238950 NR Description: expressed protein [Arabidopsis thaliana] gene_id:MDH9.6~similar to unknown protein~sp|P42251 [Arabidopsis >gi|23296303|gb|AAN13036.1| unknown protein [Arabidopsis
  misc_feature (1)..(354): Homolog of NCBI NO: 13430796 NR Description: unknown protein [Arabidopsis thaliana]
  misc_feature (98)..(277): Homolog of NCBI NO: 23613643 NR Description: hypothetical protein, conserved [Plasmodium
  misc_feature (5)..(95): Homolog of NCBI NO: 23613643 NR Description: hypothetical protein, conserved [Plasmodium
  misc_feature (98)..(277): Homolog of NCBI NO: 23491463 NR Description: Arabidopsis thaliana P42251 [Plasmodium yoelii
  misc_feature (1)..(95): Homolog of NCBI NO: 23491463 NR Description: Arabidopsis thaliana P42251 [Plasmodium yoelii
  misc_feature (1)..(207): Homolog of NCBI NO: 37519932 NR Description: hypothetical protein gll0363 [Gloeobacter

SEQ ID NO: 98342 - protein, 304 aa, Arabidopsis thaliana; identical to SEQ ID NO: 45742
  peptide (1)..(304): Ceres Seq. ID no. 13593205
  misc_feature (1)..(304): Homolog of NCBI NO: 15238950 NR Description: expressed protein [Arabidopsis thaliana] gene_id:MDH9.6~similar to unknown protein~sp|P42251 [Arabidopsis >gi|23296303|gb|AAN13036.1| unknown protein [Arabidopsis
  misc_feature (1)..(304): Homolog of NCBI NO: 13430796 NR Description: unknown protein [Arabidopsis thaliana]
  misc_feature (48)..(227): Homolog of NCBI NO: 23613643 NR Description: hypothetical protein, conserved [Plasmodium
  misc_feature (1)..(45): Homolog of NCBI NO: 23613643 NR Description: hypothetical protein, conserved [Plasmodium
  misc_feature (48)..(227): Homolog of NCBI NO: 23491463 NR Description: Arabidopsis thaliana P42251 [Plasmodium yoelii
  misc_feature (1)..(45): Homolog of NCBI NO: 23491463 NR Description: Arabidopsis thaliana P42251 [Plasmodium yoelii
  misc_feature (1)..(157): Homolog of NCBI NO: 37519932 NR Description: hypothetical protein gll0363 [Gloeobacter

SEQ ID NO: 98343 - DNA, 2228 bp, Arabidopsis thaliana
  misc_feature (1)..(2228): Ceres Seq. ID no. 13593238
  misc_feature: MA Experiment ID: 20000173 Result: Up-regulated in Transcription
  misc_feature: MA Experiment 20000173 PARAMETER Experiment Name: At_42deg_Heat_P Parameter: Age (day) Value: 14
  misc_feature: MA Experiment 20000173 PARAMETER Experiment Name: At_42deg_Heat_P Parameter: Organism Value: A. thaliana
  misc_feature: MA Experiment 20000173 PARAMETER Experiment Name: At_42deg_Heat_P Parameter: Plant Line Value: WS
  misc_feature: MA Experiment 20000173 PARAMETER Experiment Name: At_42deg_Heat_P Parameter: Temperature (deg C) Value: 42 vs. 22
  misc_feature: MA Experiment 20000173 PARAMETER Experiment Name: At_42deg_Heat_P Parameter: Timepoint (hr) Value: 6
  misc_feature: MA Experiment 20000173 PARAMETER Experiment Name: At_42deg_Heat_P Parameter: Tissue Value: Aerial
  misc_feature: MA Experiment ID: 20000180 Result: Up-regulated in Transcription
  misc_feature: MA Experiment 20000180 PARAMETER Experiment Name: At_Germinating_Seeds_P Parameter: Age (hr) Value: 24 vs. 0
  misc_feature: MA Experiment 20000180 PARAMETER Experiment Name: At_Germinating_Seeds_P Parameter: Tissue Value: Germinating Seeds
  misc_feature: MA Experiment ID: 20000436 Result: Up-regulated in Transcription
  misc_feature: MA Experiment 20000436 PARAMETER Experiment Name: At_Drought_P Parameter: Age (day) Value: 7
  misc_feature: MA Experiment 20000436 PARAMETER Experiment Name: At_Drought_P Parameter: Organism Value: A. thaliana
  misc_feature: MA Experiment 20000436 PARAMETER Experiment Name: At_Drought_P Parameter: Plant Line Value: WS
  misc_feature: MA Experiment 20000436 PARAMETER Experiment Name: At_Drought_P Parameter: Timepoint (hr) Value: 12
  misc_feature: MA Experiment 20000436 PARAMETER Experiment Name: At_Drought_P Parameter: Tissue Value: Whole Plant
  misc_feature: MA Experiment 20000436 PARAMETER Experiment Name: At_Drought_P Parameter: Treatment Value: Drought vs. No Drought
  misc_feature: MA Experiment ID: 20000438 Result: Up-regulated in Transcription
  misc_feature: MA Experiment 20000438 PARAMETER Experiment Name: At_Shoots__P Parameter: Age (day) Value: 14
  misc_feature: MA Experiment 20000438 PARAMETER Experiment Name: At_Shoots__P Parameter: Tissue Value: Shoots vs. Whole Plant
  misc_feature: MA Experiment ID: 20000495 Result: Down-regulated in Transcription
  misc_feature: MA Experiment 20000495 PARAMETER Experiment Name: At_Guard_Cells_P Parameter: Harvest Date Value: 8/2/2002
  misc_feature: MA Experiment 20000495 PARAMETER Experiment Name: At_Guard_Cells_P Parameter: Organism Value: A. thaliana
  misc_feature: MA Experiment 20000495 PARAMETER Experiment Name: At_Guard_Cells_P Parameter: Tissue Value: Guard Cells vs. Leaves
  misc_feature: MA Experiment ID: 20000794 Result: Up-regulated in Transcription
  misc_feature: MA Experiment 20000794 PARAMETER Experiment Name: At_Petals_P Parameter: Age (day) Value: 23-25 days
  misc_feature: MA Experiment 20000794 PARAMETER Experiment Name: At_Petals_P Parameter: Plant Line Value: WS
  misc_feature: MA Experiment 20000794 PARAMETER Experiment Name: At_Petals_P Parameter: Tissue Value: Petals vs. Whole plant
  misc_feature: MA Experiment ID: 20001248 Result: Down-regulated in Transcription
  misc_feature: MA Experiment 20001248 PARAMETER Experiment Name: At_Far-red-induction_P Parameter: Age (day) Value: 7
  misc_feature: MA Experiment 20001248 PARAMETER Experiment Name: At_Far-red-induction_P Parameter: Light Value: Far-red vs. White
  misc_feature: MA Experiment 20001248 PARAMETER Experiment Name: At_Far-red-induction_P Parameter: Organism Value: A. thaliana
  misc_feature: MA Experiment 20001248 PARAMETER Experiment Name: At_Far-red-induction_P Parameter: Plant Line Value: Columbia
  misc_feature: MA Experiment 20001248 PARAMETER Experiment Name: At_Far-red-induction_P Parameter: Timepoint (hr) Value: 4
  misc_feature: MA Experiment 20001248 PARAMETER Experiment Name: At_Far-red-induction_P Parameter: Tissue Value: Whole Plant
  misc_feature: MA Experiment ID: 20001905 Result: Up-regulated in Transcription
  misc_feature: MA Experiment 20001905 PARAMETER Experiment Name: At_Drought_Reproduction_P Parameter: Age (day) Value: 40
  misc_feature: MA Experiment 20001905 PARAMETER Experiment Name: At_Drought_Reproduction_P Parameter: Organism Value: A. thaliana
  misc_feature: MA Experiment 20001905 PARAMETER Experiment Name: At_Drought_Reproduction_P Parameter: Plant Line Value: WS
  misc_feature: MA Experiment 20001905 PARAMETER Experiment Name: At_Drought_Reproduction_P Parameter: Timepoint (day) Value: 10
  misc_feature: MA Experiment 20001905 PARAMETER Experiment Name: At_Drought_Reproduction_P Parameter: Tissue Value: Rosettes
  misc_feature: MA Experiment 20001905 PARAMETER Experiment Name: At_Drought_Reproduction_P Parameter: Treatment Value: Drought vs. No Drought
  misc_feature: MA Experiment ID: 20001906 Result: Up-regulated in Transcription
  misc_feature: MA Experiment 20001906 PARAMETER Experiment Name: At_Drought_Reproduction_P Parameter: Age (day) Value: 35
  misc_feature: MA Experiment 20001906 PARAMETER Experiment Name: At_Drought_Reproduction_P Parameter: Organism Value: A. thaliana
  misc_feature: MA Experiment 20001906 PARAMETER Experiment Name: At_Drought_Reproduction_P Parameter: Plant Line Value: WS
  misc_feature: MA Experiment 20001906 PARAMETER Experiment Name: At_Drought_Reproduction_P Parameter: Timepoint (day) Value: 5
  misc_feature: MA Experiment 20001906 PARAMETER Experiment Name: At_Drought_Reproduction_P Parameter: Tissue Value: Siliques
  misc_feature: MA Experiment 20001906 PARAMETER Experiment Name: At_Drought_Reproduction_P Parameter: Treatment Value: Drought vs. No Drought
  misc_feature: MA Experiment ID: 20001911 Result: Up-regulated in Transcription
  misc_feature: MA Experiment 20001911 PARAMETER Experiment Name: At_Drought_Reproduction_P Parameter: Age (day) Value: 40
  misc_feature: MA Experiment 20001911 PARAMETER Experiment Name: At_Drought_Reproduction_P Parameter: Organism Value: A. thaliana
  misc_feature: MA Experiment 20001911 PARAMETER Experiment Name: At_Drought_Reproduction_P Parameter: Plant Line Value: WS
  misc_feature: MA Experiment 20001911 PARAMETER Experiment Name: At_Drought_Reproduction_P Parameter: Timepoint (day) Value: 10
  misc_feature: MA Experiment 20001911 PARAMETER Experiment Name: At_Drought_Reproduction_P Parameter: Tissue Value: Flowers
  misc_feature: MA Experiment 20001911 PARAMETER Experiment Name: At_Drought_Reproduction_P Parameter: Treatment Value: Drought vs. No Drought
aaacaatctctttctcttcttctgccaaattccacagatggctgcttcatcggcttgtcttctcggaaatggattatctgtctacacaaccaaacagaggttccaaaagcttgggcttgataggacatctaaagttacagttgtgaaggcttctttggatgagaagaaacatgaagggagaagaggtttctttaaactcttactaggaaacgctgctgctggagttggtttgcttgcaagtggaaacgctaatgcagacgaacaaggacaaggggtttcttcgtctagaatgtcttattctaggttcctagagtatttagacaagggaagggttgagaaagtagatttgtatgagaatgggactatagctattgtggaggccgtttctcctgagttgggtaaccggattcagcgtgtacgtgtgcagctacctggattgagtcaggagcttctccagaagttgagggctaagaatattgatttcgcagcacataatgctcaggaggaccaaggttctccaatactcaacttgattgggaatcttgcattccctgttattttgattggcggtttgttccttctctcgagaagatcctctggtggaatgggtggccctggtggtcctggcttcccactccaaattggtcagtcgaaagcaaagtttcagatggaaccaaacactggtgtaacttttgatgatgttgctggagtcgatgaagccaagcaagatttcatggaagtggtggagtttctgaagaagcctgagaggttcactgcggttggtgcccggatcccaaaaggtgttcttcttgttggtcctcctggtaccgggaaaaccctgttggcaaaagccattgctggtgaagctggtgtgcccttcttttccatctcgggttctgagtttgttgagatgtttgtcggtgttggtgcatcaagggtccgcgatcttttcaaaaaagccaaagaaaatgctccatgcattgttttcgtggatgaaatagatgctgttggtaggcaaagaggaactggaattggtggaggtaatgatgaaagagaacagacccttaatcagctcctgactgagatggatggttttgagggtaacactggtgttatcgtagttgctgcaaccaacagagcagacattcttgactccgctttgctaagaccagggcgttttgaccggcaggtatctgttgacgttccagacgttaagggaagaacagatatactcaaggttcactcggggaataagaaatttgaaagcggtgtttcacttgaagtaatagccatgagaacacctggatttagcggagctgatcttgcaaacctcttgaacgaggctgccatattggccggccgccgtggaaagactgcaatatcatcaaaagagattgatgactcaattgacagaattgtagctggcatggaaggaacagtcatgacagatgggaagagcaaaagcttggttgcttaccatgaagttggccatgccatatgtggaacattgactccagggcatgatgctgttcaaaaggtcacgttgataccacgaggccaggctagaggtctgacttggttcattccctcagatgacccaactctaatctccaaacagcaactctttgcaagaattgttggtggactcggtggtagagctgccgaagaagtcatctttggtgagtctgaggtgactactggtgcagttagtgacttgcaacagatcaccggtttggctaagcagatggtgacaacatttgggatgtctgaaatcggaccatggtcgctaatggattcatcggagcaaagcgatgtcattatgaggatgatggcaagaaactcaatgtctgagaagcttgcaaatgatattgatacagcggtgaagacattatcagacaaagcgtacgagatagctttgagccagattagaaacaatcgtgaagccatggacaagattgttgaaatacttcttgagaaagagactatgtcaggcgatgaattccgagcaatcctatctgaattcacagaaatcccacctgaaaaccgtgttgcttcttcaacatccacatcaacaccaacaccagcgtctgtctgagtaagagacctttgaatctctgtgtatattatcttgagatacttccccatactgtgtaacagcacatcttaatttccctagttggagtatatatgtatacgaattcgatatacaaggccttatttcaaactcg

SEQ ID NO: 98344 - protein, 697 aa, Arabidopsis thaliana
  peptide (1)..(697): Ceres Seq. ID no. 13593239
  misc_feature (460)..(670): Pfam Name: Peptidase family M41 Pfam Description: Peptidase family M41
  misc_feature (13)..(697): Homolog of NCBI NO: 4325041 NR Description: FtsH-like protein Pftf precursor [Nicotiana
  misc_feature (13)..(697): Homolog of NCBI NO: 3808101 NR Description: chloroplast protease [Capsicum annuum]
  misc_feature (197)..(697): Homolog of NCBI NO: 21954076 NR Description: putative FtsH protease [Arabidopsis thaliana]
  misc_feature (12)..(678): Homolog of NCBI NO: 18417611 NR Description: FtsH protease, putative [Arabidopsis thaliana]
  misc_feature (89)..(681): Homolog of NCBI NO: 11465793 NR Description: ORF25 [Porphyra purpurea] Cell division protein ftsH homolog >gi|2147534|pir||S73248
  misc_feature (90)..(678): Homolog of NCBI NO: 11467752 NR Description: hypothetical chloroplast RF25 [Guillardia theta] Cell division protein ftsH homolog >gi|3603077|gb|AAC35738.1|
  misc_feature (84)..(682): Homolog of NCBI NO: 22298276 NR Description: cell division protein [Thermosynechococcus BP-1] >gi|22294455|dbj|BAC08285.1| cell division protein
  misc_feature (96)..(676): Homolog of NCBI NO: 16329797 NR Description: cell division protein; FtsH [Synechocystis sp.
  misc_feature (81)..(671): Homolog of NCBI NO: 33239707 NR Description: Cell division protein FtsH [Prochlorococcus subsp. marinus str. CCMP1375] >gi|33237232|gb|AAP99301.1| Cell protein FtsH [Prochlorococcus marinus subsp. marinus str.
  misc_feature (95)..(670): Homolog of NCBI NO: 18402995 NR Description: chloroplast FtsH protease [Arabidopsis thaliana] Cell division protein ftsH homolog 1, chloroplast precursor
NNLFLFFCQIPQMAASSACLLGNGLSVYTTKQRFQKLGLDRTSKVTVVKASLDEKKHEGRRGFFKLLLGNAAAGVGLLASGNANADEQGQGVSSSRMSYSRFLEYLDKGRVEKVDLYENGTIAIVEAVSPELGNRIQRVRVQLPGLSQELLQKLRAKNIDFAAHNAQEDQGSPILNLIGNLAFPVILIGGLFLLSRRSSGGMGGPGGPGFPLQIGQSKAKFQMEPNTGVTFDDVAGVDEAKQDFMEVVEFLKKPERFTAVGARIPKGVLLVGPPGTGKTLLAKAIAGEAGVPFFSISGSEFVEMFVGVGASRVRDLFKKAKENAPCIVFVDEIDAVGRQRGTGIGGGNDEREQTLNQLLTEMDGFEGNTGVIVVAATNRADILDSALLRPGRFDRQVSVDVPDVKGRTDILKVHSGNKKFESGVSLEVIAMRTPGFSGADLANLLNEAAILAGRRGKTAISSKEIDDSIDRIVAGMEGTVMTDGKSKSLVAYHEVGHAICGTLTPGHDAVQKVTLIPRGQARGLTWFIPSDDPTLISKQQLFARIVGGLGGRAAEEVIFGESEVTTGAVSDLQQITGLAKQMVTTFGMSEIGPWSLMDSSEQSDVIMRMMARNSMSEKLANDIDTAVKTLSDKAYEIALSQIRNNREAMDKIVEILLEKETMSGDEFRAILSEFTEIPPENRVASSTSTSTPTPASV

SEQ ID NO: 98345 - protein, 685 aa, Arabidopsis thaliana; identical to SEQ ID NO: 45832
  peptide (1)..(685): Ceres Seq. ID no. 13593240
  misc_feature (448)..(658): Pfam Name: Peptidase family M41 Pfam Description: Peptidase family M41
  misc_feature (1)..(685): Homolog of NCBI NO: 4325041 NR Description: FtsH-like protein Pftf precursor [Nicotiana
  misc_feature (1)..(685): Homolog of NCBI NO: 3808101 NR Description: chloroplast protease [Capsicum annuum]
  misc_feature (185)..(685): Homolog of NCBI NO: 21954076 NR Description: putative FtsH protease [Arabidopsis thaliana]
  misc_feature (1)..(666): Homolog of NCBI NO: 18417611 NR Description: FtsH protease, putative [Arabidopsis thaliana]
  misc_feature (77)..(669): Homolog of NCBI NO: 11465793 NR Description: ORF25 [Porphyra purpurea] Cell division protein ftsH homolog >gi|2147534|pir||S73248
  misc_feature (78)..(666): Homolog of NCBI NO: 11467752 NR Description: hypothetical chloroplast RF25 [Guillardia theta] Cell division protein ftsH homolog >gi|3603077|gb|AAC35738.1|
  misc_feature (72)..(670): Homolog of NCBI NO: 22298276 NR Description: cell division protein [Thermosynechococcus BP-1] >gi|22294455|dbj|BAC08285.1| cell division protein
  misc_feature (84)..(664): Homolog of NCBI NO: 16329797 NR Description: cell division protein; FtsH [Synechocystis sp.
  misc_feature (69)..(659): Homolog of NCBI NO: 33239707 NR Description: Cell division protein FtsH [Prochlorococcus subsp. marinus str. CCMP1375] >gi|33237232|gb|AAP99301.1| Cell protein FtsH [Prochlorococcus marinus subsp. marinus str.
  misc_feature (83)..(658): Homolog of NCBI NO: 18402995 NR Description: chloroplast FtsH protease [Arabidopsis thaliana] Cell division protein ftsH homolog 1, chloroplast precursor

SEQ ID NO: 98346 - protein, 601 aa, Arabidopsis thaliana; identical to SEQ ID NO: 45833
  peptide (1)..(601): Ceres Seq. ID no. 13593241
  misc_feature (364)..(574): Pfam Name: Peptidase family M41 Pfam Description: Peptidase family M41
  misc_feature (1)..(601): Homolog of NCBI NO: 4325041 NR Description: FtsH-like protein Pftf precursor [Nicotiana
  misc_feature (1)..(601): Homolog of NCBI NO: 3808101 NR Description: chloroplast protease [Capsicum annuum]
  misc_feature (101)..(601): Homolog of NCBI NO: 21954076 NR Description: putative FtsH protease [Arabidopsis thaliana]
  misc_feature (1)..(582): Homolog of NCBI NO: 18417611 NR Description: FtsH protease, putative [Arabidopsis thaliana]
  misc_feature (1)..(585): Homolog of NCBI NO: 11465793 NR Description: ORF25 [Porphyra purpurea] Cell division protein ftsH homolog >gi|2147534|pir||S73248
  misc_feature (1)..(582): Homolog of NCBI NO: 11467752 NR Description: hypothetical chloroplast RF25 [Guillardia theta] Cell division protein ftsH homolog >gi|3603077|gb|AAC35738.1|
  misc_feature (1)..(586): Homolog of NCBI NO: 22298276 NR Description: cell division protein [Thermosynechococcus BP-1] >gi|22294455|dbj|BAC08285.1| cell division protein
  misc_feature (1)..(580): Homolog of NCBI NO: 16329797 NR Description: cell division protein; FtsH [Synechocystis sp.
  misc_feature (1)..(575): Homolog of NCBI NO: 33239707 NR Description: Cell division protein FtsH [Prochlorococcus subsp. marinus str. CCMP1375] >gi|33237232|gb|AAP99301.1| Cell protein FtsH [Prochlorococcus marinus subsp. marinus str.
  misc_feature (1)..(574): Homolog of NCBI NO: 18402995 NR Description: chloroplast FtsH protease [Arabidopsis thaliana] Cell division protein ftsH homolog 1, chloroplast precursor

SEQ ID NO: 98347 - DNA, 1816 bp, Arabidopsis thaliana
  misc_feature (1)..(1816): Ceres Seq. ID no. 13593246
  misc_feature: MA Experiment ID: 20000171 Result: Down-regulated in Transcription
  misc_feature: MA Experiment 20000171 PARAMETER Experiment Name: At_42deg_Heat_P Parameter: Age (day) Value: 14
  misc_feature: MA Experiment 20000171 PARAMETER Experiment Name: At_42deg_Heat_P Parameter: Organism Value: A. thaliana
  misc_feature: MA Experiment 20000171 PARAMETER Experiment Name: At_42deg_Heat_P Parameter: Plant Line Value: WS
  misc_feature: MA Experiment 20000171 PARAMETER Experiment Name: At_42deg_Heat_P Parameter: Temperature (deg C) Value: 42 vs. 22
  misc_feature: MA Experiment 20000171 PARAMETER Experiment Name: At_42deg_Heat_P Parameter: Timepoint (hr) Value: 1
  misc_feature: MA Experiment 20000171 PARAMETER Experiment Name: At_42deg_Heat_P Parameter: Tissue Value: Aerial
  misc_feature: MA Experiment ID: 20000179 Result: Down-regulated in Transcription
  misc_feature: MA Experiment 20000179 PARAMETER Experiment Name: At_Germinating_Seeds_P Parameter: Age (hr) Value: 6 vs. 0
  misc_feature: MA Experiment 20000179 PARAMETER Experiment Name: At_Germinating_Seeds_P Parameter: Tissue Value: Germinating Seeds
  misc_feature: MA Experiment ID: 20000180 Result: Down-regulated in Transcription
  misc_feature: MA Experiment 20000180 PARAMETER Experiment Name: At_Germinating_Seeds_P Parameter: Age (hr) Value: 24 vs. 0
  misc_feature: MA Experiment 20000180 PARAMETER Experiment Name: At_Germinating_Seeds_P Parameter: Tissue Value: Germinating Seeds
  misc_feature: MA Experiment ID: 20000184 Result: Down-regulated in Transcription
  misc_feature: MA Experiment 20000184 PARAMETER Experiment Name: At_Shoots__P Parameter: Age (day) Value: 7
  misc_feature: MA Experiment 20000184 PARAMETER Experiment Name: At_Shoots__P Parameter: Tissue Value: Shoots vs. Whole Plant
  misc_feature: MA Experiment ID: 20001248 Result: Up-regulated in Transcription
  misc_feature: MA Experiment 20001248 PARAMETER Experiment Name: At_Far-red-induction_P Parameter: Age (day) Value: 7
  misc_feature: MA Experiment 20001248 PARAMETER Experiment Name: At_Far-red-induction_P Parameter: Light Value: Far-red vs. White
  misc_feature: MA Experiment 20001248 PARAMETER Experiment Name: At_Far-red-induction_P Parameter: Organism Value: A. thaliana
  misc_feature: MA Experiment 20001248 PARAMETER Experiment Name: At_Far-red-induction_P Parameter: Plant Line Value: Columbia
  misc_feature: MA Experiment 20001248 PARAMETER Experiment Name: At_Far-red-induction_P Parameter: Timepoint (hr) Value: 4
  misc_feature: MA Experiment 20001248 PARAMETER Experiment Name: At_Far-red-induction_P Parameter: Tissue Value: Whole Plant
  misc_feature: MA Experiment ID: 20001451 Result: Up-regulated in Transcription
  misc_feature: MA Experiment 20001451 PARAMETER Experiment Name: At_Far-red-induction_P Parameter: Age (day) Value: 7
  misc_feature: MA Experiment 20001451 PARAMETER Experiment Name: At_Far-red-induction_P Parameter: Light Value: Far-red vs. White
  misc_feature: MA Experiment 20001451 PARAMETER Experiment Name: At_Far-red-induction_P Parameter: Organism Value: A. thaliana
  misc_feature: MA Experiment 20001451 PARAMETER Experiment Name: At_Far-red-induction_P Parameter: Plant Line Value: Columbia
  misc_feature: MA Experiment 20001451 PARAMETER Experiment Name: At_Far-red-induction_P Parameter: Timepoint (hr) Value: 24
  misc_feature: MA Experiment 20001451 PARAMETER Experiment Name: At_Far-red-induction_P Parameter: Tissue Value: Whole Plant
  misc_feature: MA Experiment ID: 20001557 Result: Up-regulated in Transcription
  misc_feature: MA Experiment 20001557 PARAMETER Experiment Name: At_Drought_Soil_Dry_P Parameter: Age (day) Value: 27
  misc_feature: MA Experiment 20001557 PARAMETER Experiment Name: At_Drought_Soil_Dry_P Parameter: Organism Value: A. thaliana
  misc_feature: MA Experiment 20001557 PARAMETER Experiment Name: At_Drought_Soil_Dry_P Parameter: Plant Line Value: WS
  misc_feature: MA Experiment 20001557 PARAMETER Experiment Name: At_Drought_Soil_Dry_P Parameter: Post Timepoint (hr) Value: 3
  misc_feature: MA Experiment 20001557 PARAMETER Experiment Name: At_Drought_Soil_Dry_P Parameter: Post-Treatment Value: Re-Water vs. No Drought
  misc_feature: MA Experiment 20001557 PARAMETER Experiment Name: At_Drought_Soil_Dry_P Parameter: Timepoint (day) Value: 13
  misc_feature: MA Experiment 20001557 PARAMETER Experiment Name: At_Drought_Soil_Dry_P Parameter: Treatment Value: Drought vs. No Drought
  misc_feature: MA Experiment ID: 20001558 Result: Up-regulated in Transcription
  misc_feature: MA Experiment 20001558 PARAMETER Experiment Name: At_Drought_Soil_Dry_P Parameter: Age (day) Value: 27
  misc_feature: MA Experiment 20001558 PARAMETER Experiment Name: At_Drought_Soil_Dry_P Parameter: Organism Value: A. thaliana
  misc_feature: MA Experiment 20001558 PARAMETER Experiment Name: At_Drought_Soil_Dry_P Parameter: Plant Line Value: WS
  misc_feature: MA Experiment 20001558 PARAMETER Experiment Name: At_Drought_Soil_Dry_P Parameter: Post Timepoint (hr) Value: 6
  misc_feature: MA Experiment 20001558 PARAMETER Experiment Name: At_Drought_Soil_Dry_P Parameter: Post-Treatment Value: Re-Water vs. No Drought
  misc_feature: MA Experiment 20001558 PARAMETER Experiment Name: At_Drought_Soil_Dry_P Parameter: Timepoint (day) Value: 13
  misc_feature: MA Experiment 20001558 PARAMETER Experiment Name: At_Drought_Soil_Dry_P Parameter: Treatment Value: Drought vs. No Drought
  misc_feature: MA Experiment ID: 20001560 Result: Up-regulated in Transcription
  misc_feature: MA Experiment 20001560 PARAMETER Experiment Name: At_Drought_Soil_Dry_P Parameter: Age (day) Value: 28
  misc_feature: MA Experiment 20001560 PARAMETER Experiment Name: At_Drought_Soil_Dry_P Parameter: Organism Value: A. thaliana
  misc_feature: MA Experiment 20001560 PARAMETER Experiment Name: At_Drought_Soil_Dry_P Parameter: Plant Line Value: WS
  misc_feature: MA Experiment 20001560 PARAMETER Experiment Name: At_Drought_Soil_Dry_P Parameter: Post Timepoint (hr) Value: None
  misc_feature: MA Experiment 20001560 PARAMETER Experiment Name: At_Drought_Soil_Dry_P Parameter: Post-Treatment Value: None
  misc_feature: MA Experiment 20001560 PARAMETER Experiment Name: At_Drought_Soil_Dry_P Parameter: Timepoint (day) Value: 14
  misc_feature: MA Experiment 20001560 PARAMETER Experiment Name: At_Drought_Soil_Dry_P Parameter: Treatment Value: Drought vs. No Drought
  misc_feature: MA Experiment ID: 20001757 Result: Up-regulated in Transcription
  misc_feature: MA Experiment 20001757 PARAMETER Experiment Name: At_50mM_NH4NO3_L-to-H_P Parameter: Timepoint (hr) Value: 6
  misc_feature: MA Experiment 20001757 PARAMETER Experiment Name: At_50mM_NH4NO3_L-to-H_P Parameter: Tissue Value: Leaf
  misc_feature: MA Experiment 20001757 PARAMETER Experiment Name: At_50mM_NH4NO3_L-to-H_P Parameter: Treatment Value: 50mM NH4NO3 vs 100mM Mannitol
  misc_feature: MA Experiment ID: 20001911 Result: Up-regulated in Transcription
  misc_feature: MA Experiment 20001911 PARAMETER Experiment Name: At_Drought_Reproduction_P Parameter: Age (day) Value: 40
  misc_feature: MA Experiment 20001911 PARAMETER Experiment Name: At_Drought_Reproduction_P Parameter: Organism Value: A. thaliana
  misc_feature: MA Experiment 20001911 PARAMETER Experiment Name: At_Drought_Reproduction_P Parameter: Plant Line Value: WS
  misc_feature: MA Experiment 20001911 PARAMETER Experiment Name: At_Drought_Reproduction_P Parameter: Timepoint (day) Value: 10
  misc_feature: MA Experiment 20001911 PARAMETER Experiment Name: At_Drought_Reproduction_P Parameter: Tissue Value: Flowers
  misc_feature: MA Experiment 20001911 PARAMETER Experiment Name: At_Drought_Reproduction_P Parameter: Treatment Value: Drought vs. No Drought
ataaacccttttcttttaacctactcagtttttctgtttgcgtcgctctcatcccagggcgagaaagatggtgaaacggagtaaaaagagtaagagtaagagggtgaccttgaagcagaagcataaggtcctgaaaaaggtgaaggagcaccacaagaagaaggcaaaggatgctaaaaagcttggccttcaccgtaagccaagagtagagaaagacccaggtatacccaatgactggcctttcaaggaacaagagcttaaagcccttgaagttcgacgtgcccgtgctcttgaggagattgaacagaagaaagaagctcgcaaagaaagggccaaaaagaggaaacttggtttggttgatgatgaggataccaagacagaaggagagaccatagaggacttacctaaagttgtcaatgttcgagataactcggagagggctttctacaaggagctagttaaagtcattgaattgtctgatgtcattttggaggttcttgatgcccgtgatcctcttggcactcgttgtactgacatggagaggatggtgatgcaagccggtcccaataagcatcttgtgttgctgctgaacaagattgatcttgttccccgagaggctgctgagaaatggcttatgtaccttagggaagaatttccagctgttgccttcaagtgtagcacccaggaacagagatcaaacttgggttggaaatcatctaaggcatcaaaaccaagcaatatgttgcagacgagtgattgtcttggagcagacactcttatcaaattgttgaagaactactcaagaagtcatgagttaaaaaaatctatcacagttggtattattggactgcctaatgtcggcaagagtagtcttattaacagtctgaagagagcgcatgttgtcaatgttggtgccactcctggactgactagatctctgcaagaggttcacttggacaaaaacgtgaagttgctggattgtcctggagttgtgatgttgaaatcatcaggaaatgatgcttccatagctctccgaaattgtaaaagaatcgagaagttggatgacccagttagtccagtgaaggaaattctcaagctttgtcctaaagatatgctggtgactctctacaaaatcccgagcttcgaggcagttgatgatttcctttacaaagtcgccactgtaaggggtaaacttaaaaagggtggtcttgtggatattgatgctgctgccagaattgttttgcatgactggaatgaaggtaaaatcccatactatacaatgccgccaaagagggaccagggtggacatgcagagtcaaagattgtgactgagctggccaaggatttcaacatcgatgaggtttacagtggtgaatcctctttcattgggagcttgaagacggttaacgaattcaaccctgttattattccttcaaatggtcctctcaatttcgatgaaactatgatcgaggatgagtctaagacgcagacggaagaggaggctgagcatgagagtgatgatgatgagtcaatgggaggggaggaggaggaagaggcaggaaagacgaaggagaaatcagagacggggaggcagaacgtgaagctatacgcagcggaaagcatgttgaatacaaagaaacagaaagcagagaagaagaagaggaagaaagcaaagaaagcaggagctgatgaggaggatctgatggacggagattatgatttcaaagtggattataggaagaacaaagatggagaagacgaagaattccagattgatgctaaaatcccaatggctggacttttgcctgaagaatga

SEQ ID NO: 98348 - protein, 582 aa, Arabidopsis thaliana
  peptide (1)..(582): Ceres Seq. ID no. 13593247
  misc_feature (472)..(545): Pfam Name: Hsp90 protein Pfam Description: Hsp90 protein
  misc_feature (1)..(582): Homolog of NCBI NO: 15231373 NR Description: GTPase -related [Arabidopsis thaliana]
  misc_feature (37)..(531): Homolog of NCBI NO: 15451214 NR Description: putative GTPase [Arabidopsis thaliana]
  misc_feature (1)..(578): Homolog of NCBI NO: 34914820 NR Description: putative GTPase [Oryza sativa (japonica
  misc_feature (1)..(547): Homolog of NCBI NO: 39587211 NR Description: Hypothetical protein CBG00673 [Caenorhabditis
  misc_feature (48)..(542): Homolog of NCBI NO: 33468623 NR Description: SI:zK13A21.8 (novel protein similar to human
  misc_feature (1)..(538): Homolog of NCBI NO: 17534827 NR Description: GTPase of MMR1/HSR1 type (62.3 kD)
  misc_feature (2)..(570): Homolog of NCBI NO: 21428328 NR Description: AT23067p [Drosophila melanogaster]
  misc_feature (2)..(570): Homolog of NCBI NO: 24647590 NR Description: CG3983-PB [Drosophila melanogaster]
  misc_feature (2)..(506): Homolog of NCBI NO: 28212232 NR Description: nucleostemin [Rattus norvegicus]
  misc_feature (2)..(556): Homolog of NCBI NO: 27752312 NR Description: nucleostemin [Mus musculus]
MVKRSKKSKSKRVTLKQKHKVLKKVKEHHKKKAKDAKKLGLHRKPRVEKDPGIPNDWPFKEQELKALEVRRARALEEIEQKKEARKERAKKRKLGLVDDEDTKTEGETIEDLPKVVNVRDNSERAFYKELVKVIELSDVILEVLDARDPLGTRCTDMERMVMQAGPNKHLVLLLNKIDLVPREAAEKWLMYLREEFPAVAFKCSTQEQRSNLGWKSSKASKPSNMLQTSDCLGADTLIKLLKNYSRSHELKKSITVGIIGLPNVGKSSLINSLKRAHVVNVGATPGLTRSLQEVHLDKNVKLLDCPGVVMLKSSGNDASIALRNCKRIEKLDDPVSPVKEILKLCPKDMLVTLYKIPSFEAVDDFLYKVATVRGKLKKGGLVDIDAAARIVLHDWNEGKIPYYTMPPKRDQGGHAESKIVTELAKDFNIDEVYSGESSFIGSLKTVNEFNPVIIPSNGPLNFDETMIEDESKTQTEEEAEHESDDDESMGGEEEEEAGKTKEKSETGRQNVKLYAAESMLNTKKQKAEKKKRKKAKKAGADEEDLMDGDYDFKVDYRKNKDGEDEEFQIDAKIPMAGLLPEE

SEQ ID NO: 98349 - protein, 426 aa, Arabidopsis thaliana
  peptide (1)..(426): Ceres Seq. ID no. 13593248
  misc_feature (316)..(389): Pfam Name: Hsp90 protein Pfam Description: Hsp90 protein
  misc_feature (1)..(426): Homolog of NCBI NO: 15231373 NR Description: GTPase -related [Arabidopsis thaliana]
  misc_feature (1)..(375): Homolog of NCBI NO: 15451214 NR Description: putative GTPase [Arabidopsis thaliana]
  misc_feature (1)..(422): Homolog of NCBI NO: 34914820 NR Description: putative GTPase [Oryza sativa (japonica
  misc_feature (1)..(391): Homolog of NCBI NO: 39587211 NR Description: Hypothetical protein CBG00673 [Caenorhabditis
  misc_feature (1)..(386): Homolog of NCBI NO: 33468623 NR Description: SI:zK13A21.8 (novel protein similar to human
  misc_feature (1)..(382): Homolog of NCBI NO: 17534827 NR Description: GTPase of MMR1/HSR1 type (62.3 kD)
  misc_feature (1)..(414): Homolog of NCBI NO: 21428328 NR Description: AT23067p [Drosophila melanogaster]
  misc_feature (1)..(414): Homolog of NCBI NO: 24647590 NR Description: CG3983-PB [Drosophila melanogaster]
  misc_feature (1)..(350): Homolog of NCBI NO: 28212232 NR Description: nucleostemin [Rattus norvegicus]
  misc_feature (1)..(400): Homolog of NCBI NO: 27752312 NR Description: nucleostemin [Mus musculus]
MERMVMQAGPNKHLVLLLNKIDLVPREAAEKWLMYLREEFPAVAFKCSTQEQRSNLGWKSSKASKPSNMLQTSDCLGADTLIKLLKNYSRSHELKKSITVGIIGLPNVGKSSLINSLKRAHVVNVGATPGLTRSLQEVHLDKNVKLLDCPGVVMLKSSGNDASIALRNCKRIEKLDDPVSPVKEILKLCPKDMLVTLYKIPSFEAVDDFLYKVATVRGKLKKGGLVDIDAAARIVLHDWNEGKIPYYTMPPKRDQGGHAESKIVTELAKDFNIDEVYSGESSFIGSLKTVNEFNPVIIPSNGPLNFDETMIEDESKTQTEEEAEHESDDDESMGGEEEEEAGKTKEKSETGRQNVKLYAAESMLNTKKQKAEKKKRKKAKKAGADEEDLMDGDYDFKVDYRKNKDGEDEEFQIDAKIPMAGLLPEE

SEQ ID NO: 98350 - protein, 423 aa, Arabidopsis thaliana
  peptide (1)..(423): Ceres Seq. ID no. 13593249
  misc_feature (313)..(386): Pfam Name: Hsp90 protein Pfam Description: Hsp90 protein
  misc_feature (1)..(423): Homolog of NCBI NO: 15231373 NR Description: GTPase -related [Arabidopsis thaliana]
  misc_feature (1)..(372): Homolog of NCBI NO: 15451214 NR Description: putative GTPase [Arabidopsis thaliana]
  misc_feature (1)..(419): Homolog of NCBI NO: 34914820 NR Description: putative GTPase [Oryza sativa (japonica
  misc_feature (1)..(388): Homolog of NCBI NO: 39587211 NR Description: Hypothetical protein CBG00673 [Caenorhabditis
  misc_feature (1)..(383): Homolog of NCBI NO: 33468623 NR Description: SI:zK13A21.8 (novel protein similar to human
  misc_feature (1)..(379): Homolog of NCBI NO: 17534827 NR Description: GTPase of MMR1/HSR1 type (62.3 kD)
  misc_feature (1)..(411): Homolog of NCBI NO: 21428328 NR Description: AT23067p [Drosophila melanogaster]
  misc_feature (1)..(411): Homolog of NCBI NO: 24647590 NR Description: CG3983-PB [Drosophila melanogaster]
  misc_feature (1)..(347): Homolog of NCBI NO: 28212232 NR Description: nucleostemin [Rattus norvegicus]
  misc_feature (1)..(397): Homolog of NCBI NO: 27752312 NR Description: nucleostemin [Mus musculus]
MVMQAGPNKHLVLLLNKIDLVPREAAEKWLMYLREEFPAVAFKCSTQEQRSNLGWKSSKASKPSNMLQTSDCLGADTLIKLLKNYSRSHELKKSITVGIIGLPNVGKSSLINSLKRAHVVNVGATPGLTRSLQEVHLDKNVKLLDCPGVVMLKSSGNDASIALRNCKRIEKLDDPVSPVKEILKLCPKDMLVTLYKIPSFEAVDDFLYKVATVRGKLKKGGLVDIDAAARIVLHDWNEGKIPYYTMPPKRDQGGHAESKIVTELAKDFNIDEVYSGESSFIGSLKTVNEFNPVIIPSNGPLNFDETMIEDESKTQTEEEAEHESDDDESMGGEEEEEAGKTKEKSETGRQNVKLYAAESMLNTKKQKAEKKKRKKAKKAGADEEDLMDGDYDFKVDYRKNKDGEDEEFQIDAKIPMAGLLPEE

SEQ ID NO: 98351 - DNA, 963 bp, Arabidopsis thaliana
  misc_feature (1)..(963): Ceres Seq. ID no. 13593265
  misc_feature: MA Experiment ID: 20000306 Result: Up-regulated in Transcription
  misc_feature: MA Experiment 20000306 PARAMETER Experiment Name: At_Germinating_Seeds_Sub_P Parameter: Age (hr) Value: 6 vs. 0
  misc_feature: MA Experiment 20000306 PARAMETER Experiment Name: At_Germinating_Seeds_Sub_P Parameter: Organism Value: A. thaliana
  misc_feature: MA Experiment 20000306 PARAMETER Experiment Name: At_Germinating_Seeds_Sub_P Parameter: Plant Line Value: WS
  misc_feature: MA Experiment 20000306 PARAMETER Experiment Name: At_Germinating_Seeds_Sub_P Parameter: Tissue Value: Germinating Seeds
  misc_feature: MA Experiment ID: 20000307 Result: Up-regulated in Transcription
  misc_feature: MA Experiment 20000307 PARAMETER Experiment Name: At_Germinating_Seeds_Sub_P Parameter: Age (hr) Value: 24 vs. 0
  misc_feature: MA Experiment 20000307 PARAMETER Experiment Name: At_Germinating_Seeds_Sub_P Parameter: Organism Value: A. thaliana
  misc_feature: MA Experiment 20000307 PARAMETER Experiment Name: At_Germinating_Seeds_Sub_P Parameter: Plant Line Value: WS
  misc_feature: MA Experiment 20000307 PARAMETER Experiment Name: At_Germinating_Seeds_Sub_P Parameter: Tissue Value: Germinating Seeds
  misc_feature: MA Experiment ID: 20000315 Result: Down-regulated in Transcription
  misc_feature: MA Experiment 20000315 PARAMETER Experiment Name: At_14day_Shoots-Roots_Sub_P Parameter: Age (day) Value: 14
  misc_feature: MA Experiment 20000315 PARAMETER Experiment Name: At_14day_Shoots-Roots_Sub_P Parameter: Organism Value: A. thaliana
  misc_feature: MA Experiment 20000315 PARAMETER Experiment Name: At_14day_Shoots-Roots_Sub_P Parameter: Plant Line Value: WS
  misc_feature: MA Experiment 20000315 PARAMETER Experiment Name: At_14day_Shoots-Roots_Sub_P Parameter: Tissue Value: Shoots vs. Whole Plant
atggaagatctatggaagagagcgaaatcgtttgcagaagaagcagcgaagaaatcacaaaccataacactacaatcatcttcaacaacattcgtcaatctcgtcaccgaaaccgctaaaaaatccaaagagttcgctctcgaagcttctaagaaagctgattcgatcaatgtctccgagttcgtcgccgagacggcgaagaagtcaaaggaattcgctgctgaggtttcaacgaaagcggatcagctcaaagtcgtagcattgaaacaagctgatcagatccagaatataaaatcgattgccgacattatacctggaggattaggaggatcaggatctggtggtggtggttctgagatttctgaatctgagcttgttagttttggtattactgatgatttgagagagtttgttaaaggtttgacatctgctacgttccaggcttttcctgaacaaggatttgaaatgtgttatggtaaatgtggattagatgaatcgtcggaagtttctgatttggaaacaagtgcgtcgaatgttcggaaggatctttctgagtggcaggagagacatgccactcttgttcttggttctgtcaagcaaatttcgaagttgagatatgaactatgcccacgagttatgaaagaaaggaggttctggaggatatactttaccttagtgagcactcatgttgcaccatatgaaaggaagtacatggaggaacttaggaacaaagcagagagtaaagatgaagaagctaagaagagtccagggcttggaaggacagaatcagctgaaaagaacagaatatctactgcatcgtctgagcaagatctcgatacattcctgctgggagatctagaagacagtgacgaagctcctgatgatggtgatggtgatgatggaggaagcctgggtgatgatgactttgacaagattggcaactctgtaagtgaaaacgtttga

SEQ ID NO: 98352 - protein, 320 aa, Arabidopsis thaliana
  peptide (1)..(320): Ceres Seq. ID no. 13593266
  misc_feature (180)..(226): Pfam Name: BSD domain Pfam Description: BSD domain
  misc_feature (1)..(320): Homolog of NCBI NO: 25404796 NR Description: hypothetical protein T6L1.21 [imported] - thaliana >gi|12323210|gb|AAG51582.1|AC011665_3 hypothetical
  misc_feature (1)..(315): Homolog of NCBI NO: 30697787 NR Description: expressed protein [Arabidopsis thaliana]
  misc_feature (1)..(153): Homolog of NCBI NO: 6730653 NR Description: F4N2.1 [Arabidopsis thaliana]
  misc_feature (40)..(319): Homolog of NCBI NO: 15450417 NR Description: At1g26300/F28B23_4 [Arabidopsis thaliana]
  misc_feature (1)..(310): Homolog of NCBI NO: 15450417 NR Description: At1g26300/F28B23_4 [Arabidopsis thaliana]
  misc_feature (1)..(153): Homolog of NCBI NO: 15222683 NR Description: hypothetical protein [Arabidopsis thaliana]
  misc_feature (110)..(271): Homolog of NCBI NO: 18404344 NR Description: expressed protein [Arabidopsis thaliana] gb|AAF07359.1~gene_id:K7P8.11~similar to unknown protein thaliana] >gi|21592853|gb|AAM64803.1| unknown [Arabidopsis
  misc_feature (238)..(319): Homolog of NCBI NO: 15222681 NR Description: expressed protein [Arabidopsis thaliana]
MEDLWKRAKSFAEEAAKKSQTITLQSSSTTFVNLVTETAKKSKEFALEASKKADSINVSEFVAETAKKSKEFAAEVSTKADQLKVVALKQADQIQNIKSIADIIPGGLGGSGSGGGGSEISESELVSFGITDDLREFVKGLTSATFQAFPEQGFEMCYGKCGLDESSEVSDLETSASNVRKDLSEWQERHATLVLGSVKQISKLRYELCPRVMKERRFWRIYFTLVSTHVAPYERKYMEELRNKAESKDEEAKKSPGLGRTESAEKNRISTASSEQDLDTFLLGDLEDSDEAPDDGDGDDGGSLGDDDFDKIGNSVSENV

SEQ ID NO: 98353 - protein, 165 aa, Arabidopsis thaliana
  peptide (1)..(165): Ceres Seq. ID no. 13593267
  misc_feature (25)..(71): Pfam Name: BSD domain Pfam Description: BSD domain
  misc_feature (1)..(165): Homolog of NCBI NO: 25404796 NR Description: hypothetical protein T6L1.21 [imported] - thaliana >gi|12323210|gb|AAG51582.1|AC011665_3 hypothetical
  misc_feature (1)..(160): Homolog of NCBI NO: 30697787 NR Description: expressed protein [Arabidopsis thaliana]
  misc_feature (1)..(164): Homolog of NCBI NO: 15450417 NR Description: At1g26300/F28B23_4 [Arabidopsis thaliana]
  misc_feature (1)..(155): Homolog of NCBI NO: 15450417 NR Description: At1g26300/F28B23_4 [Arabidopsis thaliana]
  misc_feature (1)..(116): Homolog of NCBI NO: 18404344 NR Description: expressed protein [Arabidopsis thaliana] gb|AAF07359.1~gene_id:K7P8.11~similar to unknown protein thaliana] >gi|21592853|gb|AAM64803.1| unknown [Arabidopsis
  misc_feature (83)..(164): Homolog of NCBI NO: 15222681 NR Description: expressed protein [Arabidopsis thaliana]
MCYGKCGLDESSEVSDLETSASNVRKDLSEWQERHATLVLGSVKQISKLRYELCPRVMKERRFWRIYFTLVSTHVAPYERKYMEELRNKAESKDEEAKKSPGLGRTESAEKNRISTASSEQDLDTFLLGDLEDSDEAPDDGDGDDGGSLGDDDFDKIGNSVSENV

SEQ ID NO: 98354 - DNA, 1896 bp, Arabidopsis thaliana
  misc_feature (1)..(1896): Ceres Seq. ID no. 13593272
  misc_feature: MA Experiment ID: 20000180 Result: Down-regulated in Transcription
  misc_feature: MA Experiment 20000180 PARAMETER Experiment Name: At_Germinating_Seeds_P Parameter: Age (hr) Value: 24 vs. 0
  misc_feature: MA Experiment 20000180 PARAMETER Experiment Name: At_Germinating_Seeds_P Parameter: Tissue Value: Germinating Seeds
  misc_feature: MA Experiment ID: 20000227 Result: Up-regulated in Transcription
  misc_feature: MA Experiment 20000227 PARAMETER Experiment Name: At_Root-Tips-vs-Tops_P Parameter: Tissue Value: Root Tips vs. Root Tops
accggaaaataatgctgctccggtcatttcgcaccgtcgagcttctccgccgaatctccacttcttcagtctctggatatcgaacttctccttcacttttacaacgttgcaatggcttccaaagctatttaccacacagagtaacaacaacagagagtcctttcccttcacacatctctcgattctgttcttctcagagcgcgaattcgcaaaatgagaatcgacacacgactctatcatcaccggtttcttcacggagggttaataacagaaagatttcacggcggaggaaggcgggaaaatcattatcaatctcgccggcggcggatgcggttgatttggcgttagactcagtggtgaagatctttactgtttctacaagtcctagttactttcttccttggcagaataagtctcaacgagaatctatgggctctggatttgtgatttctggaaggaagattataacgaatgcgcatgtcgtggctgatcactcctttgtgttagttagaaagcatggatcgtcgataaaacacagagcagaagttcaagcggttggtcatgaatgtgatttggctatattggtagttgatagtgaagtgttttgggaaggtatgaatgctttggagctaggagatataccgtttcttcaggaagctgtggctgtagttggctatcctcaaggtggtgacaacatttctgttacaaaaggtgttgtgtctcgagttgaaccgacacaatatgttcacggtgccacccagctaatggctatacaaatagatgctgctattaaccccggaaatagtggtggcccagctatcatgggaaacaaagtagctggtgtcgcatttcaaaatctttcaggtgctgagaatataggctatataattccaacaccagtgataaagcatttcataaatggcgttgaagaatgtggtaaatacattggtttttgttcaatgggtgtatcatgtcagcctatggagaatggtgaacttcgtagtggttttcagatgagttctgaaatgacaggggttcttgttagcaaaataaaccctctatcagatgctcacaaaattttgaagaaagatgatgttcttcttgcatttgatggtgttcctatagcaaatgatggaacagttccttttcggaacagggagagaatcactttcgaccatttggtttctatgaagaaaccagatgaaacagccttggttaaagttttgagagaggggaaagaacatgaattcagtatcacactaagacctctgcaaccactagttccagtgcatcaatttgatcagcttcccagttattatatatttgcgggcttcgtatttgtacctcttactcagccataccttcatgaatatggagaagattggtataacacttctccccgcacattgtgccatcgtgcattaaaagatttgcccaaaaaagccggtcaacaacttgtcattgtctctcaggtgttaatggatgatatcaacacaggatacgagcgtctcgcagaactacaagtgaataaagtgaacggagtagaagtgaataatctgagacatctatgtcagctcatagagaactgcaacaccgaaaagctgaggatagacttagacgatgagagtagggtaatcgtcttgaactaccaatccgcaaaaattgccacttctttgattttgaaacgacacagaatagcatcagcgatttccagcgatctgcttatcgaacaaaatctagaaaccgagttggcttcttgttctgcggtttgagctatcgccaacacgtatggcatgttgtacacttacaaattcattcataatttgtaaactacaatgttgtatactcataaacatttaggatttgataagtggcttgtcacgagcctgaattttg

SEQ ID NO: 98355 - protein, 589 aa, Arabidopsis thaliana
  peptide (1)..(589): Ceres Seq. ID no. 13593273
  misc_feature (120)..(305): Pfam Name: Trypsin Pfam Description: Trypsin
  misc_feature (4)..(589): Homolog of NCBI NO: 18421592 NR Description: DegP protease [Arabidopsis thaliana]
  misc_feature (61)..(577): Homolog of NCBI NO: 18408327 NR Description: DegP protease [Arabidopsis thaliana]
  misc_feature (70)..(572): Homolog of NCBI NO: 18408329 NR Description: DegP protease [Arabidopsis thaliana]
  misc_feature (78)..(453): Homolog of NCBI NO: 9758082 NR Description: contains similarity to serine
  misc_feature (482)..(578): Homolog of NCBI NO: 9758082 NR Description: contains similarity to serine
  misc_feature (9)..(454): Homolog of NCBI NO: 18401167 NR Description: DegP protease [Arabidopsis thaliana]
  misc_feature (490)..(580): Homolog of NCBI NO: 18401167 NR Description: DegP protease [Arabidopsis thaliana]
  misc_feature (9)..(454): Homolog of NCBI NO: 9279653 NR Description: gb|AAF23847.1~gene_id:MDC8.17~strong similarity
  misc_feature (486)..(580): Homolog of NCBI NO: 9279653 NR Description: gb|AAF23847.1~gene_id:MDC8.17~strong similarity
  misc_feature (70)..(485): Homolog of NCBI NO: 2190549 NR Description: F5I14.17 gene product [Arabidopsis thaliana]
RKIMLLRSFRTVELLRRISTSSVSGYRTSPSLLQRCNGFQSYLPHRVTTTESPFPSHISRFCSSQSANSQNENRHTTLSSPVSSRRVNNRKISRRRKAGKSLSISPAADAVDLALDSVVKIFTVSTSPSYFLPWQNKSQRESMGSGFVISGRKIITNAHVVADHSFVLVRKHGSSIKHRAEVQAVGHECDLAILVVDSEVFWEGMNALELGDIPFLQEAVAVVGYPQGGDNISVTKGVVSRVEPTQYVHGATQLMAIQIDAAINPGNSGGPAIMGNKVAGVAFQNLSGAENIGYIIPTPVIKHFINGVEECGKYIGFCSMGVSCQPMENGELRSGFQMSSEMTGVLVSKINPLSDAHKILKKDDVLLAFDGVPIANDGTVPFRNRERITFDHLVSMKKPDETALVKVLREGKEHEFSITLRPLQPLVPVHQFDQLPSYYIFAGFVFVPLTQPYLHEYGEDWYNTSPRTLCHRALKDLPKKAGQQLVIVSQVLMDDINTGYERLAELQVNKVNGVEVNNLRHLCQLIENCNTEKLRIDLDDESRVIVLNYQSAKIATSLILKRHRIASAISSDLLIEQNLETELASCSAV

SEQ ID NO: 98356 - protein, 586 aa, Arabidopsis thaliana
  peptide (1)..(586): Ceres Seq. ID no. 13593274
  misc_feature (117)..(302): Pfam Name: Trypsin Pfam Description: Trypsin
  misc_feature (1)..(586): Homolog of NCBI NO: 18421592 NR Description: DegP protease [Arabidopsis thaliana]
  misc_feature (58)..(574): Homolog of NCBI NO: 18408327 NR Description: DegP protease [Arabidopsis thaliana]
  misc_feature (67)..(569): Homolog of NCBI NO: 18408329 NR Description: DegP protease [Arabidopsis thaliana]
  misc_feature (75)..(450): Homolog of NCBI NO: 9758082 NR Description: contains similarity to serine
  misc_feature (479)..(575): Homolog of NCBI NO: 9758082 NR Description: contains similarity to serine
  misc_feature (6)..(451): Homolog of NCBI NO: 18401167 NR Description: DegP protease [Arabidopsis thaliana]
  misc_feature (487)..(577): Homolog of NCBI NO: 18401167 NR Description: DegP protease [Arabidopsis thaliana]
  misc_feature (6)..(451): Homolog of NCBI NO: 9279653 NR Description: gb|AAF23847.1~gene_id:MDC8.17~strong similarity
  misc_feature (483)..(577): Homolog of NCBI NO: 9279653 NR Description: gb|AAF23847.1~gene_id:MDC8.17~strong similarity
  misc_feature (67)..(482): Homolog of NCBI NO: 2190549 NR Description: F5I14.17 gene product [Arabidopsis thaliana]
MLLRSFRTVELLRRISTSSVSGYRTSPSLLQRCNGFQSYLPHRVTTTESPFPSHISRFCSSQSANSQNENRHTTLSSPVSSRRVNNRKISRRRKAGKSLSISPAADAVDLALDSVVKIFTVSTSPSYFLPWQNKSQRESMGSGFVISGRKIITNAHVVADHSFVLVRKHGSSIKHRAEVQAVGHECDLAILVVDSEVFWEGMNALELGDIPFLQEAVAVVGYPQGGDNISVTKGVVSRVEPTQYVHGATQLMAIQIDAAINPGNSGGPAIMGNKVAGVAFQNLSGAENIGYIIPTPVIKHFINGVEECGKYIGFCSMGVSCQPMENGELRSGFQMSSEMTGVLVSKINPLSDAHKILKKDDVLLAFDGVPIANDGTVPFRNRERITFDHLVSMKKPDETALVKVLREGKEHEFSITLRPLQPLVPVHQFDQLPSYYIFAGFVFVPLTQPYLHEYGEDWYNTSPRTLCHRALKDLPKKAGQQLVIVSQVLMDDINTGYERLAELQVNKVNGVEVNNLRHLCQLIENCNTEKLRIDLDDESRVIVLNYQSAKIATSLILKRHRIASAISSDLLIEQNLETELASCSAV

SEQ ID NO: 98357 - protein, 447 aa, Arabidopsis thaliana; identical to SEQ ID NO: 46883
  peptide (1)..(447): Ceres Seq. ID no. 13593275
  misc_feature (1)..(163): Pfam Name: Trypsin Pfam Description: Trypsin
  misc_feature (1)..(447): Homolog of NCBI NO: 18421592 NR Description: DegP protease [Arabidopsis thaliana]
  misc_feature (1)..(435): Homolog of NCBI NO: 18408327 NR Description: DegP protease [Arabidopsis thaliana]
  misc_feature (1)..(430): Homolog of NCBI NO: 18408329 NR Description: DegP protease [Arabidopsis thaliana]
  misc_feature (1)..(311): Homolog of NCBI NO: 9758082 NR Description: contains similarity to serine
  misc_feature (340)..(436): Homolog of NCBI NO: 9758082 NR Description: contains similarity to serine
  misc_feature (1)..(312): Homolog of NCBI NO: 18401167 NR Description: DegP protease [Arabidopsis thaliana]
  misc_feature (348)..(438): Homolog of NCBI NO: 18401167 NR Description: DegP protease [Arabidopsis thaliana]
  misc_feature (1)..(312): Homolog of NCBI NO: 9279653 NR Description: gb|AAF23847.1~gene_id:MDC8.17~strong similarity
  misc_feature (344)..(438): Homolog of NCBI NO: 9279653 NR Description: gb|AAF23847.1~gene_id:MDC8.17~strong similarity
  misc_feature (1)..(343): Homolog of NCBI NO: 2190549 NR Description: F5I14.17 gene product [Arabidopsis thaliana]

SEQ ID NO: 98358 - DNA, 1686 bp, Arabidopsis thaliana
  misc_feature (1)..(1686): Ceres Seq. ID no. 13593302
  misc_feature: MA Experiment ID: 20000171 Result: Down-regulated in Transcription
  misc_feature: MA Experiment 20000171 PARAMETER Experiment Name: At_42deg_Heat_P Parameter: Age (day) Value: 14
  misc_feature: MA Experiment 20000171 PARAMETER Experiment Name: At_42deg_Heat_P Parameter: Organism Value: A. thaliana
  misc_feature: MA Experiment 20000171 PARAMETER Experiment Name: At_42deg_Heat_P Parameter: Plant Line Value: WS
  misc_feature: MA Experiment 20000171 PARAMETER Experiment Name: At_42deg_Heat_P Parameter: Temperature (deg C) Value: 42 vs. 22
  misc_feature: MA Experiment 20000171 PARAMETER Experiment Name: At_42deg_Heat_P Parameter: Timepoint (hr) Value: 1
  misc_feature: MA Experiment 20000171 PARAMETER Experiment Name: At_42deg_Heat_P Parameter: Tissue Value: Aerial
  misc_feature: MA Experiment ID: 20000173 Result: Down-regulated in Transcription
  misc_feature: MA Experiment 20000173 PARAMETER Experiment Name: At_42deg_Heat_P Parameter: Age (day) Value: 14
  misc_feature: MA Experiment 20000173 PARAMETER Experiment Name: At_42deg_Heat_P Parameter: Organism Value: A. thaliana
  misc_feature: MA Experiment 20000173 PARAMETER Experiment Name: At_42deg_Heat_P Parameter: Plant Line Value: WS
  misc_feature: MA Experiment 20000173 PARAMETER Experiment Name: At_42deg_Heat_P Parameter: Temperature (deg C) Value: 42 vs. 22
  misc_feature: MA Experiment 20000173 PARAMETER Experiment Name: At_42deg_Heat_P Parameter: Timepoint (hr) Value: 6
  misc_feature: MA Experiment 20000173 PARAMETER Experiment Name: At_42deg_Heat_P Parameter: Tissue Value: Aerial
  misc_feature: MA Experiment ID: 20000182 Result: Down-regulated in Transcription
  misc_feature: MA Experiment 20000182 PARAMETER Experiment Name: At_2mM_SA_P Parameter: Age (day) Value: 14
  misc_feature: MA Experiment 20000182 PARAMETER Experiment Name: At_2mM_SA_P Parameter: Organism Value: A. thaliana
  misc_feature: MA Experiment 20000182 PARAMETER Experiment Name: At_2mM_SA_P Parameter: Plant Line Value: WS
  misc_feature: MA Experiment 20000182 PARAMETER Experiment Name: At_2mM_SA_P Parameter: Timepoint (hr) Value: 6
  misc_feature: MA Experiment 20000182 PARAMETER Experiment Name: At_2mM_SA_P Parameter: Tissue Value: Aerial
  misc_feature: MA Experiment 20000182 PARAMETER Experiment Name: At_2mM_SA_P Parameter: Treatment Value: 2mM SA vs. No Treatment
  misc_feature: MA Experiment ID: 20000184 Result: Down-regulated in Transcription
  misc_feature: MA Experiment 20000184 PARAMETER Experiment Name: At_Shoots__P Parameter: Age (day) Value: 7
  misc_feature: MA Experiment 20000184 PARAMETER Experiment Name: At_Shoots__P Parameter: Tissue Value: Shoots vs. Whole Plant
  misc_feature: MA Experiment ID: 20000185 Result: Down-regulated in Transcription
  misc_feature: MA Experiment 20000185 PARAMETER Experiment Name: At_Roots__P Parameter: Age (day) Value: 7 vs. 21
  misc_feature: MA Experiment 20000185 PARAMETER Experiment Name: At_Roots__P Parameter: Organism Value: A. thaliana
  misc_feature: MA Experiment 20000185 PARAMETER Experiment Name: At_Roots__P Parameter: Tissue Value: Roots vs. Whole Plant
  misc_feature: MA Experiment ID: 20000234 Result: Down-regulated in Transcription
  misc_feature: MA Experiment 20000234 PARAMETER Experiment Name: At_Siliques_P Parameter: Age (day) Value: 21
  misc_feature: MA Experiment 20000234 PARAMETER Experiment Name: At_Siliques_P Parameter: Organism Value: A. thaliana
  misc_feature: MA Experiment 20000234 PARAMETER Experiment Name: At_Siliques_P Parameter: Plant Line Value: WS
  misc_feature: MA Experiment 20000234 PARAMETER Experiment Name: At_Siliques_P Parameter: Tissue Value: Less Than 5mm Siliques vs. Whole Plant
  misc_feature: MA Experiment ID: 20000264 Result: Down-regulated in Transcription
  misc_feature: MA Experiment 20000264 PARAMETER Experiment Name: At_Open_Flower_P Parameter: Age (day) Value: 21
  misc_feature: MA Experiment 20000264 PARAMETER Experiment Name: At_Open_Flower_P Parameter: Plant Line Value: WS
  misc_feature: MA Experiment 20000264 PARAMETER Experiment Name: At_Open_Flower_P Parameter: Tissue Value: Open Flower vs. Whole Plant
  misc_feature: MA Experiment ID: 20000265 Result: Down-regulated in Transcription
  misc_feature: MA Experiment 20000265 PARAMETER Experiment Name: At_Open_Flower_P Parameter: Age (day) Value: 21
  misc_feature: MA Experiment 20000265 PARAMETER Experiment Name: At_Open_Flower_P Parameter: Plant Line Value: WS
  misc_feature: MA Experiment 20000265 PARAMETER Experiment Name: At_Open_Flower_P Parameter: Tissue Value: Closed Flower vs. Whole Plant
  misc_feature: MA Experiment ID: 20000269 Result: Up-regulated in Transcription
  misc_feature: MA Experiment 20000269 PARAMETER Experiment Name: At_1mM_KNO3_L-vs-H_Roots_P Parameter: Age (day) Value: 7,10,12
  misc_feature: MA Experiment 20000269 PARAMETER Experiment Name: At_1mM_KNO3_L-vs-H_Roots_P Parameter: Organism Value: A. thaliana
  misc_feature: MA Experiment 20000269 PARAMETER Experiment Name: At_1mM_KNO3_L-vs-H_Roots_P Parameter: Plant Line Value: WS
  misc_feature: MA Experiment 20000269 PARAMETER Experiment Name: At_1mM_KNO3_L-vs-H_Roots_P Parameter: Timepoint (day) Value: 7,10,12
  misc_feature: MA Experiment 20000269 PARAMETER Experiment Name: At_1mM_KNO3_L-vs-H_Roots_P Parameter: Tissue Value: Roots
  misc_feature: MA Experiment 20000269 PARAMETER Experiment Name: At_1mM_KNO3_L-vs-H_Roots_P Parameter: Treatment Value: 1mM KNO3 vs. 50mM KNO3
  misc_feature: MA Experiment ID: 20000286 Result: Down-regulated in Transcription
  misc_feature: MA Experiment 20000286 PARAMETER Experiment Name: At_Open_Flower_P Parameter: Age (day) Value: 21
  misc_feature: MA Experiment 20000286 PARAMETER Experiment Name: At_Open_Flower_P Parameter: Plant Line Value: WS
  misc_feature: MA Experiment 20000286 PARAMETER Experiment Name: At_Open_Flower_P Parameter: Tissue Value: Half Open vs. Whole Plant
  misc_feature: MA Experiment ID: 20000437 Result: Down-regulated in Transcription
  misc_feature: MA Experiment 20000437 PARAMETER Experiment Name: At_Drought_P Parameter: Age (day) Value: 8
  misc_feature: MA Experiment 20000437 PARAMETER Experiment Name: At_Drought_P Parameter: Organism Value: A. thaliana
  misc_feature: MA Experiment 20000437 PARAMETER Experiment Name: At_Drought_P Parameter: Plant Line Value: WS
  misc_feature: MA Experiment 20000437 PARAMETER Experiment Name: At_Drought_P Parameter: Timepoint (hr) Value: 24
  misc_feature: MA Experiment 20000437 PARAMETER Experiment Name: At_Drought_P Parameter: Tissue Value: Whole Plant
  misc_feature: MA Experiment 20000437 PARAMETER Experiment Name: At_Drought_P Parameter: Treatment Value: Drought vs. No Drought
  misc_feature: MA Experiment ID: 20000439 Result: Down-regulated in Transcription
  misc_feature: MA Experiment 20000439 PARAMETER Experiment Name: At_Roots__P Parameter: Age (day) Value: 14 vs. 21
  misc_feature: MA Experiment 20000439 PARAMETER Experiment Name: At_Roots__P Parameter: Organism Value: A. thaliana
  misc_feature: MA Experiment 20000439 PARAMETER Experiment Name: At_Roots__P Parameter: Tissue Value: Roots vs. Whole Plant
  misc_feature: MA Experiment ID: 20000451 Result: Up-regulated in Transcription
  misc_feature: MA Experiment 20000451 PARAMETER Experiment Name: At_CS6879_Shoots-Roots_P Parameter: Age (day) Value: 14
  misc_feature: MA Experiment 20000451 PARAMETER Experiment Name: At_CS6879_Shoots-Roots_P Parameter: Organism Value: A. thaliana
  misc_feature: MA Experiment 20000451 PARAMETER Experiment Name: At_CS6879_Shoots-Roots_P Parameter: Plant Line Value: CS6879 vs. WS
  misc_feature: MA Experiment 20000451 PARAMETER Experiment Name: At_CS6879_Shoots-Roots_P Parameter: Tissue Value: Roots
  misc_feature: MA Experiment ID: 20000495 Result: Up-regulated in Transcription
  misc_feature: MA Experiment 20000495 PARAMETER Experiment Name: At_Guard_Cells_P Parameter: Harvest Date Value: 8/2/2002
  misc_feature: MA Experiment 20000495 PARAMETER Experiment Name: At_Guard_Cells_P Parameter: Organism Value: A. thaliana
  misc_feature: MA Experiment 20000495 PARAMETER Experiment Name: At_Guard_Cells_P Parameter: Tissue Value: Guard Cells vs. Leaves
  misc_feature: MA Experiment ID: 20000794 Result: Down-regulated in Transcription
  misc_feature: MA Experiment 20000794 PARAMETER Experiment Name: At_Petals_P Parameter: Age (day) Value: 23-25 days
  misc_feature: MA Experiment 20000794 PARAMETER Experiment Name: At_Petals_P Parameter: Plant Line Value: WS
  misc_feature: MA Experiment 20000794 PARAMETER Experiment Name: At_Petals_P Parameter: Tissue Value: Petals vs. Whole plant
  misc_feature: MA Experiment ID: 20001248 Result: Down-regulated in Transcription
  misc_feature: MA Experiment 20001248 PARAMETER Experiment Name: At_Far-red-induction_P Parameter: Age (day) Value: 7
  misc_feature: MA Experiment 20001248 PARAMETER Experiment Name: At_Far-red-induction_P Parameter: Light Value: Far-red vs. White
  misc_feature: MA Experiment 20001248 PARAMETER Experiment Name: At_Far-red-induction_P Parameter: Organism Value: A. thaliana
  misc_feature: MA Experiment 20001248 PARAMETER Experiment Name: At_Far-red-induction_P Parameter: Plant Line Value: Columbia
  misc_feature: MA Experiment 20001248 PARAMETER Experiment Name: At_Far-red-induction_P Parameter: Timepoint (hr) Value: 4
  misc_feature: MA Experiment 20001248 PARAMETER Experiment Name: At_Far-red-induction_P Parameter: Tissue Value: Whole Plant
  misc_feature: MA Experiment ID: 20001450 Result: Down-regulated in Transcription
  misc_feature: MA Experiment 20001450 PARAMETER Experiment Name: At_Far-red-induction_P Parameter: Age (day) Value: 7
  misc_feature: MA Experiment 20001450 PARAMETER Experiment Name: At_Far-red-induction_P Parameter: Light Value: Far-red vs. White
  misc_feature: MA Experiment 20001450 PARAMETER Experiment Name: At_Far-red-induction_P Parameter: Organism Value: A. thaliana
  misc_feature: MA Experiment 20001450 PARAMETER Experiment Name: At_Far-red-induction_P Parameter: Plant Line Value: Columbia
  misc_feature: MA Experiment 20001450 PARAMETER Experiment Name: At_Far-red-induction_P Parameter: Timepoint (hr) Value: 8
  misc_feature: MA Experiment 20001450 PARAMETER Experiment Name: At_Far-red-induction_P Parameter: Tissue Value: Whole Plant
  misc_feature: MA Experiment ID: 20001451 Result: Down-regulated in Transcription
  misc_feature: MA Experiment 20001451 PARAMETER Experiment Name: At_Far-red-induction_P Parameter: Age (day) Value: 7
  misc_feature: MA Experiment 20001451 PARAMETER Experiment Name: At_Far-red-induction_P Parameter: Light Value: Far-red vs. White
  misc_feature: MA Experiment 20001451 PARAMETER Experiment Name: At_Far-red-induction_P Parameter: Organism Value: A. thaliana
  misc_feature: MA Experiment 20001451 PARAMETER Experiment Name: At_Far-red-induction_P Parameter: Plant Line Value: Columbia
  misc_feature: MA Experiment 20001451 PARAMETER Experiment Name: At_Far-red-induction_P Parameter: Timepoint (hr) Value: 24
  misc_feature: MA Experiment 20001451 PARAMETER Experiment Name: At_Far-red-induction_P Parameter: Tissue Value: Whole Plant
  misc_feature: MA Experiment ID: 20001757 Result: Up-regulated in Transcription
  misc_feature: MA Experiment 20001757 PARAMETER Experiment Name: At_50mM_NH4NO3_L-to-H_P Parameter: Timepoint (hr) Value: 6
  misc_feature: MA Experiment 20001757 PARAMETER Experiment Name: At_50mM_NH4NO3_L-to-H_P Parameter: Tissue Value: Leaf
  misc_feature: MA Experiment 20001757 PARAMETER Experiment Name: At_50mM_NH4NO3_L-to-H_P Parameter: Treatment Value: 50mM NH4NO3 vs 100mM Mannitol
  misc_feature: MA Experiment ID: 20001905 Result: Down-regulated in Transcription
  misc_feature: MA Experiment 20001905 PARAMETER Experiment Name: At_Drought_Reproduction_P Parameter: Age (day) Value: 40
  misc_feature: MA Experiment 20001905 PARAMETER Experiment Name: At_Drought_Reproduction_P Parameter: Organism Value: A. thaliana
  misc_feature: MA Experiment 20001905 PARAMETER Experiment Name: At_Drought_Reproduction_P Parameter: Plant Line Value: WS
  misc_feature: MA Experiment 20001905 PARAMETER Experiment Name: At_Drought_Reproduction_P Parameter: Timepoint (day) Value: 10
  misc_feature: MA Experiment 20001905 PARAMETER Experiment Name: At_Drought_Reproduction_P Parameter: Tissue Value: Rosettes
  misc_feature: MA Experiment 20001905 PARAMETER Experiment Name: At_Drought_Reproduction_P Parameter: Treatment Value: Drought vs. No Drought
  misc_feature: MA Experiment ID: 20001910 Result: Down-regulated in Transcription
  misc_feature: MA Experiment 20001910 PARAMETER Experiment Name: At_Drought_Reproduction_P Parameter: Age (day) Value: 37
  misc_feature: MA Experiment 20001910 PARAMETER Experiment Name: At_Drought_Reproduction_P Parameter: Organism Value: A. thaliana
  misc_feature: MA Experiment 20001910 PARAMETER Experiment Name: At_Drought_Reproduction_P Parameter: Plant Line Value: WS
  misc_feature: MA Experiment 20001910 PARAMETER Experiment Name: At_Drought_Reproduction_P Parameter: Timepoint (day) Value: 7
  misc_feature: MA Experiment 20001910 PARAMETER Experiment Name: At_Drought_Reproduction_P Parameter: Tissue Value: Flowers
  misc_feature: MA Experiment 20001910 PARAMETER Experiment Name: At_Drought_Reproduction_P Parameter: Treatment Value: Drought vs. No Drought
  misc_feature: MA Experiment ID: 20001911 Result: Down-regulated in Transcription
  misc_feature: MA Experiment 20001911 PARAMETER Experiment Name: At_Drought_Reproduction_P Parameter: Age (day) Value: 40
  misc_feature: MA Experiment 20001911 PARAMETER Experiment Name: At_Drought_Reproduction_P Parameter: Organism Value: A. thaliana
  misc_feature: MA Experiment 20001911 PARAMETER Experiment Name: At_Drought_Reproduction_P Parameter: Plant Line Value: WS
  misc_feature: MA Experiment 20001911 PARAMETER Experiment Name: At_Drought_Reproduction_P Parameter: Timepoint (day) Value: 10
  misc_feature: MA Experiment 20001911 PARAMETER Experiment Name: At_Drought_Reproduction_P Parameter: Tissue Value: Flowers
  misc_feature: MA Experiment 20001911 PARAMETER Experiment Name: At_Drought_Reproduction_P Parameter: Treatment Value: Drought vs. No Drought
aacactcaaaagtagtaacaactaagaatggaagatatcatcatcggcgtggtggctctcgccgcggttctccttttcttcctctaccaaaaaccgaaaaccaaacggtacaagctacctccagggccatcaccacttccggtgatcggaaacctccttcagcttcagaagcttaacccacaacgcttcttcgctggatgggccaaaaaatacggtccaatcttgtcatacaggataggaagcagaacaatggtggtgatatcttcagctgagctagctaaagagcttctcaagacgcaagatgtcaactttgcggaccggcctccacatcgtggccatgagttcatatcctacggcaggcgtgacatggcattaaaccactacacaccgtattaccgagagataaggaagatggggatgaaccacttgttctcaccaacacgtgtggccacctttaagcatgtacgagaggaagaggctaggaggatgatggataagatcaacaaggccgcggataaatccgaagtagtcgatataagtgagcttatgttgaccttcacgaactcggttgtgtgtagacaagcgttcgggaagaagtacaatgaagatggagaagagatgaagaggttcatcaagattctttatgggactcaaagcgttttggggaagatctttttctctgattttttcccatattgtggctttcttgatgatttatcaggcctcacagcttatatgaaagagtgtttcgaaagacaagacacttatattcaagaggttgtcaatgagacgcttgatcctaagagagtcaagcccgaaaccgagagcatgattgatctcttgatggggatctacaaagaacaacctttcgcttctgagtttactgtagataatgtcaaagccgtcatcttggatattgtagtggcgggaacagatactgcagctgcggcggttgtgtgggggatgacgtatctaatgaagtacccacaagtgttgaagaaagctcaagcagaagtgagagagtatatgaaagagaaaggttcaacgttcgttactgaagacgatgtcaagaaccttccttacttcagagccttagttaaagaaaccctaaggatcgaaccagtgattcctctccttatccctcgtgcttgcattcaagataccaagatcgccggttacgacatccccgcaggaacaacggtcaacgtcaacgcgtgggccgtgtcacgtgacgagaaagaatggggaccgaaccctgatgagtttaggcccgagaggtttcttgagaaggaagttgacttcaaaggcacggactacgagtttataccgttcgggtcaggccggagaatgtgcccgggaatgcgtcttggggccgcgatgcttgaggttccttatgcgaaccttctcctcagcttcaactttaaacttcctaatgggatgaaaccagatgatatcaatatggatgtcatgactggtcttgctatgcacaagtcgcagcatctcaagcttgttccagagaaagtgaacaagtattagctaatatatatcaaataaatctaccttctctgattatatagtatatgttcctccagtgtattctgtttcaatgtttggtttctttcttaaatggcaatcgtctctctatctttctcttcacattttgatatgaaggaagcaaattcacat

SEQ ID NO: 98359 - protein, 502 aa, Arabidopsis thaliana; identical to SEQ ID NO: 85413
  peptide (1)..(502): Ceres Seq. ID no. 13593303
  misc_feature (31)..(495): Pfam Name: Cytochrome P450 Pfam Description: Cytochrome P450
  misc_feature (1)..(502): Homolog of NCBI NO: 15236349 NR Description: cytochrome P450 family [Arabidopsis thaliana]
  misc_feature (1)..(502): Homolog of NCBI NO: 619745 NR Description: cytochrome p450 dependent monooxygenase
  misc_feature (4)..(498): Homolog of NCBI NO: 15235968 NR Description: cytochrome P450 83B1 [Arabidopsis thaliana]
  misc_feature (1)..(295): Homolog of NCBI NO: 16323067 NR Description: AT4g13770/F18A5_160 [Arabidopsis thaliana]
  misc_feature (11)..(500): Homolog of NCBI NO: 16507125 NR Description: cytochrome P450 [Citrus sinensis]
  misc_feature (4)..(498): Homolog of NCBI NO: 25282608 NR Description: cytochrome P-450LXXIA1 [similarity] - avocado
  misc_feature (4)..(496): Homolog of NCBI NO: 15238701 NR Description: cytochrome P450 family [Arabidopsis thaliana]
  misc_feature (5)..(496): Homolog of NCBI NO: 1345641 NR Description: Cytochrome P450 71B1 (CYPLXXIB1)
  misc_feature (4)..(496): Homolog of NCBI NO: 15238717 NR Description: cytochrome P450 family [Arabidopsis thaliana] Cytochrome P450 71B12 >gi|4063734|gb|AAC98444.1| putative P450
  misc_feature (8)..(502): Homolog of NCBI NO: 15222174 NR Description: cytochrome P450 family [Arabidopsis thaliana]

SEQ ID NO: 98360 - protein, 428 aa, Arabidopsis thaliana; identical to SEQ ID NO: 85414
  peptide (1)..(428): Ceres Seq. ID no. 13593304
  misc_feature (1)..(421): Pfam Name: Cytochrome P450 Pfam Description: Cytochrome P450
  misc_feature (1)..(428): Homolog of NCBI NO: 15236349 NR Description: cytochrome P450 family [Arabidopsis thaliana]
  misc_feature (1)..(428): Homolog of NCBI NO: 619745 NR Description: cytochrome p450 dependent monooxygenase
  misc_feature (1)..(424): Homolog of NCBI NO: 15235968 NR Description: cytochrome P450 83B1 [Arabidopsis thaliana]
  misc_feature (1)..(221): Homolog of NCBI NO: 16323067 NR Description: AT4g13770/F18A5_160 [Arabidopsis thaliana]
  misc_feature (1)..(426): Homolog of NCBI NO: 16507125 NR Description: cytochrome P450 [Citrus sinensis]
  misc_feature (1)..(424): Homolog of NCBI NO: 25282608 NR Description: cytochrome P-450LXXIA1 [similarity] - avocado
  misc_feature (1)..(422): Homolog of NCBI NO: 15238701 NR Description: cytochrome P450 family [Arabidopsis thaliana]
  misc_feature (1)..(422): Homolog of NCBI NO: 1345641 NR Description: Cytochrome P450 71B1 (CYPLXXIB1)
  misc_feature (1)..(422): Homolog of NCBI NO: 15238717 NR Description: cytochrome P450 family [Arabidopsis thaliana] Cytochrome P450 71B12 >gi|4063734|gb|AAC98444.1| putative P450
  misc_feature (1)..(428): Homolog of NCBI NO: 15222174 NR Description: cytochrome P450 family [Arabidopsis thaliana]

SEQ ID NO: 98361 - protein, 389 aa, Arabidopsis thaliana; identical to SEQ ID NO: 85415
  peptide (1)..(389): Ceres Seq. ID no. 13593305
  misc_feature (1)..(382): Pfam Name: Cytochrome P450 Pfam Description: Cytochrome P450
  misc_feature (1)..(389): Homolog of NCBI NO: 15236349 NR Description: cytochrome P450 family [Arabidopsis thaliana]
  misc_feature (1)..(389): Homolog of NCBI NO: 619745 NR Description: cytochrome p450 dependent monooxygenase
  misc_feature (1)..(385): Homolog of NCBI NO: 15235968 NR Description: cytochrome P450 83B1 [Arabidopsis thaliana]
  misc_feature (1)..(182): Homolog of NCBI NO: 16323067 NR Description: AT4g13770/F18A5_160 [Arabidopsis thaliana]
  misc_feature (1)..(387): Homolog of NCBI NO: 16507125 NR Description: cytochrome P450 [Citrus sinensis]
  misc_feature (1)..(385): Homolog of NCBI NO: 25282608 NR Description: cytochrome P-450LXXIA1 [similarity] - avocado
  misc_feature (1)..(383): Homolog of NCBI NO: 15238701 NR Description: cytochrome P450 family [Arabidopsis thaliana]
  misc_feature (1)..(383): Homolog of NCBI NO: 1345641 NR Description: Cytochrome P450 71B1 (CYPLXXIB1)
  misc_feature (1)..(383): Homolog of NCBI NO: 15238717 NR Description: cytochrome P450 family [Arabidopsis thaliana] Cytochrome P450 71B12 >gi|4063734|gb|AAC98444.1| putative P450
  misc_feature (1)..(389): Homolog of NCBI NO: 15222174 NR Description: cytochrome P450 family [Arabidopsis thaliana]

SEQ ID NO: 98362 - DNA, 2472 bp, Arabidopsis thaliana
  misc_feature (1)..(2472): Ceres Seq. ID no. 13593380
  misc_feature: MA Experiment ID: 20000179 Result: Up-regulated in Transcription
  misc_feature: MA Experiment 20000179 PARAMETER Experiment Name: At_Germinating_Seeds_P Parameter: Age (hr) Value: 6 vs. 0
  misc_feature: MA Experiment 20000179 PARAMETER Experiment Name: At_Germinating_Seeds_P Parameter: Tissue Value: Germinating Seeds
  misc_feature: MA Experiment ID: 20000180 Result: Up-regulated in Transcription
  misc_feature: MA Experiment 20000180 PARAMETER Experiment Name: At_Germinating_Seeds_P Parameter: Age (hr) Value: 24 vs. 0
  misc_feature: MA Experiment 20000180 PARAMETER Experiment Name: At_Germinating_Seeds_P Parameter: Tissue Value: Germinating Seeds
  misc_feature: MA Experiment ID: 20000184 Result: Up-regulated in Transcription
  misc_feature: MA Experiment 20000184 PARAMETER Experiment Name: At_Shoots__P Parameter: Age (day) Value: 7
  misc_feature: MA Experiment 20000184 PARAMETER Experiment Name: At_Shoots__P Parameter: Tissue Value: Shoots vs. Whole Plant
  misc_feature: MA Experiment ID: 20000185 Result: Down-regulated in Transcription
  misc_feature: MA Experiment 20000185 PARAMETER Experiment Name: At_Roots__P Parameter: Age (day) Value: 7 vs. 21
  misc_feature: MA Experiment 20000185 PARAMETER Experiment Name: At_Roots__P Parameter: Organism Value: A. thaliana
  misc_feature: MA Experiment 20000185 PARAMETER Experiment Name: At_Roots__P Parameter: Tissue Value: Roots vs. Whole Plant
  misc_feature: MA Experiment ID: 20000438 Result: Up-regulated in Transcription
  misc_feature: MA Experiment 20000438 PARAMETER Experiment Name: At_Shoots__P Parameter: Age (day) Value: 14
  misc_feature: MA Experiment 20000438 PARAMETER Experiment Name: At_Shoots__P Parameter: Tissue Value: Shoots vs. Whole Plant
  misc_feature: MA Experiment ID: 20000439 Result: Down-regulated in Transcription
  misc_feature: MA Experiment 20000439 PARAMETER Experiment Name: At_Roots__P Parameter: Age (day) Value: 14 vs. 21
  misc_feature: MA Experiment 20000439 PARAMETER Experiment Name: At_Roots__P Parameter: Organism Value: A. thaliana
  misc_feature: MA Experiment 20000439 PARAMETER Experiment Name: At_Roots__P Parameter: Tissue Value: Roots vs. Whole Plant
  misc_feature: MA Experiment ID: 20000495 Result: Down-regulated in Transcription
  misc_feature: MA Experiment 20000495 PARAMETER Experiment Name: At_Guard_Cells_P Parameter: Harvest Date Value: 8/2/2002
  misc_feature: MA Experiment 20000495 PARAMETER Experiment Name: At_Guard_Cells_P Parameter: Organism Value: A. thaliana
  misc_feature: MA Experiment 20000495 PARAMETER Experiment Name: At_Guard_Cells_P Parameter: Tissue Value: Guard Cells vs. Leaves
  misc_feature: MA Experiment ID: 20001560 Result: Down-regulated in Transcription
  misc_feature: MA Experiment 20001560 PARAMETER Experiment Name: At_Drought_Soil_Dry_P Parameter: Age (day) Value: 28
  misc_feature: MA Experiment 20001560 PARAMETER Experiment Name: At_Drought_Soil_Dry_P Parameter: Organism Value: A. thaliana
  misc_feature: MA Experiment 20001560 PARAMETER Experiment Name: At_Drought_Soil_Dry_P Parameter: Plant Line Value: WS
  misc_feature: MA Experiment 20001560 PARAMETER Experiment Name: At_Drought_Soil_Dry_P Parameter: Post Timepoint (hr) Value: None
  misc_feature: MA Experiment 20001560 PARAMETER Experiment Name: At_Drought_Soil_Dry_P Parameter: Post-Treatment Value: None
  misc_feature: MA Experiment 20001560 PARAMETER Experiment Name: At_Drought_Soil_Dry_P Parameter: Timepoint (day) Value: 14
  misc_feature: MA Experiment 20001560 PARAMETER Experiment Name: At_Drought_Soil_Dry_P Parameter: Treatment Value: Drought vs. No Drought
tgcttaatctcctcttccttaaaaaccagaagatcctttgttccacgtttctcgtttgtagcttcttctctctcagaattcaattcgaattttgacaagtcttgacgaagaagaagaaacagagctgcttcaatggcttctaactcattactacgttcttcttcaaatttcttcttaggatcccatatcataatctcatctcccacccctaaaaccaccagaaaaccctctttccctttctccttcgtctcccgtgctaaataccaaatcactcgatcgtctcaagacgaaaattcgccaaatggtaaacccaattcgccattctcgtcgcaagtagccttagcagctattctactatcttcaatttcatcttcgccgctagctttagctgtagtggacgaaccagcttctccgtctgtcgttatagaatctcaagctgtgaagccatcgacgccatcgccattgttcattcagaacgagatacttaaggctcctagtcctaaatcatcggatctcccagaaggatcacagtggcgatacagcgagtttcttaacgctgtgaagaaagggaaagtcgagagagttagattcagcaaagatggttctgttgttcagcttactgccgtcgacaatcgccgtgcttcagtcatcgtccctaacgaccctgaccttattgatatcttggctatgaacggagttgatatatccgtctctgaaggagaatcctcaggcaatgacttgttcactgtcattggaaacttgattttcccgcttttggcctttggtggactcttcttgcttttcaggcgagctcagggaggccctggtggtggtcctggtggcttgggtggtcctatggatttcggacgttctaaatccaagttccaggaagtgcctgagactggtgtatcatttgcagatgttgctggggctgatcaagctaagttggagttacaggaagttgtggatttcttgaagaatcctgataagtacacagccttgggtgctaagattcctaaagggtgtttgcttgttggaccgcctggtacgggtaagacactcctggctagggcggtggctggggaagctggagtgccgttcttctcttgcgcggcctcggagttcgtagagctttttgtgggtgtgggtgcatcgagagttagggatttgttcgagaaggctaagtctaaagccccttgtattgtattcattgatgagattgacgctgtgggtaggcagagaggagctgggatgggaggaggaaatgatgagagagaacagactattaatcagctgttgacagagatggatggattttctggcaactctggtgtgatagttttggcagctacgaataggccggacgttcttgattcggctttgttgaggcctggaaggtttgatcgacaggtcacggtggataggcctgatgtggctggcagagtcaagattcttcaggttcattctagggggaaggcactcggtaaagatgtggactttgacaaggttgccagaaggacccctggtttcacgggtgctgacttacaaaacctgatgaatgaagcggcgattcttgcggctaggcgtgagcttaaggaaataagcaaggatgaaatctctgatgctcttgagaggatcattgctggacctgagaagaagaatgcagttgtctctgaagagaagaagagacttgttgcataccatgaggctggtcatgctctagtgggtgctcttatgccagaatatgatccggttgcaaagatttctatcattcctcgtggccaagctggtgggctcactttttttgctccaagcgaagaaagacttgagtctggattgtacagtaggagctaccttgagaatcaaatggctgttgcacttggcggaagggttgcagaggaggtgatctttggggatgagaatgtgacgactggagcatcaaatgatttcatgcaggtgtctcgtgtggcacgtcaaatgattgagagatttgggttcagcaaaaagattggacaagttgctgttggtggccctggtggaaatcccttcatgggtcaacaaatgtcatcacagaaagattactcaatggcaactgcggatattgtagatgctgaggtgcgagagttagttgagaaggcatacaagagagcaacggagatcataacaactcatattgatatcctacacaagcttgcacagctcctgatcgagaaagaaactgttgacggtgaagagttcatgagtctctttattgacggccaagctgagttgtatatttcttgattcctcaaagttgccattgcttagtgcttacaataccataagctaataagtatattcgtgttcatatgtgtcaccgattcagtactcaccaattcagtatatttgtgtatattccgttgttttagtgaatctaaatatactttgtaatgcaatgcaatttgtttaaagaaaagtaatttgatctggttt

SEQ ID NO: 98363 - protein, 716 aa, Arabidopsis thaliana
  peptide (1)..(716): Ceres Seq. ID no. 13593381
  misc_feature (490)..(705): Pfam Name: Peptidase family M41 Pfam Description: Peptidase family M41
  misc_feature (1)..(716): Homolog of NCBI NO: 18422193 NR Description: FtsH protease, putative [Arabidopsis thaliana] Cell division protein ftsH homolog 2, chloroplast precursor
  misc_feature (73)..(701): Homolog of NCBI NO: 2077957 NR Description: ATPase [Arabidopsis thaliana]
  misc_feature (3)..(716): Homolog of NCBI NO: 17865457 NR Description: Cell division protein ftsH homolog, chloroplast (DS9) >gi|5804782|dbj|BAA33755.2| chloroplast FtsH protease
  misc_feature (1)..(716): Homolog of NCBI NO: 17865463 NR Description: Cell division protein ftsH homolog, chloroplast >gi|13183728|gb|AAK15322.1|AF332134_1 FtsH protease [Medicago
  misc_feature (36)..(694): Homolog of NCBI NO: 2492515 NR Description: Cell division protein ftsH homolog, chloroplast
  misc_feature (129)..(712): Homolog of NCBI NO: 17228756 NR Description: cell division protein [Nostoc sp. PCC 7120]
  misc_feature (129)..(705): Homolog of NCBI NO: 23129565 NR Description: hypothetical protein [Nostoc punctiforme]
  misc_feature (111)..(707): Homolog of NCBI NO: 33239707 NR Description: Cell division protein FtsH [Prochlorococcus subsp. marinus str. CCMP1375] >gi|33237232|gb|AAP99301.1| Cell protein FtsH [Prochlorococcus marinus subsp. marinus str.
  misc_feature (132)..(705): Homolog of NCBI NO: 30684767 NR Description: FtsH protease (VAR2) [Arabidopsis thaliana]
  misc_feature (132)..(705): Homolog of NCBI NO: 33240371 NR Description: Cell division protein FtsH [Prochlorococcus subsp. marinus str. CCMP1375] >gi|33237898|gb|AAP99965.1| Cell protein FtsH [Prochlorococcus marinus subsp. marinus str.
MASNSLLRSSSNFFLGSHIIISSPTPKTTRKPSFPFSFVSRAKYQITRSSQDENSPNGKPNSPFSSQVALAAILLSSISSSPLALAVVDEPASPSVVIESQAVKPSTPSPLFIQNEILKAPSPKSSDLPEGSQWRYSEFLNAVKKGKVERVRFSKDGSVVQLTAVDNRRASVIVPNDPDLIDILAMNGVDISVSEGESSGNDLFTVIGNLIFPLLAFGGLFLLFRRAQGGPGGGPGGLGGPMDFGRSKSKFQEVPETGVSFADVAGADQAKLELQEVVDFLKNPDKYTALGAKIPKGCLLVGPPGTGKTLLARAVAGEAGVPFFSCAASEFVELFVGVGASRVRDLFEKAKSKAPCIVFIDEIDAVGRQRGAGMGGGNDEREQTINQLLTEMDGFSGNSGVIVLAATNRPDVLDSALLRPGRFDRQVTVDRPDVAGRVKILQVHSRGKALGKDVDFDKVARRTPGFTGADLQNLMNEAAILAARRELKEISKDEISDALERIIAGPEKKNAVVSEEKKRLVAYHEAGHALVGALMPEYDPVAKISIIPRGQAGGLTFFAPSEERLESGLYSRSYLENQMAVALGGRVAEEVIFGDENVTTGASNDFMQVSRVARQMIERFGFSKKIGQVAVGGPGGNPFMGQQMSSQKDYSMATADIVDAEVRELVEKAYKRATEIITTHIDILHKLAQLLIEKETVDGEEFMSLFIDGQAELYIS

SEQ ID NO: 98364 - protein, 531 aa, Arabidopsis thaliana; identical to SEQ ID NO: 45525
  peptide (1)..(531): Ceres Seq. ID no. 13593382
  misc_feature (305)..(520): Pfam Name: Peptidase family M41 Pfam Description: Peptidase family M41
  misc_feature (1)..(531): Homolog of NCBI NO: 18422193 NR Description: FtsH protease, putative [Arabidopsis thaliana] Cell division protein ftsH homolog 2, chloroplast precursor
  misc_feature (1)..(516): Homolog of NCBI NO: 2077957 NR Description: ATPase [Arabidopsis thaliana]
  misc_feature (1)..(531): Homolog of NCBI NO: 17865457 NR Description: Cell division protein ftsH homolog, chloroplast (DS9) >gi|5804782|dbj|BAA33755.2| chloroplast FtsH protease
  misc_feature (1)..(531): Homolog of NCBI NO: 17865463 NR Description: Cell division protein ftsH homolog, chloroplast >gi|13183728|gb|AAK15322.1|AF332134_1 FtsH protease [Medicago
  misc_feature (1)..(509): Homolog of NCBI NO: 2492515 NR Description: Cell division protein ftsH homolog, chloroplast
  misc_feature (1)..(527): Homolog of NCBI NO: 17228756 NR Description: cell division protein [Nostoc sp. PCC 7120]
  misc_feature (1)..(520): Homolog of NCBI NO: 23129565 NR Description: hypothetical protein [Nostoc punctiforme]
  misc_feature (1)..(522): Homolog of NCBI NO: 33239707 NR Description: Cell division protein FtsH [Prochlorococcus subsp. marinus str. CCMP1375] >gi|33237232|gb|AAP99301.1| Cell protein FtsH [Prochlorococcus marinus subsp. marinus str.
  misc_feature (1)..(520): Homolog of NCBI NO: 30684767 NR Description: FtsH protease (VAR2) [Arabidopsis thaliana]
  misc_feature (1)..(520): Homolog of NCBI NO: 33240371 NR Description: Cell division protein FtsH [Prochlorococcus subsp. marinus str. CCMP1375] >gi|33237898|gb|AAP99965.1| Cell protein FtsH [Prochlorococcus marinus subsp. marinus str.

SEQ ID NO: 98365 - protein, 475 aa, Arabidopsis thaliana; identical to SEQ ID NO: 45526
  peptide (1)..(475): Ceres Seq. ID no. 13593383
  misc_feature (249)..(464): Pfam Name: Peptidase family M41 Pfam Description: Peptidase family M41
  misc_feature (1)..(475): Homolog of NCBI NO: 18422193 NR Description: FtsH protease, putative [Arabidopsis thaliana] Cell division protein ftsH homolog 2, chloroplast precursor
  misc_feature (1)..(460): Homolog of NCBI NO: 2077957 NR Description: ATPase [Arabidopsis thaliana]
  misc_feature (1)..(475): Homolog of NCBI NO: 17865457 NR Description: Cell division protein ftsH homolog, chloroplast (DS9) >gi|5804782|dbj|BAA33755.2| chloroplast FtsH protease
  misc_feature (1)..(475): Homolog of NCBI NO: 17865463 NR Description: Cell division protein ftsH homolog, chloroplast >gi|13183728|gb|AAK15322.1|AF332134_1 FtsH protease [Medicago
  misc_feature (1)..(453): Homolog of NCBI NO: 2492515 NR Description: Cell division protein ftsH homolog, chloroplast
  misc_feature (1)..(471): Homolog of NCBI NO: 17228756 NR Description: cell division protein [Nostoc sp. PCC 7120]
  misc_feature (1)..(464): Homolog of NCBI NO: 23129565 NR Description: hypothetical protein [Nostoc punctiforme]
  misc_feature (1)..(466): Homolog of NCBI NO: 33239707 NR Description: Cell division protein FtsH [Prochlorococcus subsp. marinus str. CCMP1375] >gi|33237232|gb|AAP99301.1| Cell protein FtsH [Prochlorococcus marinus subsp. marinus str.
  misc_feature (1)..(464): Homolog of NCBI NO: 30684767 NR Description: FtsH protease (VAR2) [Arabidopsis thaliana]
  misc_feature (1)..(464): Homolog of NCBI NO: 33240371 NR Description: Cell division protein FtsH [Prochlorococcus subsp. marinus str. CCMP1375] >gi|33237898|gb|AAP99965.1| Cell protein FtsH [Prochlorococcus marinus subsp. marinus str.

SEQ ID NO: 98366 - DNA, 1755 bp, Arabidopsis thaliana
  misc_feature (1)..(1755): Ceres Seq. ID no. 13593392
  misc_feature: MA Experiment ID: 20000315 Result: Down-regulated in Transcription
  misc_feature: MA Experiment 20000315 PARAMETER Experiment Name: At_14day_Shoots-Roots_Sub_P Parameter: Age (day) Value: 14
  misc_feature: MA Experiment 20000315 PARAMETER Experiment Name: At_14day_Shoots-Roots_Sub_P Parameter: Organism Value: A. thaliana
  misc_feature: MA Experiment 20000315 PARAMETER Experiment Name: At_14day_Shoots-Roots_Sub_P Parameter: Plant Line Value: WS
  misc_feature: MA Experiment 20000315 PARAMETER Experiment Name: At_14day_Shoots-Roots_Sub_P Parameter: Tissue Value: Shoots vs. Whole Plant
  misc_feature: MA Experiment ID: 20000329 Result: Down-regulated in Transcription
  misc_feature: MA Experiment 20000329 PARAMETER Experiment Name: At_4deg_Cold_Sub_P Parameter: Age (day) Value: 14
  misc_feature: MA Experiment 20000329 PARAMETER Experiment Name: At_4deg_Cold_Sub_P Parameter: Organism Value: A. thaliana
  misc_feature: MA Experiment 20000329 PARAMETER Experiment Name: At_4deg_Cold_Sub_P Parameter: Plant Line Value: WS
  misc_feature: MA Experiment 20000329 PARAMETER Experiment Name: At_4deg_Cold_Sub_P Parameter: Temperature (deg C) Value: 4 vs. 22
  misc_feature: MA Experiment 20000329 PARAMETER Experiment Name: At_4deg_Cold_Sub_P Parameter: Timepoint (hr) Value: 6
  misc_feature: MA Experiment 20000329 PARAMETER Experiment Name: At_4deg_Cold_Sub_P Parameter: Tissue Value: Aerial
  misc_feature: MA Experiment ID: 20000355 Result: Down-regulated in Transcription
  misc_feature: MA Experiment 20000355 PARAMETER Experiment Name: At_Siliques_Sub_P Parameter: Age (day) Value: 21
  misc_feature: MA Experiment 20000355 PARAMETER Experiment Name: At_Siliques_Sub_P Parameter: Organism Value: A. thaliana
  misc_feature: MA Experiment 20000355 PARAMETER Experiment Name: At_Siliques_Sub_P Parameter: Plant Line Value: WS
  misc_feature: MA Experiment 20000355 PARAMETER Experiment Name: At_Siliques_Sub_P Parameter: Tissue Value: Less Than 5mm Siliques vs. Whole Plant
atcccagtttttttttgtttttaatcactcaaccattaaaccccattttgatctctagttttttaaaagcaggagattttccttttcccagaaaagaaatttcccaaatcaaagtttcgagctttcacttctcgacttgcaaattctcgtcctttttactgaattcgatctgggtttttgtttttgattagtaaaataacaaaaaaaaaaaaaaggatttatcagaaatggctgcgagcgatgaagttaatcttattgagagcagaacagtggttcctctcaatacatgggttttaatatccaacttcaaagtagcctacaatatccttcgtcgccctgatggaacctttaaccgacacttagctgagtatctagaccgtaaagtcactgcaaacgccaatccggttgatggggttttctcgttcgatgtcttgattgatcgcaggatcaatcttctaagcagagtctatagaccagcttatgcagatcaagagcaacctcctagtattttagatctcgagaagcctgttgatggcgacattgtccctgttatattgttcttccatggaggtagctttgctcattcttctgcaaacagtgccatctacgatactctttgtcgcaggcttgttggtttgtgcaagtgtgttgttgtctctgtgaattatcggcgtgcaccagagaatccatacccttgtgcttatgatgatggttggattgctcttaattgggttaactcgagatcttggcttaaatccaagaaagactcaaaggtccatattttcttggctggtgatagctctggaggtaacatcgcgcataatgtggctttaagagcgggtgaatcgggaatcgatgttttggggaacattctgctgaatcctatgtttggtgggaatgagagaacggagtctgagaaaagtttggatgggaaatactttgtgacggttagagaccgcgattggtactggaaagcgtttttacccgagggagaagatagagagcatccagcgtgtaatccgtttagcccgagagggaaaagcttagaaggagtgagtttccccaagagtcttgtggttgtcgcgggtttggatttgattagagattggcagttggcatacgcggaagggctcaagaaagcgggtcaagaggttaagcttatgcatttagagaaagcaactgttgggttttacctcttgcctaataacaatcatttccataatgttatggatgagatttcggcgtttgtaaacgcggaatgttaacactgggttagagaaagaaggttgttttaacaaagccaagacatctttcaaactaacacacaggtgaatgtattgcctgtggattctctcgtttagttttgtttttgtgtttagtatctaagtgtgtggcggtctgcggcagcctttgtgatgactgtttaaacgctggattctgaaacgctaaagcttgtggaagaacagtgaggcgtttagagacttggaaaggaaccaagcactagtaaaaatttctcctttttttgtctgtaatatttggcatttagcttttacccttgagcctttttactaactaaaagctgattttttcagcatgagagtggtaattagatatctataaatatatatatttcaagaatgtaatgtttatacacaaattttagtgattttggtaaatgtatgtagggtctgcactctgcagttgtattgttgctcctctttttcattgtactctaatggattttacaaaaataag

SEQ ID NO: 98367 - protein, 345 aa, Arabidopsis thaliana; identical to SEQ ID NO: 29047
  peptide (1)..(345): Ceres Seq. ID no. 13593393
  misc_feature (101)..(151): Pfam Name: Carboxylesterase Pfam Description: Carboxylesterase
  misc_feature (1)..(345): Homolog of NCBI NO: 15229905 NR Description: expressed protein [Arabidopsis thaliana] unknown protein [Arabidopsis thaliana] unknown protein [Arabidopsis thaliana]
  misc_feature (1)..(345): Homolog of NCBI NO: 15240483 NR Description: expressed protein [Arabidopsis thaliana] Unknown protein [Arabidopsis thaliana]
  misc_feature (1)..(343): Homolog of NCBI NO: 15229371 NR Description: expressed protein [Arabidopsis thaliana]
  misc_feature (13)..(342): Homolog of NCBI NO: 21618039 NR Description: unknown [Arabidopsis thaliana]
  misc_feature (13)..(342): Homolog of NCBI NO: 15237783 NR Description: expressed protein [Arabidopsis thaliana] contains similarity to unknown
  misc_feature (3)..(341): Homolog of NCBI NO: 34904770 NR Description: similar to carboxylesterase [Oryza sativa
  misc_feature (16)..(343): Homolog of NCBI NO: 34393714 NR Description: putative esterase [Oryza sativa (japonica
  misc_feature (16)..(343): Homolog of NCBI NO: 34904774 NR Description: similar to carboxylesterase [Oryza sativa
  misc_feature (13)..(345): Homolog of NCBI NO: 34904772 NR Description: similar to carboxylesterase [Oryza sativa
  misc_feature (30)..(341): Homolog of NCBI NO: 34904760 NR Description: similar to carboxylesterase [Oryza sativa

SEQ ID NO: 98368 - DNA, 1741 bp, Arabidopsis thaliana
  misc_feature (1)..(1741): Ceres Seq. ID no. 13593406
  misc_feature: MA Experiment ID: 108461 Result: Up-regulated in Transcription
  misc_feature: MA Experiment 108461 PARAMETER Experiment Name: At_Germinating_Seeds_cDNA_P Parameter: Age (day) Value: 1 vs. 0
  misc_feature: MA Experiment 108461 PARAMETER Experiment Name: At_Germinating_Seeds_cDNA_P Parameter: Tissue Value: Germinating Seeds
  misc_feature: MA Experiment ID: 108462 Result: Up-regulated in Transcription
  misc_feature: MA Experiment 108462 PARAMETER Experiment Name: At_Germinating_Seeds_cDNA_P Parameter: Age (day) Value: 2 vs. 0
  misc_feature: MA Experiment 108462 PARAMETER Experiment Name: At_Germinating_Seeds_cDNA_P Parameter: Tissue Value: Germinating Seeds
  misc_feature: MA Experiment ID: 108463 Result: Up-regulated in Transcription
  misc_feature: MA Experiment 108463 PARAMETER Experiment Name: At_Germinating_Seeds_cDNA_P Parameter: Age (day) Value: 3 vs. 0
  misc_feature: MA Experiment 108463 PARAMETER Experiment Name: At_Germinating_Seeds_cDNA_P Parameter: Tissue Value: Germinating Seeds
  misc_feature: MA Experiment ID: 108464 Result: Up-regulated in Transcription
  misc_feature: MA Experiment 108464 PARAMETER Experiment Name: At_Germinating_Seeds_cDNA_P Parameter: Age (day) Value: 4 vs. 0
  misc_feature: MA Experiment 108464 PARAMETER Experiment Name: At_Germinating_Seeds_cDNA_P Parameter: Tissue Value: Germinating Seeds
  misc_feature: MA Experiment ID: 108474 Result: Down-regulated in Transcription
  misc_feature: MA Experiment 108474 PARAMETER Experiment Name: At_Drought_Flowers_cDNA_P Parameter: Timepoint (hr) Value: null
  misc_feature: MA Experiment 108474 PARAMETER Experiment Name: At_Drought_Flowers_cDNA_P Parameter: Treatment Value: Drought vs. No Drought
  misc_feature: MA Experiment ID: 108576 Result: Up-regulated in Transcription
  misc_feature: MA Experiment 108576 PARAMETER Experiment Name: At_42deg_Heat_cDNA_P Parameter: Temperature (deg C) Value: 42 vs. 22
  misc_feature: MA Experiment 108576 PARAMETER Experiment Name: At_42deg_Heat_cDNA_P Parameter: Timepoint (hr) Value: 1
  misc_feature: MA Experiment 108576 PARAMETER Experiment Name: At_42deg_Heat_cDNA_P Parameter: Tissue Value: Aerial
  misc_feature: MA Experiment ID: 20000180 Result: Up-regulated in Transcription
  misc_feature: MA Experiment 20000180 PARAMETER Experiment Name: At_Germinating_Seeds_P Parameter: Age (hr) Value: 24 vs. 0
  misc_feature: MA Experiment 20000180 PARAMETER Experiment Name: At_Germinating_Seeds_P Parameter: Tissue Value: Germinating Seeds
  misc_feature: MA Experiment ID: 20000264 Result: Up-regulated in Transcription
  misc_feature: MA Experiment 20000264 PARAMETER Experiment Name: At_Open_Flower_P Parameter: Age (day) Value: 21
  misc_feature: MA Experiment 20000264 PARAMETER Experiment Name: At_Open_Flower_P Parameter: Plant Line Value: WS
  misc_feature: MA Experiment 20000264 PARAMETER Experiment Name: At_Open_Flower_P Parameter: Tissue Value: Open Flower vs. Whole Plant
  misc_feature: MA Experiment ID: 20000265 Result: Up-regulated in Transcription
  misc_feature: MA Experiment 20000265 PARAMETER Experiment Name: At_Open_Flower_P Parameter: Age (day) Value: 21
  misc_feature: MA Experiment 20000265 PARAMETER Experiment Name: At_Open_Flower_P Parameter: Plant Line Value: WS
  misc_feature: MA Experiment 20000265 PARAMETER Experiment Name: At_Open_Flower_P Parameter: Tissue Value: Closed Flower vs. Whole Plant
  misc_feature: MA Experiment ID: 20000286 Result: Up-regulated in Transcription
  misc_feature: MA Experiment 20000286 PARAMETER Experiment Name: At_Open_Flower_P Parameter: Age (day) Value: 21
  misc_feature: MA Experiment 20000286 PARAMETER Experiment Name: At_Open_Flower_P Parameter: Plant Line Value: WS
  misc_feature: MA Experiment 20000286 PARAMETER Experiment Name: At_Open_Flower_P Parameter: Tissue Value: Half Open vs. Whole Plant
  misc_feature: MA Experiment ID: 20001906 Result: Up-regulated in Transcription
  misc_feature: MA Experiment 20001906 PARAMETER Experiment Name: At_Drought_Reproduction_P Parameter: Age (day) Value: 35
  misc_feature: MA Experiment 20001906 PARAMETER Experiment Name: At_Drought_Reproduction_P Parameter: Organism Value: A. thaliana
  misc_feature: MA Experiment 20001906 PARAMETER Experiment Name: At_Drought_Reproduction_P Parameter: Plant Line Value: WS
  misc_feature: MA Experiment 20001906 PARAMETER Experiment Name: At_Drought_Reproduction_P Parameter: Timepoint (day) Value: 5
  misc_feature: MA Experiment 20001906 PARAMETER Experiment Name: At_Drought_Reproduction_P Parameter: Tissue Value: Siliques
  misc_feature: MA Experiment 20001906 PARAMETER Experiment Name: At_Drought_Reproduction_P Parameter: Treatment Value: Drought vs. No Drought
atgggaaagctcttggtgttaatgttagttgggatgttcttggcttttgaaagcttggaagctcttgaatatggagatgcacttaacaagtcaatcttgttctttgaaggccaacgatccggtaaactcccgactaaccaacgagttaaatggcgagccgattctgccctctctgatggttcacttgctaatgtgaatttaattggaggatattacgatgctggtgacaatgtaaaatttgtgtggccaatgtcatttaccacaaccttgttaagttgggctgcaattgaataccaaaatgagatttcttccgttaaccagctcggttatctccggtctactatcaaatggggaaccgatttcatcctacgcgctcatacatctcccaacatgctatatacccaggtgggagatggtaattcagatcatagttgttgggagaggccagaagatatggacacatcaagaactctctacagtatctcttcctcttcccctggttctgaagccgcgggtgaagccgcagccgctcttgcagcggcctcacttgttttcaaatcggtcgattctacttattcatccacactattaaaccatgcaaaaaccctatttgaatttgctgataagtacagaggttcttatcaagcatcttgccctttctactgctcctactccggctaccaggatgaattattatgggctgcggcttggctatataaagcaacaggagataaaatttacataaattatgttataagcaataaagattggagccaagccgttaatgaattcagttgggacaacaaattcgtcggcgctcaagctttactcgtatcggagttttacaacggggcaaatgacttggcaaaatttaagtccgatgttgaatccttcgtctgtgcaatgatgccaggaagtagctctcaacaaattaaaccaactcctggtggccttttgtttattagagacagtagcaacttacaatatgtaacaacggctacaactgttttgttccattactcaaaaactcttaccaaagccggggttggttcaatccagtgcggttcgaccaagttcaccgtatctcaaattcgaaattttgccaaatcacaggttgattatatccttggaaataatccaatgaaaatgtcttacatggtcggatttgggacaaagtatccaacacaacctcatcatagaggctcatctttaccatcgatccaatctaaaccggagaaaattgactgtaatggaggatattcatactacaattctgatacaccaaacccgaatgtgcatattggtgcaattgtgggcggaccgaattcatccgatcagtatagcgacaaaaaatcagattactctcatgctgagcccacaacttacatcaacgccgcctttattggacctgttgcagctctaatcagttcttccggataaactcacgtttagattggttgtggggaaacaaatattagcaaagaagaatcattactcatcaacaaactattatgactacaaacttaaataattagtcaggggatgtatcgtttgctttaaacatatatctctatatagatgtatatacctacacacatacacacactcacatatatatcattgaatcgtatatcttagctaaaatgaaaactatttaattacagatgtctatataggttttcttatatcattgtattgtatagattttttatgatacattatatatagttcattcttattt

SEQ ID NO: 98369 - protein, 479 aa, Arabidopsis thaliana
  peptide (1)..(479): Ceres Seq. ID no. 13593407
  misc_feature (23)..(474): Pfam Name: Glycosyl hydrolase family 9 Pfam Description: Glycosyl hydrolase family 9
  misc_feature (1)..(479): Homolog of NCBI NO: 15236526 NR Description: glycosyl hydrolase family 9 [Arabidopsis thaliana]
  misc_feature (1)..(478): Homolog of NCBI NO: 30681176 NR Description: glycosyl hydrolase family 9 [Arabidopsis thaliana]
  misc_feature (1)..(478): Homolog of NCBI NO: 7484848 NR Description: cellulase (EC 3.2.1.4) F17A8.90 - Arabidopsis
  misc_feature (23)..(478): Homolog of NCBI NO: 1039431 NR Description: cellulase [Phaseolus vulgaris]
  misc_feature (23)..(478): Homolog of NCBI NO: 1346225 NR Description: Endoglucanase precursor (Endo-1,4-beta-glucanase) cellulase) >gi|7488761|pir||T11783 cellulase (EC 3.2.1.4)
  misc_feature (23)..(478): Homolog of NCBI NO: 228690 NR Description: abscission cellulase
  misc_feature (18)..(478): Homolog of NCBI NO: 575404 NR Description: cellulase [Sambucus nigra]
  misc_feature (21)..(478): Homolog of NCBI NO: 1363496 NR Description: cellulase (EC 3.2.1.4) 3D precursor - pepper
  misc_feature (21)..(478): Homolog of NCBI NO: 1655543 NR Description: cellulase; endo-beta-1,4-glucanase [Capsicum
  misc_feature (18)..(478): Homolog of NCBI NO: 1076692 NR Description: cellulase (EC 3.2.1.4) - European elder (fragment)
MGKLLVLMLVGMFLAFESLEALEYGDALNKSILFFEGQRSGKLPTNQRVKWRADSALSDGSLANVNLIGGYYDAGDNVKFVWPMSFTTTLLSWAAIEYQNEISSVNQLGYLRSTIKWGTDFILRAHTSPNMLYTQVGDGNSDHSCWERPEDMDTSRTLYSISSSSPGSEAAGEAAAALAAASLVFKSVDSTYSSTLLNHAKTLFEFADKYRGSYQASCPFYCSYSGYQDELLWAAAWLYKATGDKIYINYVISNKDWSQAVNEFSWDNKFVGAQALLVSEFYNGANDLAKFKSDVESFVCAMMPGSSSQQIKPTPGGLLFIRDSSNLQYVTTATTVLFHYSKTLTKAGVGSIQCGSTKFTVSQIRNFAKSQVDYILGNNPMKMSYMVGFGTKYPTQPHHRGSSLPSIQSKPEKIDCNGGYSYYNSDTPNPNVHIGAIVGGPNSSDQYSDKKSDYSHAEPTTYINAAFIGPVAALISSSG

SEQ ID NO: 98370 - protein, 472 aa, Arabidopsis thaliana
  peptide (1)..(472): Ceres Seq. ID no. 13593408
  misc_feature (16)..(467): Pfam Name: Glycosyl hydrolase family 9 Pfam Description: Glycosyl hydrolase family 9
  misc_feature (1)..(472): Homolog of NCBI NO: 15236526 NR Description: glycosyl hydrolase family 9 [Arabidopsis thaliana]
  misc_feature (1)..(471): Homolog of NCBI NO: 30681176 NR Description: glycosyl hydrolase family 9 [Arabidopsis thaliana]
  misc_feature (1)..(471): Homolog of NCBI NO: 7484848 NR Description: cellulase (EC 3.2.1.4) F17A8.90 - Arabidopsis
  misc_feature (16)..(471): Homolog of NCBI NO: 1039431 NR Description: cellulase [Phaseolus vulgaris]
  misc_feature (16)..(471): Homolog of NCBI NO: 1346225 NR Description: Endoglucanase precursor (Endo-1,4-beta-glucanase) cellulase) >gi|7488761|pir||T11783 cellulase (EC 3.2.1.4)
  misc_feature (16)..(471): Homolog of NCBI NO: 228690 NR Description: abscission cellulase
  misc_feature (11)..(471): Homolog of NCBI NO: 575404 NR Description: cellulase [Sambucus nigra]
  misc_feature (14)..(471): Homolog of NCBI NO: 1363496 NR Description: cellulase (EC 3.2.1.4) 3D precursor - pepper
  misc_feature (14)..(471): Homolog of NCBI NO: 1655543 NR Description: cellulase; endo-beta-1,4-glucanase [Capsicum
  misc_feature (11)..(471): Homolog of NCBI NO: 1076692 NR Description: cellulase (EC 3.2.1.4) - European elder (fragment)
MLVGMFLAFESLEALEYGDALNKSILFFEGQRSGKLPTNQRVKWRADSALSDGSLANVNLIGGYYDAGDNVKFVWPMSFTTTLLSWAAIEYQNEISSVNQLGYLRSTIKWGTDFILRAHTSPNMLYTQVGDGNSDHSCWERPEDMDTSRTLYSISSSSPGSEAAGEAAAALAAASLVFKSVDSTYSSTLLNHAKTLFEFADKYRGSYQASCPFYCSYSGYQDELLWAAAWLYKATGDKIYINYVISNKDWSQAVNEFSWDNKFVGAQALLVSEFYNGANDLAKFKSDVESFVCAMMPGSSSQQIKPTPGGLLFIRDSSNLQYVTTATTVLFHYSKTLTKAGVGSIQCGSTKFTVSQIRNFAKSQVDYILGNNPMKMSYMVGFGTKYPTQPHHRGSSLPSIQSKPEKIDCNGGYSYYNSDTPNPNVHIGAIVGGPNSSDQYSDKKSDYSHAEPTTYINAAFIGPVAALISSSG

SEQ ID NO: 98371 - protein, 468 aa, Arabidopsis thaliana
  peptide (1)..(468): Ceres Seq. ID no. 13593409
  misc_feature (12)..(463): Pfam Name: Glycosyl hydrolase family 9 Pfam Description: Glycosyl hydrolase family 9
  misc_feature (1)..(468): Homolog of NCBI NO: 15236526 NR Description: glycosyl hydrolase family 9 [Arabidopsis thaliana]
  misc_feature (1)..(467): Homolog of NCBI NO: 30681176 NR Description: glycosyl hydrolase family 9 [Arabidopsis thaliana]
  misc_feature (1)..(467): Homolog of NCBI NO: 7484848 NR Description: cellulase (EC 3.2.1.4) F17A8.90 - Arabidopsis
  misc_feature (12)..(467): Homolog of NCBI NO: 1039431 NR Description: cellulase [Phaseolus vulgaris]
  misc_feature (12)..(467): Homolog of NCBI NO: 1346225 NR Description: Endoglucanase precursor (Endo-1,4-beta-glucanase) cellulase) >gi|7488761|pir||T11783 cellulase (EC 3.2.1.4)
  misc_feature (12)..(467): Homolog of NCBI NO: 228690 NR Description: abscission cellulase
  misc_feature (7)..(467): Homolog of NCBI NO: 575404 NR Description: cellulase [Sambucus nigra]
  misc_feature (10)..(467): Homolog of NCBI NO: 1363496 NR Description: cellulase (EC 3.2.1.4) 3D precursor - pepper
  misc_feature (10)..(467): Homolog of NCBI NO: 1655543 NR Description: cellulase; endo-beta-1,4-glucanase [Capsicum
  misc_feature (7)..(467): Homolog of NCBI NO: 1076692 NR Description: cellulase (EC 3.2.1.4) - European elder (fragment)
MFLAFESLEALEYGDALNKSILFFEGQRSGKLPTNQRVKWRADSALSDGSLANVNLIGGYYDAGDNVKFVWPMSFTTTLLSWAAIEYQNEISSVNQLGYLRSTIKWGTDFILRAHTSPNMLYTQVGDGNSDHSCWERPEDMDTSRTLYSISSSSPGSEAAGEAAAALAAASLVFKSVDSTYSSTLLNHAKTLFEFADKYRGSYQASCPFYCSYSGYQDELLWAAAWLYKATGDKIYINYVISNKDWSQAVNEFSWDNKFVGAQALLVSEFYNGANDLAKFKSDVESFVCAMMPGSSSQQIKPTPGGLLFIRDSSNLQYVTTATTVLFHYSKTLTKAGVGSIQCGSTKFTVSQIRNFAKSQVDYILGNNPMKMSYMVGFGTKYPTQPHHRGSSLPSIQSKPEKIDCNGGYSYYNSDTPNPNVHIGAIVGGPNSSDQYSDKKSDYSHAEPTTYINAAFIGPVAALISSSG

SEQ ID NO: 98372 - DNA, 1538 bp, Arabidopsis thaliana
  misc_feature (1)..(1538): Ceres Seq. ID no. 13593435
  misc_feature: MA Experiment ID: 20000329 Result: Down-regulated in Transcription
  misc_feature: MA Experiment 20000329 PARAMETER Experiment Name: At_4deg_Cold_Sub_P Parameter: Age (day) Value: 14
  misc_feature: MA Experiment 20000329 PARAMETER Experiment Name: At_4deg_Cold_Sub_P Parameter: Organism Value: A. thaliana
  misc_feature: MA Experiment 20000329 PARAMETER Experiment Name: At_4deg_Cold_Sub_P Parameter: Plant Line Value: WS
  misc_feature: MA Experiment 20000329 PARAMETER Experiment Name: At_4deg_Cold_Sub_P Parameter: Temperature (deg C) Value: 4 vs. 22
  misc_feature: MA Experiment 20000329 PARAMETER Experiment Name: At_4deg_Cold_Sub_P Parameter: Timepoint (hr) Value: 6
  misc_feature: MA Experiment 20000329 PARAMETER Experiment Name: At_4deg_Cold_Sub_P Parameter: Tissue Value: Aerial
  misc_feature: MA Experiment ID: 20000440 Result: Down-regulated in Transcription
  misc_feature: MA Experiment 20000440 PARAMETER Experiment Name: At_Closed-Flower__Sub_P Parameter: Tissue Value: Closed Flower vs. Whole Plant
gccggcaaattcttacgtttctccggcggttagaaaaatgacaccacagatcaaaactcatctcttgccgaagcaagaaccttcttcgtctgagaaccatggatcatcaacctccggcatcgttttcaacgtgtcaacgagtataatcggagccggaataatgtcgatgccggcggcgtttaaagttcttggaatagttccagcgtttttgattatcacgatcatagcttggctttccacaatttccgttggatttctgatgaaatcaactctcgccggagaatcaactacttacgccggagttatgaaagagtcgtttggtaaaacaggatccatcgctgtacagattgctacgatggttgctacttttggttgtatgattatattttcgattattataggagatgtgctttctggtaatgaaaatggtggtcctgaacatattggagttttgcaagaatggtttggttcttactggtggaacacgagaatcttcgctttgttatttgtctacggctttgtcttgcttccattggtcctgcgtagacgagtcgaaagactggcaattagttccgctgtatcgtttcttcttgcggttctatttgttgtcataagctcggtgctggcgatttccgcgctggtgaatggacaaacgaagaatccaagactgtttccggagttgagcaatggaggatcgttctggcaactcttcacagcttcccctgttatagttacagccttcacgtttcacttcaatgttcatccaattggattcgagctcaaagatccattacaagtgatcccagcaactaagatctctgtcatcttgtgtgctgctatctacttcgcaactggactctttggttaccttctctttggagatgcaactatgtcggatattctagtgaactttgaccagagctctggttcttccattggttctcttctcaacgacattgtcagactcagctacgtgcttcacctcatgctggtctttcctctcctgaacttctcattgagagcaaatctcgacgaactcttgtaccccaagaagccgtccttggaaaaagacacaaaaagattcatcggactcactctggctctactgatttgctgtttcttgtctgcaatcgctgtaccagacatttggtacttctttcagttcatgggatcaaccatcacagtctccatagcattcatatttccagccgccattgttctaaggaatatccatggtgtatcaacctcaagagagaagatcgtagctgcaataatgcttgttcttgctgttgccactagcattattgctatctcgacaaatttatacagcctcgcagcaaactagtcgttgaaaaaagttttgcaaacagtcccttccatgatcacttcaaagaaatctgtaaaattattagcttgccgtagcattcatatttatatctttgtgaaataggtttgtcagaaaatgcaatgtaatagctatacaaagtgcaatttttgttgctgcttgaaacagagaaagaggaaatgaacaactcttc

SEQ ID NO: 98373 - protein, 447 aa, Arabidopsis thaliana
  peptide (1)..(447): Ceres Seq. ID no. 13593436
  misc_feature (13)..(447): Homolog of NCBI NO: 15228851 NR Description: amino acid transporter family [Arabidopsis
  misc_feature (13)..(446): Homolog of NCBI NO: 30688270 NR Description: amino acid transporter family [Arabidopsis
  misc_feature (58)..(446): Homolog of NCBI NO: 25408697 NR Description: hypothetical protein At2g40420 [imported] - thaliana >gi|20198010|gb|AAM15348.1| unknown protein [Arabidopsis
  misc_feature (21)..(444): Homolog of NCBI NO: 34898706 NR Description: hypothetical protein [Oryza sativa (japonica group)] >gi|11862972|dbj|BAB19353.1| hypothetical protein [Oryza
  misc_feature (17)..(444): Homolog of NCBI NO: 18406463 NR Description: amino acid transporter family [Arabidopsis >gi|9294342|dbj|BAB02239.1| to unknown protein [Arabidopsis thaliana]
  misc_feature (25)..(444): Homolog of NCBI NO: 9758059 NR Description: amino acid transporter-like protein [Arabidopsis
  misc_feature (25)..(444): Homolog of NCBI NO: 15241555 NR Description: amino acid transporter family [Arabidopsis
  misc_feature (18)..(408): Homolog of NCBI NO: 34907894 NR Description: P0439E11.11 [Oryza sativa (japonica
  misc_feature (30)..(444): Homolog of NCBI NO: 18412864 NR Description: amino acid transporter family [Arabidopsis
  misc_feature (28)..(321): Homolog of NCBI NO: 24461850 NR Description: CTV.3 [Poncirus trifoliata]
PANSYVSPAVRKMTPQIKTHLLPKQEPSSSENHGSSTSGIVFNVSTSIIGAGIMSMPAAFKVLGIVPAFLIITIIAWLSTISVGFLMKSTLAGESTTYAGVMKESFGKTGSIAVQIATMVATFGCMIIFSIIIGDVLSGNENGGPEHIGVLQEWFGSYWWNTRIFALLFVYGFVLLPLVLRRRVERLAISSAVSFLLAVLFVVISSVLAISALVNGQTKNPRLFPELSNGGSFWQLFTASPVIVTAFTFHFNVHPIGFELKDPLQVIPATKISVILCAAIYFATGLFGYLLFGDATMSDILVNFDQSSGSSIGSLLNDIVRLSYVLHLMLVFPLLNFSLRANLDELLYPKKPSLEKDTKRFIGLTLALLICCFLSAIAVPDIWYFFQFMGSTITVSIAFIFPAAIVLRNIHGVSTSREKIVAAIMLVLAVATSIIAISTNLYSLAAN

SEQ ID NO: 98374 - protein, 435 aa, Arabidopsis thaliana; identical to SEQ ID NO: 48079
  peptide (1)..(435): Ceres Seq. ID no. 13593437
  misc_feature (1)..(435): Homolog of NCBI NO: 15228851 NR Description: amino acid transporter family [Arabidopsis
  misc_feature (1)..(434): Homolog of NCBI NO: 30688270 NR Description: amino acid transporter family [Arabidopsis
  misc_feature (46)..(434): Homolog of NCBI NO: 25408697 NR Description: hypothetical protein At2g40420 [imported] - thaliana >gi|20198010|gb|AAM15348.1| unknown protein [Arabidopsis
  misc_feature (9)..(432): Homolog of NCBI NO: 34898706 NR Description: hypothetical protein [Oryza sativa (japonica group)] >gi|11862972|dbj|BAB19353.1| hypothetical protein [Oryza
  misc_feature (5)..(432): Homolog of NCBI NO: 18406463 NR Description: amino acid transporter family [Arabidopsis >gi|9294342|dbj|BAB02239.1| to unknown protein [Arabidopsis thaliana]
  misc_feature (13)..(432): Homolog of NCBI NO: 9758059 NR Description: amino acid transporter-like protein [Arabidopsis
  misc_feature (13)..(432): Homolog of NCBI NO: 15241555 NR Description: amino acid transporter family [Arabidopsis
  misc_feature (6)..(396): Homolog of NCBI NO: 34907894 NR Description: P0439E11.11 [Oryza sativa (japonica
  misc_feature (18)..(432): Homolog of NCBI NO: 18412864 NR Description: amino acid transporter family [Arabidopsis
  misc_feature (16)..(309): Homolog of NCBI NO: 24461850 NR Description: CTV.3 [Poncirus trifoliata]

SEQ ID NO: 98375 - protein, 394 aa, Arabidopsis thaliana; identical to SEQ ID NO: 48080
  peptide (1)..(394): Ceres Seq. ID no. 13593438
  misc_feature (1)..(394): Homolog of NCBI NO: 15228851 NR Description: amino acid transporter family [Arabidopsis
  misc_feature (1)..(393): Homolog of NCBI NO: 30688270 NR Description: amino acid transporter family [Arabidopsis
  misc_feature (5)..(393): Homolog of NCBI NO: 25408697 NR Description: hypothetical protein At2g40420 [imported] - thaliana >gi|20198010|gb|AAM15348.1| unknown protein [Arabidopsis
  misc_feature (1)..(391): Homolog of NCBI NO: 34898706 NR Description: hypothetical protein [Oryza sativa (japonica group)] >gi|11862972|dbj|BAB19353.1| hypothetical protein [Oryza
  misc_feature (1)..(391): Homolog of NCBI NO: 18406463 NR Description: amino acid transporter family [Arabidopsis >gi|9294342|dbj|BAB02239.1| to unknown protein [Arabidopsis thaliana]
  misc_feature (1)..(391): Homolog of NCBI NO: 9758059 NR Description: amino acid transporter-like protein [Arabidopsis
  misc_feature (1)..(391): Homolog of NCBI NO: 15241555 NR Description: amino acid transporter family [Arabidopsis
  misc_feature (1)..(355): Homolog of NCBI NO: 34907894 NR Description: P0439E11.11 [Oryza sativa (japonica
  misc_feature (1)..(391): Homolog of NCBI NO: 18412864 NR Description: amino acid transporter family [Arabidopsis
  misc_feature (1)..(268): Homolog of NCBI NO: 24461850 NR Description: CTV.3 [Poncirus trifoliata]

SEQ ID NO: 98376 - DNA, 1682 bp, Arabidopsis thaliana
  misc_feature (1)..(1682): Ceres Seq. ID no. 13593475
  misc_feature: MA Experiment ID: 20000327 Result: Up-regulated in Transcription
  misc_feature: MA Experiment 20000327 PARAMETER Experiment Name: At_42deg_Heat_Sub_P Parameter: Age (day) Value: 14
  misc_feature: MA Experiment 20000327 PARAMETER Experiment Name: At_42deg_Heat_Sub_P Parameter: Organism Value: A. thaliana
  misc_feature: MA Experiment 20000327 PARAMETER Experiment Name: At_42deg_Heat_Sub_P Parameter: Plant Line Value: WS
  misc_feature: MA Experiment 20000327 PARAMETER Experiment Name: At_42deg_Heat_Sub_P Parameter: Temperature (deg C) Value: 42 vs. 22
  misc_feature: MA Experiment 20000327 PARAMETER Experiment Name: At_42deg_Heat_Sub_P Parameter: Timepoint (hr) Value: 1
  misc_feature: MA Experiment 20000327 PARAMETER Experiment Name: At_42deg_Heat_Sub_P Parameter: Tissue Value: Aerial
gatttcttcctctcttctctctagaaacatctttcatgcgttatcttctccaaaagctctgattctgattctgaatcatcctgaaaaaaacctagaaaaattctatcccacaaaatcttcaaagatccatggccgtaattatccctcgttcagatccaccgtcacgaatccatccggaaccaccacaaaccctagaaatcgaccatttcgatcatcttcctgactcaatcctcctcctcgttttcaacaaaatcggcgacgtcaaagctctcggaagatgctgcgtcgtttccagaagattccattctctcgttcctcaagtcgataacgtcgttgttcgtgtcgattgcgtaatctccgacgacgattcgtcatctttgtcatctatcaaatctcgctccggttcttccgctggttcgttctcggctatatttcgtcttgttgttggtggcattgttaagccgttacaagctttaggtcaattccttggtacgaagagatcatcatcatcatgtggtggttctggatcttcttcttcttcgttgtctattagtggagatgatgatggtggagagatcgaacaaggcggtgttacgcatcattcacctactcaggttttgaaaaacttcgatgagattcgttacttaagaattgagcttcctagtggtgaattagggattgatgatggagttttgttgaaatggagagctgaatttggttctactcttgataattgtgtgattctcggtgcttcttcagtgattccaccaaatccaatgagagtttctcaagcttgtgatactactacagtcgttgaagctcccggttctggctccgatgataatgggagtataccggaatcgttttacacaaacggaggtttgaaattgcgtgttgtatggacgattagctctttgattgctgcatcagcacgacattacttgttacaaccgataatcgcggagcataagacgcttgatagtttagtgctcactgattcagatgggcaaggtgtgctctgtatgaacagagatcagctagaagagcttagggtgaaaccattagcagcttcatcggcttcgaagaggacacttgtgcctgctctgaatatgagactatggtatgctccaaccttggaattgcctgatggaactgtgttaaaaggtgcgactttggttgcgataagaccgagtgaatcgaaaaaggaagtgtctgatatctcttgggtgtcttcggcttttgaggagccttatgagacggctgctaagatgctggttaaaagaaggacttactgtcttgaaatgaactcgttctagcttgaatggtttcagtcggaatctgagagaactggcaaccctgtggcgaattcaggaaattacaattaaaagcatataatggggagaagcagagaatgaaataaaatcgaagttttgatgaatcaagaaacaagttttgctgcctactactactgcatctgctagctagttttttcattgaagcatatgcctttgcaggatctcgcaatcatatataatatatatcaacaaattacagatatcatgtaagagtttttcttttcttttttctgtctttttcttctcctttgcttgctcttctctatttatgtgaatattgtaggtattgcttattcccctgtcattatacaagttatttaagattgt

SEQ ID NO: 98377 - protein, 395 aa, Arabidopsis thaliana; identical to SEQ ID NO: 49722
  peptide (1)..(395): Ceres Seq. ID no. 13593476
  misc_feature (1)..(395): Homolog of NCBI NO: 15237391 NR Description: F-box protein family [Arabidopsis thaliana] gene_id:MCL19.23~pir||T04534~strong similarity to unknown protein thaliana] >gi|17979207|gb|AAL49842.1| unknown protein
  misc_feature (1)..(395): Homolog of NCBI NO: 15236865 NR Description: F-box protein family [Arabidopsis thaliana]
  misc_feature (7)..(395): Homolog of NCBI NO: 18397400 NR Description: expressed protein [Arabidopsis thaliana]
  misc_feature (25)..(395): Homolog of NCBI NO: 34909910 NR Description: P0665A11.15 [Oryza sativa (japonica
  misc_feature (155)..(393): Homolog of NCBI NO: 34909194 NR Description: P0425G02.20 [Oryza sativa (japonica
  misc_feature (12)..(124): Homolog of NCBI NO: 34909194 NR Description: P0425G02.20 [Oryza sativa (japonica
  misc_feature (240)..(395): Homolog of NCBI NO: 15219845 NR Description: F-box protein family [Arabidopsis thaliana]
  misc_feature (160)..(228): Homolog of NCBI NO: 15219845 NR Description: F-box protein family [Arabidopsis thaliana]
  misc_feature (24)..(78): Homolog of NCBI NO: 15219845 NR Description: F-box protein family [Arabidopsis thaliana]
  misc_feature (159)..(395): Homolog of NCBI NO: 18411823 NR Description: F-box protein family [Arabidopsis thaliana]

SEQ ID NO: 98378 - DNA, 899 bp, Arabidopsis thaliana
  misc_feature (1)..(899): Ceres Seq. ID no. 13593488
  misc_feature: MA Experiment ID: 20001451 Result: Down-regulated in Transcription
  misc_feature: MA Experiment 20001451 PARAMETER Experiment Name: At_Far-red-induction_P Parameter: Age (day) Value: 7
  misc_feature: MA Experiment 20001451 PARAMETER Experiment Name: At_Far-red-induction_P Parameter: Light Value: Far-red vs. White
  misc_feature: MA Experiment 20001451 PARAMETER Experiment Name: At_Far-red-induction_P Parameter: Organism Value: A. thaliana
  misc_feature: MA Experiment 20001451 PARAMETER Experiment Name: At_Far-red-induction_P Parameter: Plant Line Value: Columbia
  misc_feature: MA Experiment 20001451 PARAMETER Experiment Name: At_Far-red-induction_P Parameter: Timepoint (hr) Value: 24
  misc_feature: MA Experiment 20001451 PARAMETER Experiment Name: At_Far-red-induction_P Parameter: Tissue Value: Whole Plant
gaggagaagataaatccgatctaggtctcttcttccccaatctctctgtgtctctctcgatcgaagaaagaagacaatggacaaaggcaaagcagtgatgggtactggtcggagatgggccgtcgaattctccgatcaatctactgttccatcttcccgtgacatcctcgatccacctggcttctctcgtgcctctcaggaacaggatgattcagcaaacagccgccaaaagaaagacgctgaagctacttggaaacttcagaaagcgtgggaagtagcgcaatctccatttaagaatttgatgatgatgggtttcatgatgtggatggctggaaacacagttcatctttttagtattggtattactttctctgctctttggcagcctatcagtgctcttcagagtgttggaaagatttttgagccattcaaggataacaaagtggaactacttatgccgaaattagtgttccttgccctaaaccttggagggctagctttgggtgtctggaagcttaacactttggggcttcttccaacacatgcatcagattgggtttcatctctaccccctcctcaggaagttgaacactcgggcggaggatttgttttccactgatgaatcagcgtctcttgtattttaaaataatccgctaaaaccgcgcgacaacgacaacacttttgtgagataactgcaacagttacttaagtgatatgaacctccctcatcttatgatattcttgtagcattttcaaaactcagaaaccatagtttttacactttttagtatgatgctcattgttcatcataactatgaatgtattattggcactgaagggaccttatctcccagctttttgtttctcatctttttagacaggaatggataaaatatttc

SEQ ID NO: 98379 - protein, 180 aa, Arabidopsis thaliana; identical to SEQ ID NO: 50318
  peptide (1)..(180): Ceres Seq. ID no. 13593489
  misc_feature (1)..(180): Homolog of NCBI NO: 18416375 NR Description: expressed protein [Arabidopsis thaliana] AT5g10780/T30N20_50 [Arabidopsis thaliana] AT5g10780/T30N20_50 [Arabidopsis thaliana]
  misc_feature (1)..(168): Homolog of NCBI NO: 11358300 NR Description: hypothetical protein T30N20_50 - Arabidopsis >gi|8979712|emb|CAB96833.1| putative protein [Arabidopsis
  misc_feature (3)..(178): Homolog of NCBI NO: 7705997 NR Description: hypothetical protein LOC51234 [Homo sapiens] HSPC184 [Homo sapiens] >gi|22761181|dbj|BAC11486.1| unnamed
  misc_feature (3)..(178): Homolog of NCBI NO: 12834476 NR Description: unnamed protein product [Mus musculus]
  misc_feature (3)..(178): Homolog of NCBI NO: 13386014 NR Description: RIKEN cDNA 2610318K02 [Mus musculus] unnamed protein product [Mus musculus] unnamed protein product [Mus musculus]
  misc_feature (7)..(178): Homolog of NCBI NO: 37590930 NR Description: Unknown (protein for MGC:75691) [Silurana
  misc_feature (1)..(175): Homolog of NCBI NO: 28829924 NR Description: similar to ZK616.6.p [Caenorhabditis elegans]
  misc_feature (13)..(173): Homolog of NCBI NO: 39588364 NR Description: Hypothetical protein CBG19952 [Caenorhabditis
  misc_feature (14)..(173): Homolog of NCBI NO: 17544614 NR Description: Putative protein of eukaryotic origin elegans] >gi|7332260|gb|AAF60946.1| Hypothetical protein ZK616.6
  misc_feature (80)..(178): Homolog of NCBI NO: 16740992 NR Description: Similar to RIKEN cDNA 2610318K02 gene [Homo

SEQ ID NO: 98380 - protein, 173 aa, Arabidopsis thaliana; identical to SEQ ID NO: 50319
  peptide (1)..(173): Ceres Seq. ID no. 13593490
  misc_feature (1)..(173): Homolog of NCBI NO: 18416375 NR Description: expressed protein [Arabidopsis thaliana] AT5g10780/T30N20_50 [Arabidopsis thaliana] AT5g10780/T30N20_50 [Arabidopsis thaliana]
  misc_feature (1)..(161): Homolog of NCBI NO: 11358300 NR Description: hypothetical protein T30N20_50 - Arabidopsis >gi|8979712|emb|CAB96833.1| putative protein [Arabidopsis
  misc_feature (1)..(171): Homolog of NCBI NO: 7705997 NR Description: hypothetical protein LOC51234 [Homo sapiens] HSPC184 [Homo sapiens] >gi|22761181|dbj|BAC11486.1| unnamed
  misc_feature (1)..(171): Homolog of NCBI NO: 12834476 NR Description: unnamed protein product [Mus musculus]
  misc_feature (1)..(171): Homolog of NCBI NO: 13386014 NR Description: RIKEN cDNA 2610318K02 [Mus musculus] unnamed protein product [Mus musculus] unnamed protein product [Mus musculus]
  misc_feature (1)..(171): Homolog of NCBI NO: 37590930 NR Description: Unknown (protein for MGC:75691) [Silurana
  misc_feature (1)..(168): Homolog of NCBI NO: 28829924 NR Description: similar to ZK616.6.p [Caenorhabditis elegans]
  misc_feature (6)..(166): Homolog of NCBI NO: 39588364 NR Description: Hypothetical protein CBG19952 [Caenorhabditis
  misc_feature (7)..(166): Homolog of NCBI NO: 17544614 NR Description: Putative protein of eukaryotic origin elegans] >gi|7332260|gb|AAF60946.1| Hypothetical protein ZK616.6
  misc_feature (73)..(171): Homolog of NCBI NO: 16740992 NR Description: Similar to RIKEN cDNA 2610318K02 gene [Homo

SEQ ID NO: 98381 - protein, 105 aa, Arabidopsis thaliana; identical to SEQ ID NO: 50320
  peptide (1)..(105): Ceres Seq. ID no. 13593491
  misc_feature (1)..(105): Homolog of NCBI NO: 18416375 NR Description: expressed protein [Arabidopsis thaliana] AT5g10780/T30N20_50 [Arabidopsis thaliana] AT5g10780/T30N20_50 [Arabidopsis thaliana]
  misc_feature (1)..(93): Homolog of NCBI NO: 11358300 NR Description: hypothetical protein T30N20_50 - Arabidopsis >gi|8979712|emb|CAB96833.1| putative protein [Arabidopsis
  misc_feature (1)..(103): Homolog of NCBI NO: 7705997 NR Description: hypothetical protein LOC51234 [Homo sapiens] HSPC184 [Homo sapiens] >gi|22761181|dbj|BAC11486.1| unnamed
  misc_feature (1)..(103): Homolog of NCBI NO: 13386014 NR Description: RIKEN cDNA 2610318K02 [Mus musculus] unnamed protein product [Mus musculus] unnamed protein product [Mus musculus]
  misc_feature (1)..(103): Homolog of NCBI NO: 12834476 NR Description: unnamed protein product [Mus musculus]
  misc_feature (1)..(103): Homolog of NCBI NO: 37590930 NR Description: Unknown (protein for MGC:75691) [Silurana
  misc_feature (1)..(100): Homolog of NCBI NO: 28829924 NR Description: similar to ZK616.6.p [Caenorhabditis elegans]
  misc_feature (1)..(98): Homolog of NCBI NO: 39588364 NR Description: Hypothetical protein CBG19952 [Caenorhabditis
  misc_feature (1)..(98): Homolog of NCBI NO: 17544614 NR Description: Putative protein of eukaryotic origin elegans] >gi|7332260|gb|AAF60946.1| Hypothetical protein ZK616.6
  misc_feature (5)..(103): Homolog of NCBI NO: 16740992 NR Description: Similar to RIKEN cDNA 2610318K02 gene [Homo

SEQ ID NO: 98382 - DNA, 1580 bp, Arabidopsis thaliana
  misc_feature (1)..(1580): Ceres Seq. ID no. 13593495
  misc_feature: MA Experiment ID: 20000171 Result: Up-regulated in Transcription
  misc_feature: MA Experiment 20000171 PARAMETER Experiment Name: At_42deg_Heat_P Parameter: Age (day) Value: 14
  misc_feature: MA Experiment 20000171 PARAMETER Experiment Name: At_42deg_Heat_P Parameter: Organism Value: A. thaliana
  misc_feature: MA Experiment 20000171 PARAMETER Experiment Name: At_42deg_Heat_P Parameter: Plant Line Value: WS
  misc_feature: MA Experiment 20000171 PARAMETER Experiment Name: At_42deg_Heat_P Parameter: Temperature (deg C) Value: 42 vs. 22
  misc_feature: MA Experiment 20000171 PARAMETER Experiment Name: At_42deg_Heat_P Parameter: Timepoint (hr) Value: 1
  misc_feature: MA Experiment 20000171 PARAMETER Experiment Name: At_42deg_Heat_P Parameter: Tissue Value: Aerial
  misc_feature: MA Experiment ID: 20000179 Result: Down-regulated in Transcription
  misc_feature: MA Experiment 20000179 PARAMETER Experiment Name: At_Germinating_Seeds_P Parameter: Age (hr) Value: 6 vs. 0
  misc_feature: MA Experiment 20000179 PARAMETER Experiment Name: At_Germinating_Seeds_P Parameter: Tissue Value: Germinating Seeds
  misc_feature: MA Experiment ID: 20000265 Result: Down-regulated in Transcription
  misc_feature: MA Experiment 20000265 PARAMETER Experiment Name: At_Open_Flower_P Parameter: Age (day) Value: 21
  misc_feature: MA Experiment 20000265 PARAMETER Experiment Name: At_Open_Flower_P Parameter: Plant Line Value: WS
  misc_feature: MA Experiment 20000265 PARAMETER Experiment Name: At_Open_Flower_P Parameter: Tissue Value: Closed Flower vs. Whole Plant
  misc_feature: MA Experiment ID: 20000267 Result: Down-regulated in Transcription
  misc_feature: MA Experiment 20000267 PARAMETER Experiment Name: At_Drought_P Parameter: Age (day) Value: 7
  misc_feature: MA Experiment 20000267 PARAMETER Experiment Name: At_Drought_P Parameter: Organism Value: A. thaliana
  misc_feature: MA Experiment 20000267 PARAMETER Experiment Name: At_Drought_P Parameter: Plant Line Value: WS
  misc_feature: MA Experiment 20000267 PARAMETER Experiment Name: At_Drought_P Parameter: Timepoint (hr) Value: 6
  misc_feature: MA Experiment 20000267 PARAMETER Experiment Name: At_Drought_P Parameter: Tissue Value: Whole Plant
  misc_feature: MA Experiment 20000267 PARAMETER Experiment Name: At_Drought_P Parameter: Treatment Value: Drought vs. No Drought
  misc_feature: MA Experiment ID: 20000286 Result: Down-regulated in Transcription
  misc_feature: MA Experiment 20000286 PARAMETER Experiment Name: At_Open_Flower_P Parameter: Age (day) Value: 21
  misc_feature: MA Experiment 20000286 PARAMETER Experiment Name: At_Open_Flower_P Parameter: Plant Line Value: WS
  misc_feature: MA Experiment 20000286 PARAMETER Experiment Name: At_Open_Flower_P Parameter: Tissue Value: Half Open vs. Whole Plant
  misc_feature: MA Experiment ID: 20000436 Result: Down-regulated in Transcription
  misc_feature: MA Experiment 20000436 PARAMETER Experiment Name: At_Drought_P Parameter: Age (day) Value: 7
  misc_feature: MA Experiment 20000436 PARAMETER Experiment Name: At_Drought_P Parameter: Organism Value: A. thaliana
  misc_feature: MA Experiment 20000436 PARAMETER Experiment Name: At_Drought_P Parameter: Plant Line Value: WS
  misc_feature: MA Experiment 20000436 PARAMETER Experiment Name: At_Drought_P Parameter: Timepoint (hr) Value: 12
  misc_feature: MA Experiment 20000436 PARAMETER Experiment Name: At_Drought_P Parameter: Tissue Value: Whole Plant
  misc_feature: MA Experiment 20000436 PARAMETER Experiment Name: At_Drought_P Parameter: Treatment Value: Drought vs. No Drought
  misc_feature: MA Experiment ID: 20000437 Result: Down-regulated in Transcription
  misc_feature: MA Experiment 20000437 PARAMETER Experiment Name: At_Drought_P Parameter: Age (day) Value: 8
  misc_feature: MA Experiment 20000437 PARAMETER Experiment Name: At_Drought_P Parameter: Organism Value: A. thaliana
  misc_feature: MA Experiment 20000437 PARAMETER Experiment Name: At_Drought_P Parameter: Plant Line Value: WS
  misc_feature: MA Experiment 20000437 PARAMETER Experiment Name: At_Drought_P Parameter: Timepoint (hr) Value: 24
  misc_feature: MA Experiment 20000437 PARAMETER Experiment Name: At_Drought_P Parameter: Tissue Value: Whole Plant
  misc_feature: MA Experiment 20000437 PARAMETER Experiment Name: At_Drought_P Parameter: Treatment Value: Drought vs. No Drought
  misc_feature: MA Experiment ID: 20000439 Result: Up-regulated in Transcription
  misc_feature: MA Experiment 20000439 PARAMETER Experiment Name: At_Roots__P Parameter: Age (day) Value: 14 vs. 21
  misc_feature: MA Experiment 20000439 PARAMETER Experiment Name: At_Roots__P Parameter: Organism Value: A. thaliana
  misc_feature: MA Experiment 20000439 PARAMETER Experiment Name: At_Roots__P Parameter: Tissue Value: Roots vs. Whole Plant
  misc_feature: MA Experiment ID: 20001248 Result: Down-regulated in Transcription
  misc_feature: MA Experiment 20001248 PARAMETER Experiment Name: At_Far-red-induction_P Parameter: Age (day) Value: 7
  misc_feature: MA Experiment 20001248 PARAMETER Experiment Name: At_Far-red-induction_P Parameter: Light Value: Far-red vs. White
  misc_feature: MA Experiment 20001248 PARAMETER Experiment Name: At_Far-red-induction_P Parameter: Organism Value: A. thaliana
  misc_feature: MA Experiment 20001248 PARAMETER Experiment Name: At_Far-red-induction_P Parameter: Plant Line Value: Columbia
  misc_feature: MA Experiment 20001248 PARAMETER Experiment Name: At_Far-red-induction_P Parameter: Timepoint (hr) Value: 4
  misc_feature: MA Experiment 20001248 PARAMETER Experiment Name: At_Far-red-induction_P Parameter: Tissue Value: Whole Plant
  misc_feature: MA Experiment ID: 20001450 Result: Down-regulated in Transcription
  misc_feature: MA Experiment 20001450 PARAMETER Experiment Name: At_Far-red-induction_P Parameter: Age (day) Value: 7
  misc_feature: MA Experiment 20001450 PARAMETER Experiment Name: At_Far-red-induction_P Parameter: Light Value: Far-red vs. White
  misc_feature: MA Experiment 20001450 PARAMETER Experiment Name: At_Far-red-induction_P Parameter: Organism Value: A. thaliana
  misc_feature: MA Experiment 20001450 PARAMETER Experiment Name: At_Far-red-induction_P Parameter: Plant Line Value: Columbia
  misc_feature: MA Experiment 20001450 PARAMETER Experiment Name: At_Far-red-induction_P Parameter: Timepoint (hr) Value: 8
  misc_feature: MA Experiment 20001450 PARAMETER Experiment Name: At_Far-red-induction_P Parameter: Tissue Value: Whole Plant
  misc_feature: MA Experiment ID: 20001555 Result: Down-regulated in Transcription
  misc_feature: MA Experiment 20001555 PARAMETER Experiment Name: At_Drought_Soil_Dry_P Parameter: Age (day) Value: 24
  misc_feature: MA Experiment 20001555 PARAMETER Experiment Name: At_Drought_Soil_Dry_P Parameter: Organism Value: A. thaliana
  misc_feature: MA Experiment 20001555 PARAMETER Experiment Name: At_Drought_Soil_Dry_P Parameter: Plant Line Value: WS
  misc_feature: MA Experiment 20001555 PARAMETER Experiment Name: At_Drought_Soil_Dry_P Parameter: Post Timepoint (hr) Value: None
  misc_feature: MA Experiment 20001555 PARAMETER Experiment Name: At_Drought_Soil_Dry_P Parameter: Post-Treatment Value: None
  misc_feature: MA Experiment 20001555 PARAMETER Experiment Name: At_Drought_Soil_Dry_P Parameter: Timepoint (day) Value: 10
  misc_feature: MA Experiment 20001555 PARAMETER Experiment Name: At_Drought_Soil_Dry_P Parameter: Treatment Value: Drought vs. No Drought
  misc_feature: MA Experiment ID: 20001768 Result: Down-regulated in Transcription
  misc_feature: MA Experiment 20001768 PARAMETER Experiment Name: At_Far-red-enriched-adult_P Parameter: Age (day) Value: 28
  misc_feature: MA Experiment 20001768 PARAMETER Experiment Name: At_Far-red-enriched-adult_P Parameter: Light Value: Far-red enriched vs. White
  misc_feature: MA Experiment 20001768 PARAMETER Experiment Name: At_Far-red-enriched-adult_P Parameter: Organism Value: A. thaliana
  misc_feature: MA Experiment 20001768 PARAMETER Experiment Name: At_Far-red-enriched-adult_P Parameter: Plant Line Value: Columbia
  misc_feature: MA Experiment 20001768 PARAMETER Experiment Name: At_Far-red-enriched-adult_P Parameter: Timepoint (hr) Value: 1
  misc_feature: MA Experiment 20001768 PARAMETER Experiment Name: At_Far-red-enriched-adult_P Parameter: Tissue Value: Aerial
aaaccagaccaaaaatatattctctcggttttttccagagcgtatattcaaattcttccttaaaaagtaaaaattaatctgattctctctactactactactacgatgggtgagaaaaaggaagaaacggcgacgaaacctcaaggagagaagaaacctaccgatggtggaatcaccaccgtcgttatgaagcttgatatgcattgtgaaggttgcggcaaaaaaatcaaacgcatcttcaaacatttcaaaggtgtggaagatgtgaagattgattataagagtaacaaattgacggtgatcggaaacgtagatccagtggaagttcgtgataaagtggccgacaaaattaagagaccagtcgaacttgtctctacagtagcgccgccgaagaaagagacacctccttcatcaggcggtgcagagaagaagccttctccggcagcggaggagaaaccggctgagaagaaaccagccgccgttgagaaacccggtgagaaaaaagaagagaagaagaaagaggaaggagagaagaaagcttctcctccaccaccacctaaagagagtactgtggttttgaagaccaagttacattgtgaaggttgcgaacacaaaatcaaaagaatagtcaacaaaattaaaggggttaattcggttgctattgatagtgccaaggatttggttatagttaaggggatcattgacgtgaaacaactcactccttatcttaacgagaagcttaaacgcacggtggaagttgttccggccaaaaaggatgacggagcaccagtggcagctgcagcggcggctccagctggcggtgagaagaaggacaaagttgctggtgaaaagaaagagattaaagatgttggagaaaagaaagtcgacggtggtggtgagaagaagaaagaagttgctgttggcggcggtggaggaggaggtggaggtggaggagacggtggtgctatggatgtgaagaaatcggagtataacggttacggttatcctccacagccgatgtattactacccagaaggacaagtatacggtcaacaacattacatgatgcaaggtcaatcatcgcaatcgtatgtacaagaaccgtattcgaaccaaggatacgtgcaagaatcgtatatgaaccaaggttacggtcaagggtatggacaagaagctccaccaccaccatatatgaaccaacaaggttacgcagatccttatggtcacatgcgtgcgcctgagttgtttagtgatgagaatccaaatgggtgttctgtgatgtgagtaaaacaaatggggaggaaaatgtaaataactaaaacaatatagggtgagaatgttagctatgacaaaaatggtatactacgaaagcacggaaacttccgagtccggtaatctaaaccggcaagattggccggttagaaccggtttttgagaggcgtggattggttggttggtttatttcttctatataggtactataattttgtatcgtaataatcttctgttttataactttttgtgctatgtaattgtcaggtgatcataatgaaaagaaaacatattagttctgattaatt

SEQ ID NO: 98383 - protein, 392 aa, Arabidopsis thaliana; identical to SEQ ID NO: 50394
  peptide (1)..(392): Ceres Seq. ID no. 13593496
  misc_feature (26)..(88): Pfam Name: Heavy-metal-associated domain Pfam Description: Heavy-metal-associated domain
  misc_feature (1)..(392): Homolog of NCBI NO: 15242741 NR Description: heavy-metal-associated domain-containing protein
  misc_feature (79)..(392): Homolog of NCBI NO: 18404283 NR Description: heavy-metal-associated domain-containing protein thaliana] >gi|20197942|gb|AAD31580.2| putative farnesylated
  misc_feature (79)..(392): Homolog of NCBI NO: 25408515 NR Description: probable farnesylated protein [imported] -
  misc_feature (1)..(307): Homolog of NCBI NO: 37534752 NR Description: putative metal-binding protein [Oryza sativa
  misc_feature (144)..(392): Homolog of NCBI NO: 4097545 NR Description: ATFP2 [Arabidopsis thaliana]
  misc_feature (123)..(313): Homolog of NCBI NO: 4097547 NR Description: ATFP3 [Arabidopsis thaliana]
  misc_feature (26)..(116): Homolog of NCBI NO: 4097547 NR Description: ATFP3 [Arabidopsis thaliana]
  misc_feature (368)..(392): Homolog of NCBI NO: 4097547 NR Description: ATFP3 [Arabidopsis thaliana]
  misc_feature (129)..(313): Homolog of NCBI NO: 9758294 NR Description: contains similarity to ATFP3~gene_id:MLE2.16
  misc_feature (3)..(126): Homolog of NCBI NO: 9758294 NR Description: contains similarity to ATFP3~gene_id:MLE2.16

SEQ ID NO: 98384 - protein, 365 aa, Arabidopsis thaliana; identical to SEQ ID NO: 50395
  peptide (1)..(365): Ceres Seq. ID no. 13593497
  misc_feature (1)..(61): Pfam Name: Heavy-metal-associated domain Pfam Description: Heavy-metal-associated domain
  misc_feature (1)..(365): Homolog of NCBI NO: 15242741 NR Description: heavy-metal-associated domain-containing protein
  misc_feature (52)..(365): Homolog of NCBI NO: 18404283 NR Description: heavy-metal-associated domain-containing protein thaliana] >gi|20197942|gb|AAD31580.2| putative farnesylated
  misc_feature (52)..(365): Homolog of NCBI NO: 25408515 NR Description: probable farnesylated protein [imported] -
  misc_feature (1)..(280): Homolog of NCBI NO: 37534752 NR Description: putative metal-binding protein [Oryza sativa
  misc_feature (117)..(365): Homolog of NCBI NO: 4097545 NR Description: ATFP2 [Arabidopsis thaliana]
  misc_feature (96)..(286): Homolog of NCBI NO: 4097547 NR Description: ATFP3 [Arabidopsis thaliana]
  misc_feature (1)..(89): Homolog of NCBI NO: 4097547 NR Description: ATFP3 [Arabidopsis thaliana]
  misc_feature (341)..(365): Homolog of NCBI NO: 4097547 NR Description: ATFP3 [Arabidopsis thaliana]
  misc_feature (102)..(286): Homolog of NCBI NO: 9758294 NR Description: contains similarity to ATFP3~gene_id:MLE2.16
  misc_feature (1)..(99): Homolog of NCBI NO: 9758294 NR Description: contains similarity to ATFP3~gene_id:MLE2.16

SEQ ID NO: 98385 - protein, 361 aa, Arabidopsis thaliana
  peptide (1)..(361): Ceres Seq. ID no. 13593498
  misc_feature (1)..(57): Pfam Name: Heavy-metal-associated domain Pfam Description: Heavy-metal-associated domain
  misc_feature (1)..(361): Homolog of NCBI NO: 15242741 NR Description: heavy-metal-associated domain-containing protein
  misc_feature (48)..(361): Homolog of NCBI NO: 18404283 NR Description: heavy-metal-associated domain-containing protein thaliana] >gi|20197942|gb|AAD31580.2| putative farnesylated
  misc_feature (48)..(361): Homolog of NCBI NO: 25408515 NR Description: probable farnesylated protein [imported] -
  misc_feature (1)..(276): Homolog of NCBI NO: 37534752 NR Description: putative metal-binding protein [Oryza sativa
  misc_feature (113)..(361): Homolog of NCBI NO: 4097545 NR Description: ATFP2 [Arabidopsis thaliana]
  misc_feature (92)..(282): Homolog of NCBI NO: 4097547 NR Description: ATFP3 [Arabidopsis thaliana]
  misc_feature (1)..(85): Homolog of NCBI NO: 4097547 NR Description: ATFP3 [Arabidopsis thaliana]
  misc_feature (337)..(361): Homolog of NCBI NO: 4097547 NR Description: ATFP3 [Arabidopsis thaliana]
  misc_feature (98)..(282): Homolog of NCBI NO: 9758294 NR Description: contains similarity to ATFP3~gene_id:MLE2.16
  misc_feature (1)..(95): Homolog of NCBI NO: 9758294 NR Description: contains similarity to ATFP3~gene_id:MLE2.16
MHCEGCGKKIKRIFKHFKGVEDVKIDYKSNKLTVIGNVDPVEVRDKVADKIKRPVELVSTVAPPKKETPPSSGGAEKKPSPAAEEKPAEKKPAAVEKPGEKKEEKKKEEGEKKASPPPPPKESTVVLKTKLHCEGCEHKIKRIVNKIKGVNSVAIDSAKDLVIVKGIIDVKQLTPYLNEKLKRTVEVVPAKKDDGAPVAAAAAAPAGGEKKDKVAGEKKEIKDVGEKKVDGGGEKKKEVAVGGGGGGGGGGGDGGAMDVKKSEYNGYGYPPQPMYYYPEGQVYGQQHYMMQGQSSQSYVQEPYSNQGYVQESYMNQGYGQGYGQEAPPPPYMNQQGYADPYGHMRAPELFSDENPNGCSVM

SEQ ID NO: 98386 - DNA, 1451 bp, Arabidopsis thaliana
  misc_feature (1)..(1451): Ceres Seq. ID no. 13593503
  misc_feature: MA Experiment ID: 20000227 Result: Down-regulated in Transcription
  misc_feature: MA Experiment 20000227 PARAMETER Experiment Name: At_Root-Tips-vs-Tops_P Parameter: Tissue Value: Root Tips vs. Root Tops
  misc_feature: MA Experiment ID: 20000436 Result: Down-regulated in Transcription
  misc_feature: MA Experiment 20000436 PARAMETER Experiment Name: At_Drought_P Parameter: Age (day) Value: 7
  misc_feature: MA Experiment 20000436 PARAMETER Experiment Name: At_Drought_P Parameter: Organism Value: A. thaliana
  misc_feature: MA Experiment 20000436 PARAMETER Experiment Name: At_Drought_P Parameter: Plant Line Value: WS
  misc_feature: MA Experiment 20000436 PARAMETER Experiment Name: At_Drought_P Parameter: Timepoint (hr) Value: 12
  misc_feature: MA Experiment 20000436 PARAMETER Experiment Name: At_Drought_P Parameter: Tissue Value: Whole Plant
  misc_feature: MA Experiment 20000436 PARAMETER Experiment Name: At_Drought_P Parameter: Treatment Value: Drought vs. No Drought
  misc_feature: MA Experiment ID: 20000495 Result: Down-regulated in Transcription
  misc_feature: MA Experiment 20000495 PARAMETER Experiment Name: At_Guard_Cells_P Parameter: Harvest Date Value: 8/2/2002
  misc_feature: MA Experiment 20000495 PARAMETER Experiment Name: At_Guard_Cells_P Parameter: Organism Value: A. thaliana
  misc_feature: MA Experiment 20000495 PARAMETER Experiment Name: At_Guard_Cells_P Parameter: Tissue Value: Guard Cells vs. Leaves
  misc_feature: MA Experiment ID: 20000496 Result: Down-regulated in Transcription
  misc_feature: MA Experiment 20000496 PARAMETER Experiment Name: At_Guard_Cells_P Parameter: Harvest Date Value: 7/19/2002
  misc_feature: MA Experiment 20000496 PARAMETER Experiment Name: At_Guard_Cells_P Parameter: Organism Value: Canola
  misc_feature: MA Experiment 20000496 PARAMETER Experiment Name: At_Guard_Cells_P Parameter: Tissue Value: Guard Cells vs. Leaves
  misc_feature: MA Experiment ID: 20001248 Result: Up-regulated in Transcription
  misc_feature: MA Experiment 20001248 PARAMETER Experiment Name: At_Far-red-induction_P Parameter: Age (day) Value: 7
  misc_feature: MA Experiment 20001248 PARAMETER Experiment Name: At_Far-red-induction_P Parameter: Light Value: Far-red vs. White
  misc_feature: MA Experiment 20001248 PARAMETER Experiment Name: At_Far-red-induction_P Parameter: Organism Value: A. thaliana
  misc_feature: MA Experiment 20001248 PARAMETER Experiment Name: At_Far-red-induction_P Parameter: Plant Line Value: Columbia
  misc_feature: MA Experiment 20001248 PARAMETER Experiment Name: At_Far-red-induction_P Parameter: Timepoint (hr) Value: 4
  misc_feature: MA Experiment 20001248 PARAMETER Experiment Name: At_Far-red-induction_P Parameter: Tissue Value: Whole Plant
  misc_feature: MA Experiment ID: 20001450 Result: Up-regulated in Transcription
  misc_feature: MA Experiment 20001450 PARAMETER Experiment Name: At_Far-red-induction_P Parameter: Age (day) Value: 7
  misc_feature: MA Experiment 20001450 PARAMETER Experiment Name: At_Far-red-induction_P Parameter: Light Value: Far-red vs. White
  misc_feature: MA Experiment 20001450 PARAMETER Experiment Name: At_Far-red-induction_P Parameter: Organism Value: A. thaliana
  misc_feature: MA Experiment 20001450 PARAMETER Experiment Name: At_Far-red-induction_P Parameter: Plant Line Value: Columbia
  misc_feature: MA Experiment 20001450 PARAMETER Experiment Name: At_Far-red-induction_P Parameter: Timepoint (hr) Value: 8
  misc_feature: MA Experiment 20001450 PARAMETER Experiment Name: At_Far-red-induction_P Parameter: Tissue Value: Whole Plant
  misc_feature: MA Experiment ID: 20001555 Result: Down-regulated in Transcription
  misc_feature: MA Experiment 20001555 PARAMETER Experiment Name: At_Drought_Soil_Dry_P Parameter: Age (day) Value: 24
  misc_feature: MA Experiment 20001555 PARAMETER Experiment Name: At_Drought_Soil_Dry_P Parameter: Organism Value: A. thaliana
  misc_feature: MA Experiment 20001555 PARAMETER Experiment Name: At_Drought_Soil_Dry_P Parameter: Plant Line Value: WS
  misc_feature: MA Experiment 20001555 PARAMETER Experiment Name: At_Drought_Soil_Dry_P Parameter: Post Timepoint (hr) Value: None
  misc_feature: MA Experiment 20001555 PARAMETER Experiment Name: At_Drought_Soil_Dry_P Parameter: Post-Treatment Value: None
  misc_feature: MA Experiment 20001555 PARAMETER Experiment Name: At_Drought_Soil_Dry_P Parameter: Timepoint (day) Value: 10
  misc_feature: MA Experiment 20001555 PARAMETER Experiment Name: At_Drought_Soil_Dry_P Parameter: Treatment Value: Drought vs. No Drought
aagctaacaacattcacaaggagagagaaacaataaagggcaaggaaaaagatcaaacctttttctttctttctttctcctgctctctgcaatttagaagaagatcgaagaatttgtttgttgtttatcttcttctataaaaacaaaccgtggggtctgttttcatttctggccttgcgattccgataaaactctcagcttcccattcaatccaatccaattccacttctcaaacatatatataattctatatttttgagagacagtttactttttctccttctctctctctctctctttctctttctctgtctctttggcttttctcctcctgttctcatggaagcttcacccaatgatcgacttcattttggcaaaatgggtttcgggtgtaagcattacaagaggagatgccaaatcagagctccatgttgcaacgaagtcttcgattgtcgccattgtcacaacgagagcactagcacattgcgcaatatctacgaccgtcacgatcttgttcgtcaagacgttaaacaagtgatttgttctgtttgcgatacagagcagccggcagctcaagtttgttcgaattgtggtgtcaacatgggagaatatttttgcagcatctgcatattctatgatgatgatactgaaaaacaacagtttcattgcgatgactgtggaatttgcagagttggtgggcgtgagaatttcttccattgcaagaagtgtggatcttgttatgcggttggtctgcgcaacaaccatcgctgcgttgagaattcaatgcgtcatcactgtcccatttgttacgagtacctttttgactctctaaaggacacaaatgtgatgaaatgcgggcacacaatgcacgtagaatgctacaacgagatgatcaaacgtgacaagttttgttgtccaatttgctcgaggtcagtgattgatatgtctaaaacatggcagagactcgatgaagagatcgaagccactgctatgccttcagattaccgtgacaagaaggtttggatactttgcaacgattgtaacgacacaacagaagtgcacttccacataatcggacagaaatgtggacattgcagatcatacaacacacgagcgattgcgcctcctgttcttcctcaatgacaaaaccaagatcttcccatgtattgcctccagaaagcaagcaagaactttttgttgctaaaaaaactgaggcatagattgatgatcataacaaagaaagaaaaagaaaaagattgatgatcaatttgatcattggtcacaaaagcaaaacacacatttgtcttcttcatttgatttgttgttgttcttatactgttacatttttccatttgtgtttgggtgttggaaatgcgaggattatgtataatatactctatattcttgatccaggaaaagttacctggataatatgttttcagggatttttt

SEQ ID NO: 98387 - protein, 267 aa, Arabidopsis thaliana
  peptide (1)..(267): Ceres Seq. ID no. 13593504
  misc_feature (18)..(100): Pfam Name: CHY zinc finger Pfam Description: CHY zinc finger
  misc_feature (1)..(267): Homolog of NCBI NO: 15238890 NR Description: expressed protein [Arabidopsis thaliana] unknown protein [Arabidopsis thaliana]
  misc_feature (5)..(266): Homolog of NCBI NO: 30102616 NR Description: At3g62970 [Arabidopsis thaliana]
  misc_feature (5)..(266): Homolog of NCBI NO: 30695702 NR Description: expressed protein [Arabidopsis thaliana]
  misc_feature (5)..(266): Homolog of NCBI NO: 11358168 NR Description: hypothetical protein T20O10.70 - Arabidopsis >gi|7573426|emb|CAB87742.1| putative protein [Arabidopsis
  misc_feature (2)..(260): Homolog of NCBI NO: 34910658 NR Description: putative PGPD14 protein (pollen germination
  misc_feature (9)..(258): Homolog of NCBI NO: 15237169 NR Description: PGPD14 protein [Arabidopsis thaliana] PGPD14 protein [Arabidopsis thaliana] >gi|15450521|gb|AAK96553.1| [Arabidopsis thaliana] >gi|27363264|gb|AAO11551.1|
  misc_feature (9)..(258): Homolog of NCBI NO: 21593716 NR Description: PGPD14 protein [Arabidopsis thaliana]
  misc_feature (12)..(258): Homolog of NCBI NO: 4105798 NR Description: PGPD14 [Petunia x hybrida]
  misc_feature (17)..(258): Homolog of NCBI NO: 37535002 NR Description: putative PGPD14 protein (pollen germination
  misc_feature (17)..(257): Homolog of NCBI NO: 18606337 NR Description: Zfp363 protein [Mus musculus]
MEASPNDRLHFGKMGFGCKHYKRRCQIRAPCCNEVFDCRHCHNESTSTLRNIYDRHDLVRQDVKQVICSVCDTEQPAAQVCSNCGVNMGEYFCSICIFYDDDTEKQQFHCDDCGICRVGGRENFFHCKKCGSCYAVGLRNNHRCVENSMRHHCPICYEYLFDSLKDTNVMKCGHTMHVECYNEMIKRDKFCCPICSRSVIDMSKTWQRLDEEIEATAMPSDYRDKKVWILCNDCNDTTEVHFHIIGQKCGHCRSYNTRAIAPPVLPQ

SEQ ID NO: 98388 - protein, 254 aa, Arabidopsis thaliana
  peptide (1)..(254): Ceres Seq. ID no. 13593505
  misc_feature (5)..(87): Pfam Name: CHY zinc finger Pfam Description: CHY zinc finger
  misc_feature (1)..(254): Homolog of NCBI NO: 15238890 NR Description: expressed protein [Arabidopsis thaliana] unknown protein [Arabidopsis thaliana]
  misc_feature (1)..(253): Homolog of NCBI NO: 30102616 NR Description: At3g62970 [Arabidopsis thaliana]
  misc_feature (1)..(253): Homolog of NCBI NO: 30695702 NR Description: expressed protein [Arabidopsis thaliana]
  misc_feature (1)..(253): Homolog of NCBI NO: 11358168 NR Description: hypothetical protein T20O10.70 - Arabidopsis >gi|7573426|emb|CAB87742.1| putative protein [Arabidopsis
  misc_feature (1)..(247): Homolog of NCBI NO: 34910658 NR Description: putative PGPD14 protein (pollen germination
  misc_feature (1)..(245): Homolog of NCBI NO: 15237169 NR Description: PGPD14 protein [Arabidopsis thaliana] PGPD14 protein [Arabidopsis thaliana] >gi|15450521|gb|AAK96553.1| [Arabidopsis thaliana] >gi|27363264|gb|AAO11551.1|
  misc_feature (1)..(245): Homolog of NCBI NO: 21593716 NR Description: PGPD14 protein [Arabidopsis thaliana]
  misc_feature (1)..(245): Homolog of NCBI NO: 4105798 NR Description: PGPD14 [Petunia x hybrida]
  misc_feature (4)..(245): Homolog of NCBI NO: 37535002 NR Description: putative PGPD14 protein (pollen germination
  misc_feature (4)..(244): Homolog of NCBI NO: 18606337 NR Description: Zfp363 protein [Mus musculus]
MGFGCKHYKRRCQIRAPCCNEVFDCRHCHNESTSTLRNIYDRHDLVRQDVKQVICSVCDTEQPAAQVCSNCGVNMGEYFCSICIFYDDDTEKQQFHCDDCGICRVGGRENFFHCKKCGSCYAVGLRNNHRCVENSMRHHCPICYEYLFDSLKDTNVMKCGHTMHVECYNEMIKRDKFCCPICSRSVIDMSKTWQRLDEEIEATAMPSDYRDKKVWILCNDCNDTTEVHFHIIGQKCGHCRSYNTRAIAPPVLPQ

SEQ ID NO: 98389 - protein, 180 aa, Arabidopsis thaliana
  peptide (1)..(180): Ceres Seq. ID no. 13593506
  misc_feature (66)..(108): Pfam Name: Zinc finger, C3HC4 type (RING finger) Pfam Description: Zinc finger, C3HC4 type (RING finger)
  misc_feature (1)..(180): Homolog of NCBI NO: 15238890 NR Description: expressed protein [Arabidopsis thaliana] unknown protein [Arabidopsis thaliana]
  misc_feature (1)..(179): Homolog of NCBI NO: 30102616 NR Description: At3g62970 [Arabidopsis thaliana]
  misc_feature (1)..(179): Homolog of NCBI NO: 30695702 NR Description: expressed protein [Arabidopsis thaliana]
  misc_feature (1)..(179): Homolog of NCBI NO: 11358168 NR Description: hypothetical protein T20O10.70 - Arabidopsis >gi|7573426|emb|CAB87742.1| putative protein [Arabidopsis
  misc_feature (1)..(173): Homolog of NCBI NO: 34910658 NR Description: putative PGPD14 protein (pollen germination
  misc_feature (1)..(171): Homolog of NCBI NO: 15237169 NR Description: PGPD14 protein [Arabidopsis thaliana] PGPD14 protein [Arabidopsis thaliana] >gi|15450521|gb|AAK96553.1| [Arabidopsis thaliana] >gi|27363264|gb|AAO11551.1|
  misc_feature (1)..(171): Homolog of NCBI NO: 21593716 NR Description: PGPD14 protein [Arabidopsis thaliana]
  misc_feature (1)..(171): Homolog of NCBI NO: 4105798 NR Description: PGPD14 [Petunia x hybrida]
  misc_feature (1)..(171): Homolog of NCBI NO: 37535002 NR Description: putative PGPD14 protein (pollen germination
  misc_feature (1)..(170): Homolog of NCBI NO: 18606337 NR Description: Zfp363 protein [Mus musculus]
MGEYFCSICIFYDDDTEKQQFHCDDCGICRVGGRENFFHCKKCGSCYAVGLRNNHRCVENSMRHHCPICYEYLFDSLKDTNVMKCGHTMHVECYNEMIKRDKFCCPICSRSVIDMSKTWQRLDEEIEATAMPSDYRDKKVWILCNDCNDTTEVHFHIIGQKCGHCRSYNTRAIAPPVLPQ

SEQ ID NO: 98390 - DNA, 1242 bp, Arabidopsis thaliana
  misc_feature (1)..(1242): Ceres Seq. ID no. 13593507
  misc_feature: MA Experiment ID: 20000264 Result: Up-regulated in Transcription
  misc_feature: MA Experiment 20000264 PARAMETER Experiment Name: At_Open_Flower_P Parameter: Age (day) Value: 21
  misc_feature: MA Experiment 20000264 PARAMETER Experiment Name: At_Open_Flower_P Parameter: Plant Line Value: WS
  misc_feature: MA Experiment 20000264 PARAMETER Experiment Name: At_Open_Flower_P Parameter: Tissue Value: Open Flower vs. Whole Plant
  misc_feature: MA Experiment ID: 20001905 Result: Up-regulated in Transcription
  misc_feature: MA Experiment 20001905 PARAMETER Experiment Name: At_Drought_Reproduction_P Parameter: Age (day) Value: 40
  misc_feature: MA Experiment 20001905 PARAMETER Experiment Name: At_Drought_Reproduction_P Parameter: Organism Value: A. thaliana
  misc_feature: MA Experiment 20001905 PARAMETER Experiment Name: At_Drought_Reproduction_P Parameter: Plant Line Value: WS
  misc_feature: MA Experiment 20001905 PARAMETER Experiment Name: At_Drought_Reproduction_P Parameter: Timepoint (day) Value: 10
  misc_feature: MA Experiment 20001905 PARAMETER Experiment Name: At_Drought_Reproduction_P Parameter: Tissue Value: Rosettes
  misc_feature: MA Experiment 20001905 PARAMETER Experiment Name: At_Drought_Reproduction_P Parameter: Treatment Value: Drought vs. No Drought
  misc_feature: MA Experiment ID: 20001910 Result: Up-regulated in Transcription
  misc_feature: MA Experiment 20001910 PARAMETER Experiment Name: At_Drought_Reproduction_P Parameter: Age (day) Value: 37
  misc_feature: MA Experiment 20001910 PARAMETER Experiment Name: At_Drought_Reproduction_P Parameter: Organism Value: A. thaliana
  misc_feature: MA Experiment 20001910 PARAMETER Experiment Name: At_Drought_Reproduction_P Parameter: Plant Line Value: WS
  misc_feature: MA Experiment 20001910 PARAMETER Experiment Name: At_Drought_Reproduction_P Parameter: Timepoint (day) Value: 7
  misc_feature: MA Experiment 20001910 PARAMETER Experiment Name: At_Drought_Reproduction_P Parameter: Tissue Value: Flowers
  misc_feature: MA Experiment 20001910 PARAMETER Experiment Name: At_Drought_Reproduction_P Parameter: Treatment Value: Drought vs. No Drought
atgtttcagagattcaccttctttctaacagctcttctcattccatgtattctaattatccttagcccttcatatgccctcaaggaaggagaaacatgcatcgtgagcaagaattgtgatcggggattacactgtgaatcgtgtctcgccagcgatagtttccgacctagatgctcccgaatgcaacccattaacccgaccaccaaggtaaaagggttgccttacaacaagtactcatggttaacaacccacaattcatttgctcgaatgggtgcaaaatcaggcactggctctatgattcttgcaccttccaaccaacaagattcaatcacaagccaactccttaatggtgttagagggtttatgcttgacttgtacgacttccaaaacgatatatggctttgccattcttacggtggaaattgtttcaattacaccgcattccaacccgcggttaacattttaaaggagtttcaagtgtttctagacaagaacaaggatgttgttgtaacgcttatcctcgaggactatgtgaaatctcctaatggtttaaccagagtgtttgatgcatccggattacgaaacttcatgtttccggtatcaagaatgcctaaaaacggagaagattggcctactcttgatgatatgatatgtcagaaccaacgattgcttgttttcacgtctaatcctcaaaaagaagcgtcggagggaattgcgtttatgtggagatacatgatagagaatcaatatggagatggagggatgaaggctggagtgtgtaccaatagaccggaatcagttgcaatgggagatagatcaagatcacttattctagtcaattattttccggatactgcagatgtgatcggatcttgtaagcagaactctgctcctcttcttgacaccgtcaaaaactgtcaagaagcctcgggaaaacgttggcctaacttcattgcagtcgatttctacaagagaagcgatggtggaggagctccaaaagcagtggatgttgcaaacggtcatgcagtttgcggctgcgaagatatagccgcttgtaaagagaacatgccatatgggacgtgtgagaagcaagaagagaagaaaccggaatcaaacctaatgatgatagcaaaacttaccgcggaagcgactaaaggctatggccacccatctaccaaaccgaccctacttgggctttctgtgtttgttgtaacctttgtctcacttctctcaactttttga

SEQ ID NO: 98391 - protein, 413 aa, Arabidopsis thaliana
  peptide (1)..(413): Ceres Seq. ID no. 13593508
  misc_feature (1)..(413): Homolog of NCBI NO: 15230348 NR Description: expressed protein [Arabidopsis thaliana]
  misc_feature (17)..(413): Homolog of NCBI NO: 27754722 NR Description: unknown protein [Arabidopsis thaliana]
  misc_feature (1)..(361): Homolog of NCBI NO: 18402763 NR Description: expressed protein [Arabidopsis thaliana]
  misc_feature (26)..(371): Homolog of NCBI NO: 25407778 NR Description: MAP3K-like protein kinase [imported] -
  misc_feature (9)..(361): Homolog of NCBI NO: 38345461 NR Description: OSJNBa0042L16.16 [Oryza sativa (japonica
  misc_feature (12)..(371): Homolog of NCBI NO: 38637049 NR Description: MAP3K-like protein kinase [Oryza sativa (japonica
  misc_feature (9)..(340): Homolog of NCBI NO: 34897530 NR Description: OSJNBa0042L16.2 [Oryza sativa (japonica
  misc_feature (11)..(362): Homolog of NCBI NO: 18425155 NR Description: expressed protein [Arabidopsis thaliana] Unknown protein [Arabidopsis thaliana]
  misc_feature (11)..(362): Homolog of NCBI NO: 21593427 NR Description: unknown [Arabidopsis thaliana]
  misc_feature (30)..(361): Homolog of NCBI NO: 38345515 NR Description: OSJNBa0039K24.18 [Oryza sativa (japonica
MFQRFTFFLTALLIPCILIILSPSYALKEGETCIVSKNCDRGLHCESCLASDSFRPRCSRMQPINPTTKVKGLPYNKYSWLTTHNSFARMGAKSGTGSMILAPSNQQDSITSQLLNGVRGFMLDLYDFQNDIWLCHSYGGNCFNYTAFQPAVNILKEFQVFLDKNKDVVVTLILEDYVKSPNGLTRVFDASGLRNFMFPVSRMPKNGEDWPTLDDMICQNQRLLVFTSNPQKEASEGIAFMWRYMIENQYGDGGMKAGVCTNRPESVAMGDRSRSLILVNYFPDTADVIGSCKQNSAPLLDTVKNCQEASGKRWPNFIAVDFYKRSDGGGAPKAVDVANGHAVCGCEDIAACKENMPYGTCEKQEEKKPESNLMMIAKLTAEATKGYGHPSTKPTLLGLSVFVVTFVSLLSTF

SEQ ID NO: 98392 - protein, 353 aa, Arabidopsis thaliana
  peptide (1)..(353): Ceres Seq. ID no. 13593509
  misc_feature (1)..(353): Homolog of NCBI NO: 15230348 NR Description: expressed protein [Arabidopsis thaliana]
  misc_feature (1)..(353): Homolog of NCBI NO: 27754722 NR Description: unknown protein [Arabidopsis thaliana]
  misc_feature (1)..(301): Homolog of NCBI NO: 18402763 NR Description: expressed protein [Arabidopsis thaliana]
  misc_feature (1)..(311): Homolog of NCBI NO: 25407778 NR Description: MAP3K-like protein kinase [imported] -
  misc_feature (1)..(301): Homolog of NCBI NO: 38345461 NR Description: OSJNBa0042L16.16 [Oryza sativa (japonica
  misc_feature (1)..(311): Homolog of NCBI NO: 38637049 NR Description: MAP3K-like protein kinase [Oryza sativa (japonica
  misc_feature (1)..(280): Homolog of NCBI NO: 34897530 NR Description: OSJNBa0042L16.2 [Oryza sativa (japonica
  misc_feature (1)..(302): Homolog of NCBI NO: 18425155 NR Description: expressed protein [Arabidopsis thaliana] Unknown protein [Arabidopsis thaliana]
  misc_feature (1)..(302): Homolog of NCBI NO: 21593427 NR Description: unknown [Arabidopsis thaliana]
  misc_feature (1)..(301): Homolog of NCBI NO: 38345515 NR Description: OSJNBa0039K24.18 [Oryza sativa (japonica
MQPINPTTKVKGLPYNKYSWLTTHNSFARMGAKSGTGSMILAPSNQQDSITSQLLNGVRGFMLDLYDFQNDIWLCHSYGGNCFNYTAFQPAVNILKEFQVFLDKNKDVVVTLILEDYVKSPNGLTRVFDASGLRNFMFPVSRMPKNGEDWPTLDDMICQNQRLLVFTSNPQKEASEGIAFMWRYMIENQYGDGGMKAGVCTNRPESVAMGDRSRSLILVNYFPDTADVIGSCKQNSAPLLDTVKNCQEASGKRWPNFIAVDFYKRSDGGGAPKAVDVANGHAVCGCEDIAACKENMPYGTCEKQEEKKPESNLMMIAKLTAEATKGYGHPSTKPTLLGLSVFVVTFVSLLSTF

SEQ ID NO: 98393 - protein, 324 aa, Arabidopsis thaliana; identical to SEQ ID NO: 50550
  peptide (1)..(324): Ceres Seq. ID no. 13593510
  misc_feature (1)..(324): Homolog of NCBI NO: 15230348 NR Description: expressed protein [Arabidopsis thaliana]
  misc_feature (1)..(324): Homolog of NCBI NO: 27754722 NR Description: unknown protein [Arabidopsis thaliana]
  misc_feature (1)..(272): Homolog of NCBI NO: 18402763 NR Description: expressed protein [Arabidopsis thaliana]
  misc_feature (1)..(282): Homolog of NCBI NO: 25407778 NR Description: MAP3K-like protein kinase [imported] -
  misc_feature (1)..(272): Homolog of NCBI NO: 38345461 NR Description: OSJNBa0042L16.16 [Oryza sativa (japonica
  misc_feature (1)..(282): Homolog of NCBI NO: 38637049 NR Description: MAP3K-like protein kinase [Oryza sativa (japonica
  misc_feature (1)..(251): Homolog of NCBI NO: 34897530 NR Description: OSJNBa0042L16.2 [Oryza sativa (japonica
  misc_feature (1)..(273): Homolog of NCBI NO: 18425155 NR Description: expressed protein [Arabidopsis thaliana] Unknown protein [Arabidopsis thaliana]
  misc_feature (1)..(273): Homolog of NCBI NO: 21593427 NR Description: unknown [Arabidopsis thaliana]
  misc_feature (1)..(272): Homolog of NCBI NO: 38345515 NR Description: OSJNBa0039K24.18 [Oryza sativa (japonica

SEQ ID NO: 98394 - DNA, 4114 bp, Arabidopsis thaliana
  misc_feature (1)..(4114): Ceres Seq. ID no. 13593532
  misc_feature: MA Experiment ID: 20000169 Result: Down-regulated in Transcription
  misc_feature: MA Experiment 20000169 PARAMETER Experiment Name: At_100uM_ABA_P Parameter: Age (day) Value: 14
  misc_feature: MA Experiment 20000169 PARAMETER Experiment Name: At_100uM_ABA_P Parameter: Organism Value: A. thaliana
  misc_feature: MA Experiment 20000169 PARAMETER Experiment Name: At_100uM_ABA_P Parameter: Plant Line Value: WS
  misc_feature: MA Experiment 20000169 PARAMETER Experiment Name: At_100uM_ABA_P Parameter: Timepoint (hr) Value: 6
  misc_feature: MA Experiment 20000169 PARAMETER Experiment Name: At_100uM_ABA_P Parameter: Tissue Value: Aerial
  misc_feature: MA Experiment 20000169 PARAMETER Experiment Name: At_100uM_ABA_P Parameter: Treatment Value: 100uM ABA vs. No Treatment
  misc_feature: MA Experiment ID: 20000173 Result: Down-regulated in Transcription
  misc_feature: MA Experiment 20000173 PARAMETER Experiment Name: At_42deg_Heat_P Parameter: Age (day) Value: 14
  misc_feature: MA Experiment 20000173 PARAMETER Experiment Name: At_42deg_Heat_P Parameter: Organism Value: A. thaliana
  misc_feature: MA Experiment 20000173 PARAMETER Experiment Name: At_42deg_Heat_P Parameter: Plant Line Value: WS
  misc_feature: MA Experiment 20000173 PARAMETER Experiment Name: At_42deg_Heat_P Parameter: Temperature (deg C) Value: 42 vs. 22
  misc_feature: MA Experiment 20000173 PARAMETER Experiment Name: At_42deg_Heat_P Parameter: Timepoint (hr) Value: 6
  misc_feature: MA Experiment 20000173 PARAMETER Experiment Name: At_42deg_Heat_P Parameter: Tissue Value: Aerial
  misc_feature: MA Experiment ID: 20000234 Result: Up-regulated in Transcription
  misc_feature: MA Experiment 20000234 PARAMETER Experiment Name: At_Siliques_P Parameter: Age (day) Value: 21
  misc_feature: MA Experiment 20000234 PARAMETER Experiment Name: At_Siliques_P Parameter: Organism Value: A. thaliana
  misc_feature: MA Experiment 20000234 PARAMETER Experiment Name: At_Siliques_P Parameter: Plant Line Value: WS
  misc_feature: MA Experiment 20000234 PARAMETER Experiment Name: At_Siliques_P Parameter: Tissue Value: Less Than 5mm Siliques vs. Whole Plant
  misc_feature: MA Experiment ID: 20000265 Result: Up-regulated in Transcription
  misc_feature: MA Experiment 20000265 PARAMETER Experiment Name: At_Open_Flower_P Parameter: Age (day) Value: 21
  misc_feature: MA Experiment 20000265 PARAMETER Experiment Name: At_Open_Flower_P Parameter: Plant Line Value: WS
  misc_feature: MA Experiment 20000265 PARAMETER Experiment Name: At_Open_Flower_P Parameter: Tissue Value: Closed Flower vs. Whole Plant
  misc_feature: MA Experiment ID: 20000286 Result: Up-regulated in Transcription
  misc_feature: MA Experiment 20000286 PARAMETER Experiment Name: At_Open_Flower_P Parameter: Age (day) Value: 21
  misc_feature: MA Experiment 20000286 PARAMETER Experiment Name: At_Open_Flower_P Parameter: Plant Line Value: WS
  misc_feature: MA Experiment 20000286 PARAMETER Experiment Name: At_Open_Flower_P Parameter: Tissue Value: Half Open vs. Whole Plant
  misc_feature: MA Experiment ID: 20000437 Result: Down-regulated in Transcription
  misc_feature: MA Experiment 20000437 PARAMETER Experiment Name: At_Drought_P Parameter: Age (day) Value: 8
  misc_feature: MA Experiment 20000437 PARAMETER Experiment Name: At_Drought_P Parameter: Organism Value: A. thaliana
  misc_feature: MA Experiment 20000437 PARAMETER Experiment Name: At_Drought_P Parameter: Plant Line Value: WS
  misc_feature: MA Experiment 20000437 PARAMETER Experiment Name: At_Drought_P Parameter: Timepoint (hr) Value: 24
  misc_feature: MA Experiment 20000437 PARAMETER Experiment Name: At_Drought_P Parameter: Tissue Value: Whole Plant
  misc_feature: MA Experiment 20000437 PARAMETER Experiment Name: At_Drought_P Parameter: Treatment Value: Drought vs. No Drought
  misc_feature: MA Experiment ID: 20000438 Result: Up-regulated in Transcription
  misc_feature: MA Experiment 20000438 PARAMETER Experiment Name: At_Shoots__P Parameter: Age (day) Value: 14
  misc_feature: MA Experiment 20000438 PARAMETER Experiment Name: At_Shoots__P Parameter: Tissue Value: Shoots vs. Whole Plant
  misc_feature: MA Experiment ID: 20001450 Result: Up-regulated in Transcription
  misc_feature: MA Experiment 20001450 PARAMETER Experiment Name: At_Far-red-induction_P Parameter: Age (day) Value: 7
  misc_feature: MA Experiment 20001450 PARAMETER Experiment Name: At_Far-red-induction_P Parameter: Light Value: Far-red vs. White
  misc_feature: MA Experiment 20001450 PARAMETER Experiment Name: At_Far-red-induction_P Parameter: Organism Value: A. thaliana
  misc_feature: MA Experiment 20001450 PARAMETER Experiment Name: At_Far-red-induction_P Parameter: Plant Line Value: Columbia
  misc_feature: MA Experiment 20001450 PARAMETER Experiment Name: At_Far-red-induction_P Parameter: Timepoint (hr) Value: 8
  misc_feature: MA Experiment 20001450 PARAMETER Experiment Name: At_Far-red-induction_P Parameter: Tissue Value: Whole Plant
  misc_feature: MA Experiment ID: 20001555 Result: Down-regulated in Transcription
  misc_feature: MA Experiment 20001555 PARAMETER Experiment Name: At_Drought_Soil_Dry_P Parameter: Age (day) Value: 24
  misc_feature: MA Experiment 20001555 PARAMETER Experiment Name: At_Drought_Soil_Dry_P Parameter: Organism Value: A. thaliana
  misc_feature: MA Experiment 20001555 PARAMETER Experiment Name: At_Drought_Soil_Dry_P Parameter: Plant Line Value: WS
  misc_feature: MA Experiment 20001555 PARAMETER Experiment Name: At_Drought_Soil_Dry_P Parameter: Post Timepoint (hr) Value: None
  misc_feature: MA Experiment 20001555 PARAMETER Experiment Name: At_Drought_Soil_Dry_P Parameter: Post-Treatment Value: None
  misc_feature: MA Experiment 20001555 PARAMETER Experiment Name: At_Drought_Soil_Dry_P Parameter: Timepoint (day) Value: 10
  misc_feature: MA Experiment 20001555 PARAMETER Experiment Name: At_Drought_Soil_Dry_P Parameter: Treatment Value: Drought vs. No Drought
  misc_feature: MA Experiment ID: 20001556 Result: Down-regulated in Transcription
  misc_feature: MA Experiment 20001556 PARAMETER Experiment Name: At_Drought_Soil_Dry_P Parameter: Age (day) Value: 26
  misc_feature: MA Experiment 20001556 PARAMETER Experiment Name: At_Drought_Soil_Dry_P Parameter: Organism Value: A. thaliana
  misc_feature: MA Experiment 20001556 PARAMETER Experiment Name: At_Drought_Soil_Dry_P Parameter: Plant Line Value: WS
  misc_feature: MA Experiment 20001556 PARAMETER Experiment Name: At_Drought_Soil_Dry_P Parameter: Post Timepoint (hr) Value: None
  misc_feature: MA Experiment 20001556 PARAMETER Experiment Name: At_Drought_Soil_Dry_P Parameter: Post-Treatment Value: None
  misc_feature: MA Experiment 20001556 PARAMETER Experiment Name: At_Drought_Soil_Dry_P Parameter: Timepoint (day) Value: 12
  misc_feature: MA Experiment 20001556 PARAMETER Experiment Name: At_Drought_Soil_Dry_P Parameter: Treatment Value: Drought vs. No Drought
  misc_feature: MA Experiment ID: 20001559 Result: Down-regulated in Transcription
  misc_feature: MA Experiment 20001559 PARAMETER Experiment Name: At_Drought_Soil_Dry_P Parameter: Age (day) Value: 28
  misc_feature: MA Experiment 20001559 PARAMETER Experiment Name: At_Drought_Soil_Dry_P Parameter: Organism Value: A. thaliana
  misc_feature: MA Experiment 20001559 PARAMETER Experiment Name: At_Drought_Soil_Dry_P Parameter: Plant Line Value: WS
  misc_feature: MA Experiment 20001559 PARAMETER Experiment Name: At_Drought_Soil_Dry_P Parameter: Post Timepoint (hr) Value: 29
  misc_feature: MA Experiment 20001559 PARAMETER Experiment Name: At_Drought_Soil_Dry_P Parameter: Post-Treatment Value: Re-Water vs. No Drought
  misc_feature: MA Experiment 20001559 PARAMETER Experiment Name: At_Drought_Soil_Dry_P Parameter: Timepoint (day) Value: 14
  misc_feature: MA Experiment 20001559 PARAMETER Experiment Name: At_Drought_Soil_Dry_P Parameter: Treatment Value: Drought vs. No Drought
  misc_feature: MA Experiment ID: 20001904 Result: Down-regulated in Transcription
  misc_feature: MA Experiment 20001904 PARAMETER Experiment Name: At_Drought_Reproduction_P Parameter: Age (day) Value: 37
  misc_feature: MA Experiment 20001904 PARAMETER Experiment Name: At_Drought_Reproduction_P Parameter: Organism Value: A. thaliana
  misc_feature: MA Experiment 20001904 PARAMETER Experiment Name: At_Drought_Reproduction_P Parameter: Plant Line Value: WS
  misc_feature: MA Experiment 20001904 PARAMETER Experiment Name: At_Drought_Reproduction_P Parameter: Timepoint (day) Value: 7
  misc_feature: MA Experiment 20001904 PARAMETER Experiment Name: At_Drought_Reproduction_P Parameter: Tissue Value: Rosettes
  misc_feature: MA Experiment 20001904 PARAMETER Experiment Name: At_Drought_Reproduction_P Parameter: Treatment Value: Drought vs. No Drought
  misc_feature: MA Experiment ID: 20001905 Result: Down-regulated in Transcription
  misc_feature: MA Experiment 20001905 PARAMETER Experiment Name: At_Drought_Reproduction_P Parameter: Age (day) Value: 40
  misc_feature: MA Experiment 20001905 PARAMETER Experiment Name: At_Drought_Reproduction_P Parameter: Organism Value: A. thaliana
  misc_feature: MA Experiment 20001905 PARAMETER Experiment Name: At_Drought_Reproduction_P Parameter: Plant Line Value: WS
  misc_feature: MA Experiment 20001905 PARAMETER Experiment Name: At_Drought_Reproduction_P Parameter: Timepoint (day) Value: 10
  misc_feature: MA Experiment 20001905 PARAMETER Experiment Name: At_Drought_Reproduction_P Parameter: Tissue Value: Rosettes
  misc_feature: MA Experiment 20001905 PARAMETER Experiment Name: At_Drought_Reproduction_P Parameter: Treatment Value: Drought vs. No Drought
  misc_feature: MA Experiment ID: 20001911 Result: Down-regulated in Transcription
  misc_feature: MA Experiment 20001911 PARAMETER Experiment Name: At_Drought_Reproduction_P Parameter: Age (day) Value: 40
  misc_feature: MA Experiment 20001911 PARAMETER Experiment Name: At_Drought_Reproduction_P Parameter: Organism Value: A. thaliana
  misc_feature: MA Experiment 20001911 PARAMETER Experiment Name: At_Drought_Reproduction_P Parameter: Plant Line Value: WS
  misc_feature: MA Experiment 20001911 PARAMETER Experiment Name: At_Drought_Reproduction_P Parameter: Timepoint (day) Value: 10
  misc_feature: MA Experiment 20001911 PARAMETER Experiment Name: At_Drought_Reproduction_P Parameter: Tissue Value: Flowers
  misc_feature: MA Experiment 20001911 PARAMETER Experiment Name: At_Drought_Reproduction_P Parameter: Treatment Value: Drought vs. No Drought
taggcatgaagacactctcattctctctctcttctcaccacttcaaaacaagacactcgtaaaagagttcttgaacttcacaaaacaattgtcagattttcaagaaaaactttataaaacaaaaaacatttcattctttctctctctctctctcactgctcaatgatctcgttttctcactaaaccaactcgtttcttcttactttctttaactcggatctacaaaaaaccatgtcggaaactaacacaaccgatgccaagactgttccagcagaagcagagaagaagaaagaacagagtttaccattctttaaactcttttctttcgctgataaatttgattatctcttaatgttcgttggttctcttggtgccattgttcatggctcttccatgcctgtcttctttttactctttggtcaaatggttaatggatttggtaaaaaccaaatggatttacatcaaatggttcatgaagtctctagatattctctatatttcgtctacttgggtttggtcgtttgcttctcttcttacgcagagatagcatgttggatgtattctggagaaagacaagtagcagcattaaggaagaaatatcttgaagcagtattaaaacaagacgttgggttctttgatactgatgctagaactggtgacattgtctttagtgtttctactgatactcttcttgttcaagatgccattagtgaaaaggttggaaactttatacattacctctcaacatttttggcgggattagtagttggatttgtatcagcatggaaattagctttgttaagtgttgctgtgattcccggaatcgctttcgccggaggtttatacgcttatacactcaccggaattacttcaaagagccgtgaatcttatgctaacgccggtgttatcgccgagcaggcaattgctcaagttcgaactgtttattcttatgttggagagagtaaggcacttaatgcgtattcggatgcgattcagtatacgcttaagctcggttataaagcggggatggctaaagggttgggtttaggatgtacttatggaatagcttgtatgtcatgggctttggtgttttggtatgctggagtttttattcggaatggacaaaccgatggaggaaaggcgtttactgctatattctctgctattgttggtggaatgagtttggggcaatctttctcgaatcttggggcgtttagtaaaggtaaagcggctggttataagttgatggagataattaaccagagaccgacgataattcaagacccgttggatggaaaatgtttggatcaagttcatgggaacattgagtttaaagatgtgacttttagctatccttcacggcctgatgttatgatcttcaggaactttaatattttcttcccttctgggaaaactgtggcggttgttggtgggagtggctctggaaagagtactgttgtttccctcattgagagattctatgatccaaacagcgggcaaattctgttggatggtgttgagataaagacgcttcagttgaagtttttgcgtgaacaaatcgggcttgtgaatcaagaacctgcgctctttgccactactatactagagaacatactctatggaaagcctgatgcaacaatggttgaagttgaagctgctgcttccgctgcgaatgcgcatagtttcattacattacttcctaaaggctacgacacacaggttggagaacgtggtgttcaactctcaggtggacagaagcagagaattgcaattgctagggcgatgttgaaagacccaaagattctgttactagatgaagctacaagcgctcttgatgctagctctgagagcattgttcaggaagctttagacagagtcatggtggggaggaccactgttgttgttgctcatcgtctctgcaccatcagaaatgttgattccattgccgtgatacagcaaggccaagttgttgaaaccggaacacatgaagaactcattgccaaatccggtgcttacgcatccctcatcaggtttcaggaaatggttggtactcgagatttctcaaacccgtcaactcgtcgcactcgttcaacccgtttgagccattcactgtcaacgaaatcactcagtttaagatcaggaagtttgaggaatctgagctattcttacagcactggagctgatggtcggatagagatgatttcaaatgcagagactgaccgaaagactcgtgcccctgaaaattacttctacaggcttctcaagcttaattcaccggaatggccttactcaatcatgggagcagtaggctcaattctttctggtttcattggtcctacatttgctattgtgatgagcaacatgatcgaagtcttctactacacagactatgattcaatggaaaggaaaacaaaagagtatgtcttcatctacattggtgctggtctctatgctgtgggtgcttatttgatccaacattacttctttagcatcatgggagaaaacctcacaacaagagtaagaagaatgatgctctcagctatcttgagaaacgaagttggttggttcgatgaggatgaacacaactcaagcctgatcgctgcacgtttagctactgatgcagcagatgttaaatccgctatagccgagagaatctcagtaattctacaaaacatgacttcacttctcacatccttcatagtcgccttcatagtagaatggagagtctcacttctcatcttaggcacattcccacttctagtcctcgctaactttgctcagcaactatctctgaagggttttgctggagacacagctaaggctcatgcaaagacttcaatgattgctggtgaaggagtcagtaacattagaaccgtagcagctttcaatgcacagagcaagattctctctttgttctgtcatgagcttcgtgtacctcagaaaagaagcttataccgaagtcaaacctcgggtttcctatttggcctctcgcagcttgctctctatggttctgaggctttaattctctggtatggtgcccaccttgtgagtaaaggcgtgtcaaccttttccaaagtgatcaaagtgtttgtggttttggtcattactgcaaactctgttgctgaaactgtcagtcttgctcctgaaattattcggggaggtgaagctgttggttcggttttctcggtcttggacaggcagaccaggattgacccggatgatgctgatgctgatcccgtggagacgatccgtggagacattgagtttaggcatgttgatttcgcttacccttcaagacccgacgtcatggttttcagggactttaacctcagaattcgagctggacatagccaagctcttgtgggcgcgagtgggtcagggaagagttctgtaattgcgatgatcgagcggttttacgaccctcttgctggaaaagtcatgattgatggcaaagacatccgccggctaaacctgaaatctctaaggctcaaaatcggtcttgttcaacaagaaccagctctcttcgcagcaacgatcttcgacaacatcgcctatggtaaagatggtgcaactgaatccgaggtaattgatgcagctcgagccgcaaatgctcacggtttcatcagtggtttacctgaaggttacaaaactccagtaggcgaaagaggagtgcagttatcaggtggacagaaacagaggatcgcgatagcaagagctgtgctcaagaaccctacagtgttgcttctagacgaagcaactagcgcactagatgcagaatcagaatgcgtgctgcaagaggcgttagagaggctcatgagaggtcggaccaccgtggtagttgctcaccgcttgtccaccataagaggtgttgattgcattggtgtgattcaagacgggcggattgtggagcaaggcagccattcagagctcgttagccgaccagagggagcttattcaaggctgttacagcttcaaacacataggatttgaagcttgatcatggattaaaaacaaaaaatcggtttgtgtaattttttttatattaaaactttaatttggaagatttctatggactataacgataatatgaataggtgtagataatgaagctttt

SEQ ID NO: 98395 - protein, 1252 aa, Arabidopsis thaliana
  peptide (1)..(1252): Ceres Seq. ID no. 13593533
  misc_feature (41)..(318): Pfam Name: ABC transporter transmembrane region Pfam Description: ABC transporter transmembrane region
  misc_feature (15)..(786): Homolog of NCBI NO: 25407562 NR Description: hypothetical protein AT4g18050 [imported] -
  misc_feature (794)..(1233): Homolog of NCBI NO: 25407562 NR Description: hypothetical protein AT4g18050 [imported] -
  misc_feature (15)..(1233): Homolog of NCBI NO: 22328760 NR Description: multidrug resistance P-glycoprotein, putative
  misc_feature (1)..(943): Homolog of NCBI NO: 18496818 NR Description: ABC transporter AbcB3 [Dictyostelium discoideum]
  misc_feature (946)..(1244): Homolog of NCBI NO: 18496818 NR Description: ABC transporter AbcB3 [Dictyostelium discoideum]
  misc_feature (640)..(1246): Homolog of NCBI NO: 15233244 NR Description: multidrug resistance P-glycoprotein, putative
  misc_feature (23)..(603): Homolog of NCBI NO: 15233244 NR Description: multidrug resistance P-glycoprotein, putative
  misc_feature (15)..(1249): Homolog of NCBI NO: 34911450 NR Description: putative multidrug resistance protein 1 homolog
  misc_feature (169)..(1248): Homolog of NCBI NO: 38049160 NR Description: P-glycoprotein 1 [Sorghum bicolor]
  misc_feature (603)..(1249): Homolog of NCBI NO: 34913544 NR Description: putative multidrug resistance protein [Oryza
MSETNTTDAKTVPAEAEKKKEQSLPFFKLFSFADKFDYLLMFVGSLGAIVHGSSMPVFFLLFGQMVNGFGKNQMDLHQMVHEVSRYSLYFVYLGLVVCFSSYAEIACWMYSGERQVAALRKKYLEAVLKQDVGFFDTDARTGDIVFSVSTDTLLVQDAISEKVGNFIHYLSTFLAGLVVGFVSAWKLALLSVAVIPGIAFAGGLYAYTLTGITSKSRESYANAGVIAEQAIAQVRTVYSYVGESKALNAYSDAIQYTLKLGYKAGMAKGLGLGCTYGIACMSWALVFWYAGVFIRNGQTDGGKAFTAIFSAIVGGMSLGQSFSNLGAFSKGKAAGYKLMEIINQRPTIIQDPLDGKCLDQVHGNIEFKDVTFSYPSRPDVMIFRNFNIFFPSGKTVAVVGGSGSGKSTVVSLIERFYDPNSGQILLDGVEIKTLQLKFLREQIGLVNQEPALFATTILENILYGKPDATMVEVEAAASAANAHSFITLLPKGYDTQVGERGVQLSGGQKQRIAIARAMLKDPKILLLDEATSALDASSESIVQEALDRVMVGRTTVVVAHRLCTIRNVDSIAVIQQGQVVETGTHEELIAKSGAYASLIRFQEMVGTRDFSNPSTRRTRSTRLSHSLSTKSLSLRSGSLRNLSYSYSTGADGRIEMISNAETDRKTRAPENYFYRLLKLNSPEWPYSIMGAVGSILSGFIGPTFAIVMSNMIEVFYYTDYDSMERKTKEYVFIYIGAGLYAVGAYLIQHYFFSIMGENLTTRVRRMMLSAILRNEVGWFDEDEHNSSLIAARLATDAADVKSAIAERISVILQNMTSLLTSFIVAFIVEWRVSLLILGTFPLLVLANFAQQLSLKGFAGDTAKAHAKTSMIAGEGVSNIRTVAAFNAQSKILSLFCHELRVPQKRSLYRSQTSGFLFGLSQLALYGSEALILWYGAHLVSKGVSTFSKVIKVFVVLVITANSVAETVSLAPEIIRGGEAVGSVFSVLDRQTRIDPDDADADPVETIRGDIEFRHVDFAYPSRPDVMVFRDFNLRIRAGHSQALVGASGSGKSSVIAMIERFYDPLAGKVMIDGKDIRRLNLKSLRLKIGLVQQEPALFAATIFDNIAYGKDGATESEVIDAARAANAHGFISGLPEGYKTPVGERGVQLSGGQKQRIAIARAVLKNPTVLLLDEATSALDAESECVLQEALERLMRGRTTVVVAHRLSTIRGVDCIGVIQDGRIVEQGSHSELVSRPEGAYSRLLQLQTHRI

SEQ ID NO: 98396 - protein, 1212 aa, Arabidopsis thaliana
  peptide (1)..(1212): Ceres Seq. ID no. 13593534
  misc_feature (1)..(278): Pfam Name: ABC transporter transmembrane region Pfam Description: ABC transporter transmembrane region
  misc_feature (1)..(746): Homolog of NCBI NO: 25407562 NR Description: hypothetical protein AT4g18050 [imported] -
  misc_feature (754)..(1193): Homolog of NCBI NO: 25407562 NR Description: hypothetical protein AT4g18050 [imported] -
  misc_feature (1)..(1193): Homolog of NCBI NO: 22328760 NR Description: multidrug resistance P-glycoprotein, putative
  misc_feature (1)..(903): Homolog of NCBI NO: 18496818 NR Description: ABC transporter AbcB3 [Dictyostelium discoideum]
  misc_feature (906)..(1204): Homolog of NCBI NO: 18496818 NR Description: ABC transporter AbcB3 [Dictyostelium discoideum]
  misc_feature (600)..(1206): Homolog of NCBI NO: 15233244 NR Description: multidrug resistance P-glycoprotein, putative
  misc_feature (1)..(563): Homolog of NCBI NO: 15233244 NR Description: multidrug resistance P-glycoprotein, putative
  misc_feature (1)..(1209): Homolog of NCBI NO: 34911450 NR Description: putative multidrug resistance protein 1 homolog
  misc_feature (129)..(1208): Homolog of NCBI NO: 38049160 NR Description: P-glycoprotein 1 [Sorghum bicolor]
  misc_feature (563)..(1209): Homolog of NCBI NO: 34913544 NR Description: putative multidrug resistance protein [Oryza
MFVGSLGAIVHGSSMPVFFLLFGQMVNGFGKNQMDLHQMVHEVSRYSLYFVYLGLVVCFSSYAEIACWMYSGERQVAALRKKYLEAVLKQDVGFFDTDARTGDIVFSVSTDTLLVQDAISEKVGNFIHYLSTFLAGLVVGFVSAWKLALLSVAVIPGIAFAGGLYAYTLTGITSKSRESYANAGVIAEQAIAQVRTVYSYVGESKALNAYSDAIQYTLKLGYKAGMAKGLGLGCTYGIACMSWALVFWYAGVFIRNGQTDGGKAFTAIFSAIVGGMSLGQSFSNLGAFSKGKAAGYKLMEIINQRPTIIQDPLDGKCLDQVHGNIEFKDVTFSYPSRPDVMIFRNFNIFFPSGKTVAVVGGSGSGKSTVVSLIERFYDPNSGQILLDGVEIKTLQLKFLREQIGLVNQEPALFATTILENILYGKPDATMVEVEAAASAANAHSFITLLPKGYDTQVGERGVQLSGGQKQRIAIARAMLKDPKILLLDEATSALDASSESIVQEALDRVMVGRTTVVVAHRLCTIRNVDSIAVIQQGQVVETGTHEELIAKSGAYASLIRFQEMVGTRDFSNPSTRRTRSTRLSHSLSTKSLSLRSGSLRNLSYSYSTGADGRIEMISNAETDRKTRAPENYFYRLLKLNSPEWPYSIMGAVGSILSGFIGPTFAIVMSNMIEVFYYTDYDSMERKTKEYVFIYIGAGLYAVGAYLIQHYFFSIMGENLTTRVRRMMLSAILRNEVGWFDEDEHNSSLIAARLATDAADVKSAIAERISVILQNMTSLLTSFIVAFIVEWRVSLLILGTFPLLVLANFAQQLSLKGFAGDTAKAHAKTSMIAGEGVSNIRTVAAFNAQSKILSLFCHELRVPQKRSLYRSQTSGFLFGLSQLALYGSEALILWYGAHLVSKGVSTFSKVIKVFVVLVITANSVAETVSLAPEIIRGGEAVGSVFSVLDRQTRIDPDDADADPVETIRGDIEFRHVDFAYPSRPDVMVFRDFNLRIRAGHSQALVGASGSGKSSVIAMIERFYDPLAGKVMIDGKDIRRLNLKSLRLKIGLVQQEPALFAATIFDNIAYGKDGATESEVIDAARAANAHGFISGLPEGYKTPVGERGVQLSGGQKQRIAIARAVLKNPTVLLLDEATSALDAESECVLQEALERLMRGRTTVVVAHRLSTIRGVDCIGVIQDGRIVEQGSHSELVSRPEGAYSRLLQLQTHRI

SEQ ID NO: 98397 - protein, 1198 aa, Arabidopsis thaliana
  peptide (1)..(1198): Ceres Seq. ID no. 13593535
  misc_feature (1)..(264): Pfam Name: ABC transporter transmembrane region Pfam Description: ABC transporter transmembrane region
  misc_feature (1)..(732): Homolog of NCBI NO: 25407562 NR Description: hypothetical protein AT4g18050 [imported] -
  misc_feature (740)..(1179): Homolog of NCBI NO: 25407562 NR Description: hypothetical protein AT4g18050 [imported] -
  misc_feature (1)..(1179): Homolog of NCBI NO: 22328760 NR Description: multidrug resistance P-glycoprotein, putative
  misc_feature (1)..(889): Homolog of NCBI NO: 18496818 NR Description: ABC transporter AbcB3 [Dictyostelium discoideum]
  misc_feature (892)..(1190): Homolog of NCBI NO: 18496818 NR Description: ABC transporter AbcB3 [Dictyostelium discoideum]
  misc_feature (586)..(1192): Homolog of NCBI NO: 15233244 NR Description: multidrug resistance P-glycoprotein, putative
  misc_feature (1)..(549): Homolog of NCBI NO: 15233244 NR Description: multidrug resistance P-glycoprotein, putative
  misc_feature (1)..(1195): Homolog of NCBI NO: 34911450 NR Description: putative multidrug resistance protein 1 homolog
  misc_feature (115)..(1194): Homolog of NCBI NO: 38049160 NR Description: P-glycoprotein 1 [Sorghum bicolor]
  misc_feature (549)..(1195): Homolog of NCBI NO: 34913544 NR Description: putative multidrug resistance protein [Oryza
MPVFFLLFGQMVNGFGKNQMDLHQMVHEVSRYSLYFVYLGLVVCFSSYAEIACWMYSGERQVAALRKKYLEAVLKQDVGFFDTDARTGDIVFSVSTDTLLVQDAISEKVGNFIHYLSTFLAGLVVGFVSAWKLALLSVAVIPGIAFAGGLYAYTLTGITSKSRESYANAGVIAEQAIAQVRTVYSYVGESKALNAYSDAIQYTLKLGYKAGMAKGLGLGCTYGIACMSWALVFWYAGVFIRNGQTDGGKAFTAIFSAIVGGMSLGQSFSNLGAFSKGKAAGYKLMEIINQRPTIIQDPLDGKCLDQVHGNIEFKDVTFSYPSRPDVMIFRNFNIFFPSGKTVAVVGGSGSGKSTVVSLIERFYDPNSGQILLDGVEIKTLQLKFLREQIGLVNQEPALFATTILENILYGKPDATMVEVEAAASAANAHSFITLLPKGYDTQVGERGVQLSGGQKQRIAIARAMLKDPKILLLDEATSALDASSESIVQEALDRVMVGRTTVVVAHRLCTIRNVDSIAVIQQGQVVETGTHEELIAKSGAYASLIRFQEMVGTRDFSNPSTRRTRSTRLSHSLSTKSLSLRSGSLRNLSYSYSTGADGRIEMISNAETDRKTRAPENYFYRLLKLNSPEWPYSIMGAVGSILSGFIGPTFAIVMSNMIEVFYYTDYDSMERKTKEYVFIYIGAGLYAVGAYLIQHYFFSIMGENLTTRVRRMMLSAILRNEVGWFDEDEHNSSLIAARLATDAADVKSAIAERISVILQNMTSLLTSFIVAFIVEWRVSLLILGTFPLLVLANFAQQLSLKGFAGDTAKAHAKTSMIAGEGVSNIRTVAAFNAQSKILSLFCHELRVPQKRSLYRSQTSGFLFGLSQLALYGSEALILWYGAHLVSKGVSTFSKVIKVFVVLVITANSVAETVSLAPEIIRGGEAVGSVFSVLDRQTRIDPDDADADPVETIRGDIEFRHVDFAYPSRPDVMVFRDFNLRIRAGHSQALVGASGSGKSSVIAMIERFYDPLAGKVMIDGKDIRRLNLKSLRLKIGLVQQEPALFAATIFDNIAYGKDGATESEVIDAARAANAHGFISGLPEGYKTPVGERGVQLSGGQKQRIAIARAVLKNPTVLLLDEATSALDAESECVLQEALERLMRGRTTVVVAHRLSTIRGVDCIGVIQDGRIVEQGSHSELVSRPEGAYSRLLQLQTHRI

SEQ ID NO: 98398 - DNA, 1077 bp, Arabidopsis thaliana
  misc_feature (1)..(1077): Ceres Seq. ID no. 13593536
  misc_feature: MA Experiment ID: 20000171 Result: Up-regulated in Transcription
  misc_feature: MA Experiment 20000171 PARAMETER Experiment Name: At_42deg_Heat_P Parameter: Age (day) Value: 14
  misc_feature: MA Experiment 20000171 PARAMETER Experiment Name: At_42deg_Heat_P Parameter: Organism Value: A. thaliana
  misc_feature: MA Experiment 20000171 PARAMETER Experiment Name: At_42deg_Heat_P Parameter: Plant Line Value: WS
  misc_feature: MA Experiment 20000171 PARAMETER Experiment Name: At_42deg_Heat_P Parameter: Temperature (deg C) Value: 42 vs. 22
  misc_feature: MA Experiment 20000171 PARAMETER Experiment Name: At_42deg_Heat_P Parameter: Timepoint (hr) Value: 1
  misc_feature: MA Experiment 20000171 PARAMETER Experiment Name: At_42deg_Heat_P Parameter: Tissue Value: Aerial
aggaaaaaaaattctggaactttcgagcttctgttttgcggtgctctcaaagcttatatcggatctcgaatcttgaatcggactcagaacctcggatcttcgaaaatcgacgaacatgtcttctcctggcgaattctataactcacttccacctataaccaaggcttatggtacgttgtgctttttcactacagtagccacgcagcttggcttagttgctcccgttcacattgctttaattcctgaacttgtacttaagcagttccagatctggaggctgataacaaacttgtttttcctcggtggtttctctatcaattttggaatacgtcttttgatgatagcaagatatggagttcaactcgagaaagggccatttgaaaggcggacagcagactttttgtggatgatgatctttggatccttcactctattggtattatcagtcataccatttttctggacaccgtttcttggtgtttcacttgtgttcatgcttctttatctctggagccgagaatttccaaatgccaacatcagcctatacggtcttgtcactcttaaggctttctacctcccatgggcaatgctagcacttgatgttatcttcggttctccgatcatgccagatcttcttggcatcatagctggacatctatactacttcctaacagtccttcatcctcttgctaccggaaaaaactacctgaaaaccccaaaatgggttaataaaatcgtagcaagatggcgaattggagctccagttgcaagtgttcgacaagcaggtggtgtaggagcagcaggacccggagctggaggaggagtaggaggaggaggagcttattcaagcgctcgtgccccacccgagagttcaaacacagcattcagaggtcgatcatatcgtctcaccgactgaaatagaaatcttctcgagtttctttgttttcatcatatcaaatctttttcaaacaatgccactaactaatcccaggtagctttgtgttttcgaacagtacagtttttgaatatatgactctgtaggaagaatctttgaggttttaatacaatgttcttttc

SEQ ID NO: 98399 - protein, 266 aa, Arabidopsis thaliana; identical to SEQ ID NO: 47388
  peptide (1)..(266): Ceres Seq. ID no. 13593537
  misc_feature (11)..(202): Pfam Name: Der1-like family Pfam Description: Der1-like family
  misc_feature (1)..(266): Homolog of NCBI NO: 22329014 NR Description: expressed protein [Arabidopsis thaliana] unknown protein [Arabidopsis thaliana]
  misc_feature (7)..(266): Homolog of NCBI NO: 25407607 NR Description: hypothetical protein AT4g29330 [imported] - thaliana >gi|7269831|emb|CAB79691.1| putative protein
  misc_feature (7)..(236): Homolog of NCBI NO: 9187743 NR Description: putative NADH oxidoreductase [Zea mays]
  misc_feature (8)..(207): Homolog of NCBI NO: 15808990 NR Description: carcinoma related gene [Mus musculus] carcinoma related gene [Mus musculus] unnamed protein product [Mus musculus]
  misc_feature (8)..(207): Homolog of NCBI NO: 26350675 NR Description: unnamed protein product [Mus musculus]
  misc_feature (8)..(207): Homolog of NCBI NO: 16151831 NR Description: F-LANa [Mus musculus]
  misc_feature (6)..(228): Homolog of NCBI NO: 27573354 NR Description: putative Der1-like protein [Oryza sativa
  misc_feature (6)..(208): Homolog of NCBI NO: 35505512 NR Description: FLJ43842 protein [Homo sapiens]
  misc_feature (6)..(201): Homolog of NCBI NO: 15777933 NR Description: putative NADH oxidoreductase complex I subunit
  misc_feature (11)..(204): Homolog of NCBI NO: 34852394 NR Description: similar to carcinoma related gene [Rattus

SEQ ID NO: 98400 - protein, 192 aa, Arabidopsis thaliana; identical to SEQ ID NO: 47389
  peptide (1)..(192): Ceres Seq. ID no. 13593538
  misc_feature (1)..(128): Pfam Name: Der1-like family Pfam Description: Der1-like family
  misc_feature (1)..(192): Homolog of NCBI NO: 22329014 NR Description: expressed protein [Arabidopsis thaliana] unknown protein [Arabidopsis thaliana]
  misc_feature (1)..(192): Homolog of NCBI NO: 25407607 NR Description: hypothetical protein AT4g29330 [imported] - thaliana >gi|7269831|emb|CAB79691.1| putative protein
  misc_feature (1)..(162): Homolog of NCBI NO: 9187743 NR Description: putative NADH oxidoreductase [Zea mays]
  misc_feature (1)..(133): Homolog of NCBI NO: 15808990 NR Description: carcinoma related gene [Mus musculus] carcinoma related gene [Mus musculus] unnamed protein product [Mus musculus]
  misc_feature (1)..(133): Homolog of NCBI NO: 16151831 NR Description: F-LANa [Mus musculus]
  misc_feature (1)..(133): Homolog of NCBI NO: 26350675 NR Description: unnamed protein product [Mus musculus]
  misc_feature (1)..(154): Homolog of NCBI NO: 27573354 NR Description: putative Der1-like protein [Oryza sativa
  misc_feature (1)..(134): Homolog of NCBI NO: 35505512 NR Description: FLJ43842 protein [Homo sapiens]
  misc_feature (1)..(127): Homolog of NCBI NO: 15777933 NR Description: putative NADH oxidoreductase complex I subunit
  misc_feature (1)..(130): Homolog of NCBI NO: 34852394 NR Description: similar to carcinoma related gene [Rattus

SEQ ID NO: 98401 - protein, 169 aa, Arabidopsis thaliana; identical to SEQ ID NO: 47390
  peptide (1)..(169): Ceres Seq. ID no. 13593539
  misc_feature (1)..(105): Pfam Name: Der1-like family Pfam Description: Der1-like family
  misc_feature (1)..(169): Homolog of NCBI NO: 22329014 NR Description: expressed protein [Arabidopsis thaliana] unknown protein [Arabidopsis thaliana]
  misc_feature (1)..(169): Homolog of NCBI NO: 25407607 NR Description: hypothetical protein AT4g29330 [imported] - thaliana >gi|7269831|emb|CAB79691.1| putative protein
  misc_feature (1)..(139): Homolog of NCBI NO: 9187743 NR Description: putative NADH oxidoreductase [Zea mays]
  misc_feature (1)..(110): Homolog of NCBI NO: 15808990 NR Description: carcinoma related gene [Mus musculus] carcinoma related gene [Mus musculus] unnamed protein product [Mus musculus]
  misc_feature (1)..(110): Homolog of NCBI NO: 16151831 NR Description: F-LANa [Mus musculus]
  misc_feature (1)..(110): Homolog of NCBI NO: 26350675 NR Description: unnamed protein product [Mus musculus]
  misc_feature (1)..(131): Homolog of NCBI NO: 27573354 NR Description: putative Der1-like protein [Oryza sativa
  misc_feature (1)..(111): Homolog of NCBI NO: 35505512 NR Description: FLJ43842 protein [Homo sapiens]
  misc_feature (1)..(104): Homolog of NCBI NO: 15777933 NR Description: putative NADH oxidoreductase complex I subunit
  misc_feature (1)..(107): Homolog of NCBI NO: 34852394 NR Description: similar to carcinoma related gene [Rattus

SEQ ID NO: 98402 - DNA, 1386 bp, Arabidopsis thaliana
  misc_feature (1)..(1386): Ceres Seq. ID no. 13593549
  misc_feature: MA Experiment ID: 20000166 Result: Up-regulated in Transcription
  misc_feature: MA Experiment 20000166 PARAMETER Experiment Name: At_100uM_ABA_P Parameter: Age (day) Value: 14
  misc_feature: MA Experiment 20000166 PARAMETER Experiment Name: At_100uM_ABA_P Parameter: Organism Value: A. thaliana
  misc_feature: MA Experiment 20000166 PARAMETER Experiment Name: At_100uM_ABA_P Parameter: Plant Line Value: WS
  misc_feature: MA Experiment 20000166 PARAMETER Experiment Name: At_100uM_ABA_P Parameter: Timepoint (hr) Value: 1
  misc_feature: MA Experiment 20000166 PARAMETER Experiment Name: At_100uM_ABA_P Parameter: Tissue Value: Aerial
  misc_feature: MA Experiment 20000166 PARAMETER Experiment Name: At_100uM_ABA_P Parameter: Treatment Value: 100uM ABA vs. No Treatment
  misc_feature: MA Experiment ID: 20000173 Result: Down-regulated in Transcription
  misc_feature: MA Experiment 20000173 PARAMETER Experiment Name: At_42deg_Heat_P Parameter: Age (day) Value: 14
  misc_feature: MA Experiment 20000173 PARAMETER Experiment Name: At_42deg_Heat_P Parameter: Organism Value: A. thaliana
  misc_feature: MA Experiment 20000173 PARAMETER Experiment Name: At_42deg_Heat_P Parameter: Plant Line Value: WS
  misc_feature: MA Experiment 20000173 PARAMETER Experiment Name: At_42deg_Heat_P Parameter: Temperature (deg C) Value: 42 vs. 22
  misc_feature: MA Experiment 20000173 PARAMETER Experiment Name: At_42deg_Heat_P Parameter: Timepoint (hr) Value: 6
  misc_feature: MA Experiment 20000173 PARAMETER Experiment Name: At_42deg_Heat_P Parameter: Tissue Value: Aerial
  misc_feature: MA Experiment ID: 20000184 Result: Down-regulated in Transcription
  misc_feature: MA Experiment 20000184 PARAMETER Experiment Name: At_Shoots__P Parameter: Age (day) Value: 7
  misc_feature: MA Experiment 20000184 PARAMETER Experiment Name: At_Shoots__P Parameter: Tissue Value: Shoots vs. Whole Plant
  misc_feature: MA Experiment ID: 20000436 Result: Up-regulated in Transcription
  misc_feature: MA Experiment 20000436 PARAMETER Experiment Name: At_Drought_P Parameter: Age (day) Value: 7
  misc_feature: MA Experiment 20000436 PARAMETER Experiment Name: At_Drought_P Parameter: Organism Value: A. thaliana
  misc_feature: MA Experiment 20000436 PARAMETER Experiment Name: At_Drought_P Parameter: Plant Line Value: WS
  misc_feature: MA Experiment 20000436 PARAMETER Experiment Name: At_Drought_P Parameter: Timepoint (hr) Value: 12
  misc_feature: MA Experiment 20000436 PARAMETER Experiment Name: At_Drought_P Parameter: Tissue Value: Whole Plant
  misc_feature: MA Experiment 20000436 PARAMETER Experiment Name: At_Drought_P Parameter: Treatment Value: Drought vs. No Drought
  misc_feature: MA Experiment ID: 20000437 Result: Up-regulated in Transcription
  misc_feature: MA Experiment 20000437 PARAMETER Experiment Name: At_Drought_P Parameter: Age (day) Value: 8
  misc_feature: MA Experiment 20000437 PARAMETER Experiment Name: At_Drought_P Parameter: Organism Value: A. thaliana
  misc_feature: MA Experiment 20000437 PARAMETER Experiment Name: At_Drought_P Parameter: Plant Line Value: WS
  misc_feature: MA Experiment 20000437 PARAMETER Experiment Name: At_Drought_P Parameter: Timepoint (hr) Value: 24
  misc_feature: MA Experiment 20000437 PARAMETER Experiment Name: At_Drought_P Parameter: Tissue Value: Whole Plant
  misc_feature: MA Experiment 20000437 PARAMETER Experiment Name: At_Drought_P Parameter: Treatment Value: Drought vs. No Drought
ccaaaatctagggttttcttctcgcccaatttcacttttcttctacgaaattctccattcctgccggctgtcgggttttctgaatcgattctccttcaccaacttcttctctggttctgttcgattctgattttttttcaaggtcaattttttcttctctttaaactctgcaaaatcgtgatcgattaaattcacctcagggttttttgatttctgaaagaagttaatcttcttcgaaggcgattgcaaaagagtgctctgctgtgaatttccactgagatgcaatcaaaaccgggaagagaaaacgaagaggaagtcaataatcaccatgctgttcagcagccgatgatgtatgcagagccctggtggaaaaacaactcctttggtgttgtacctcaagcgagaccttctggaattccatcaaattcctcttctttggattgccccaatggttccgagtcaaacgatgttcattcagcatctgaagacggtgcgttgaatggtgaaaacgatggcacttggaaggattcacaagctgcaacttcctctcgttcagtagataatcacggaatggaaggaaatgacccagcgctctctatccgtaacatgcatgatcagccacttgtacaaccaccagagcttgttggacactatatcgcttgtgtcccaaacccatatcaggatccatattatgggggattgatgggagcatatggtcatcagcaattgggttttcgtccatatcttggaatgcctcgtgaaagaacagctctgccacttgacatggcacaagagcccgtttatgtgaatgcaaagcagtacgagggaattctaaggcgaagaaaagcacgtgccaaggcagagctagagaggaaagtcatccgggacagaaagccatatcttcacgagtcaagacacaagcatgcaatgagaagggcacgagcgagtggaggccggtttgcgaagaaaagtgaggtagaagcgggagaggatgcaggagggagagacagagaaaggggttcagcaaccaactcatcaggctctgaacaagttgagacagactctaatgagaccctgaattcttctggtgcaccataataaaaaaagccaaagctctgagaggagagagagacacacactttggctaatataatccattgcctcaaaccggcaaatcattcttggctttttcgtttttgtgtttgctagttgttcttgtcagagtctcatattgtgtgggtttaacagttatgatgaatgtacaaagagcgagttatgttaggtgttagattttggagacaagagacaaaggaatagcaagtaggtcttgtttttattctttgaccttttttttctcttttgcaaaattgaaaaatacgtttgctt

SEQ ID NO: 98403 - protein, 272 aa, Arabidopsis thaliana
  peptide (1)..(272): Ceres Seq. ID no. 13593550
  misc_feature (171)..(227): Pfam Name: CCAAT-binding transcription factor (CBF-B/NF-YA) Pfam Description: CCAAT-binding transcription factor
  misc_feature (1)..(272): Homolog of NCBI NO: 18416875 NR Description: CCAAT box binding factor/ transcription factor [Arabidopsis thaliana] >gi|11282597|pir||T49898 CCAAT box binding
  misc_feature (1)..(272): Homolog of NCBI NO: 30684143 NR Description: CCAAT box binding factor/ transcription factor [Arabidopsis thaliana] >gi|2398521|emb|CAA74048.1| transcription
  misc_feature (39)..(267): Homolog of NCBI NO: 9293997 NR Description: CCAAT-binding transcription factor B subunit
  misc_feature (39)..(267): Homolog of NCBI NO: 18402799 NR Description: CCAAT-binding factor B chain -related thaliana] >gi|15724232|gb|AAL06509.1|AF412056_1 AT3g20910/MFD22_2 thaliana] >gi|20334742|gb|AAM16232.1| AT3g20910/MFD22_2
  misc_feature (2)..(264): Homolog of NCBI NO: 1173618 NR Description: CCAAT-binding factor B subunit homolog
  misc_feature (2)..(264): Homolog of NCBI NO: 1586551 NR Description: CCAAT-binding factor:SUBUNIT=B
  misc_feature (2)..(264): Homolog of NCBI NO: 7488444 NR Description: CCAAT-binding factor B chain homolog (clone
  misc_feature (1)..(261): Homolog of NCBI NO: 27552556 NR Description: putative CCAAT-binding transcription factor
  misc_feature (54)..(272): Homolog of NCBI NO: 34395137 NR Description: putative transcription factor [Oryza sativa
  misc_feature (58)..(254): Homolog of NCBI NO: 38640734 NR Description: transcription factor WAPB [Triticum aestivum]
MQSKPGRENEEEVNNHHAVQQPMMYAEPWWKNNSFGVVPQARPSGIPSNSSSLDCPNGSESNDVHSASEDGALNGENDGTWKDSQAATSSRSVDNHGMEGNDPALSIRNMHDQPLVQPPELVGHYIACVPNPYQDPYYGGLMGAYGHQQLGFRPYLGMPRERTALPLDMAQEPVYVNAKQYEGILRRRKARAKAELERKVIRDRKPYLHESRHKHAMRRARASGGRFAKKSEVEAGEDAGGRDRERGSATNSSGSEQVETDSNETLNSSGAP

SEQ ID NO: 98404 - protein, 250 aa, Arabidopsis thaliana
  peptide (1)..(250): Ceres Seq. ID no. 13593551
  misc_feature (149)..(205): Pfam Name: CCAAT-binding transcription factor (CBF-B/NF-YA) Pfam Description: CCAAT-binding transcription factor
  misc_feature (1)..(250): Homolog of NCBI NO: 18416875 NR Description: CCAAT box binding factor/ transcription factor [Arabidopsis thaliana] >gi|11282597|pir||T49898 CCAAT box binding
  misc_feature (1)..(250): Homolog of NCBI NO: 30684143 NR Description: CCAAT box binding factor/ transcription factor [Arabidopsis thaliana] >gi|2398521|emb|CAA74048.1| transcription
  misc_feature (17)..(245): Homolog of NCBI NO: 9293997 NR Description: CCAAT-binding transcription factor B subunit
  misc_feature (17)..(245): Homolog of NCBI NO: 18402799 NR Description: CCAAT-binding factor B chain -related thaliana] >gi|15724232|gb|AAL06509.1|AF412056_1 AT3g20910/MFD22_2 thaliana] >gi|20334742|gb|AAM16232.1| AT3g20910/MFD22_2
  misc_feature (1)..(242): Homolog of NCBI NO: 1173618 NR Description: CCAAT-binding factor B subunit homolog
  misc_feature (1)..(242): Homolog of NCBI NO: 1586551 NR Description: CCAAT-binding factor:SUBUNIT=B
  misc_feature (1)..(242): Homolog of NCBI NO: 7488444 NR Description: CCAAT-binding factor B chain homolog (clone
  misc_feature (1)..(239): Homolog of NCBI NO: 27552556 NR Description: putative CCAAT-binding transcription factor
  misc_feature (32)..(250): Homolog of NCBI NO: 34395137 NR Description: putative transcription factor [Oryza sativa
  misc_feature (36)..(232): Homolog of NCBI NO: 38640734 NR Description: transcription factor WAPB [Triticum aestivum]
MMYAEPWWKNNSFGVVPQARPSGIPSNSSSLDCPNGSESNDVHSASEDGALNGENDGTWKDSQAATSSRSVDNHGMEGNDPALSIRNMHDQPLVQPPELVGHYIACVPNPYQDPYYGGLMGAYGHQQLGFRPYLGMPRERTALPLDMAQEPVYVNAKQYEGILRRRKARAKAELERKVIRDRKPYLHESRHKHAMRRARASGGRFAKKSEVEAGEDAGGRDRERGSATNSSGSEQVETDSNETLNSSGAP

SEQ ID NO: 98405 - protein, 249 aa, Arabidopsis thaliana
  peptide (1)..(249): Ceres Seq. ID no. 13593552
  misc_feature (148)..(204): Pfam Name: CCAAT-binding transcription factor (CBF-B/NF-YA) Pfam Description: CCAAT-binding transcription factor
  misc_feature (1)..(249): Homolog of NCBI NO: 18416875 NR Description: CCAAT box binding factor/ transcription factor [Arabidopsis thaliana] >gi|11282597|pir||T49898 CCAAT box binding
  misc_feature (1)..(249): Homolog of NCBI NO: 30684143 NR Description: CCAAT box binding factor/ transcription factor [Arabidopsis thaliana] >gi|2398521|emb|CAA74048.1| transcription
  misc_feature (16)..(244): Homolog of NCBI NO: 9293997 NR Description: CCAAT-binding transcription factor B subunit
  misc_feature (16)..(244): Homolog of NCBI NO: 18402799 NR Description: CCAAT-binding factor B chain -related thaliana] >gi|15724232|gb|AAL06509.1|AF412056_1 AT3g20910/MFD22_2 thaliana] >gi|20334742|gb|AAM16232.1| AT3g20910/MFD22_2
  misc_feature (1)..(241): Homolog of NCBI NO: 1173618 NR Description: CCAAT-binding factor B subunit homolog
  misc_feature (1)..(241): Homolog of NCBI NO: 1586551 NR Description: CCAAT-binding factor:SUBUNIT=B
  misc_feature (1)..(241): Homolog of NCBI NO: 7488444 NR Description: CCAAT-binding factor B chain homolog (clone
  misc_feature (1)..(238): Homolog of NCBI NO: 27552556 NR Description: putative CCAAT-binding transcription factor
  misc_feature (31)..(249): Homolog of NCBI NO: 34395137 NR Description: putative transcription factor [Oryza sativa
  misc_feature (35)..(231): Homolog of NCBI NO: 38640734 NR Description: transcription factor WAPB [Triticum aestivum]
MYAEPWWKNNSFGVVPQARPSGIPSNSSSLDCPNGSESNDVHSASEDGALNGENDGTWKDSQAATSSRSVDNHGMEGNDPALSIRNMHDQPLVQPPELVGHYIACVPNPYQDPYYGGLMGAYGHQQLGFRPYLGMPRERTALPLDMAQEPVYVNAKQYEGILRRRKARAKAELERKVIRDRKPYLHESRHKHAMRRARASGGRFAKKSEVEAGEDAGGRDRERGSATNSSGSEQVETDSNETLNSSGAP

SEQ ID NO: 98406 - DNA, 1556 bp, Arabidopsis thaliana
  misc_feature (1)..(1556): Ceres Seq. ID no. 13593553
  misc_feature: MA Experiment ID: 20000184 Result: Down-regulated in Transcription
  misc_feature: MA Experiment 20000184 PARAMETER Experiment Name: At_Shoots__P Parameter: Age (day) Value: 7
  misc_feature: MA Experiment 20000184 PARAMETER Experiment Name: At_Shoots__P Parameter: Tissue Value: Shoots vs. Whole Plant
  misc_feature: MA Experiment ID: 20000234 Result: Down-regulated in Transcription
  misc_feature: MA Experiment 20000234 PARAMETER Experiment Name: At_Siliques_P Parameter: Age (day) Value: 21
  misc_feature: MA Experiment 20000234 PARAMETER Experiment Name: At_Siliques_P Parameter: Organism Value: A. thaliana
  misc_feature: MA Experiment 20000234 PARAMETER Experiment Name: At_Siliques_P Parameter: Plant Line Value: WS
  misc_feature: MA Experiment 20000234 PARAMETER Experiment Name: At_Siliques_P Parameter: Tissue Value: Less Than 5mm Siliques vs. Whole Plant
  misc_feature: MA Experiment ID: 20000235 Result: Down-regulated in Transcription
  misc_feature: MA Experiment 20000235 PARAMETER Experiment Name: At_Siliques_P Parameter: Age (day) Value: 21
  misc_feature: MA Experiment 20000235 PARAMETER Experiment Name: At_Siliques_P Parameter: Organism Value: A. thaliana
  misc_feature: MA Experiment 20000235 PARAMETER Experiment Name: At_Siliques_P Parameter: Plant Line Value: WS
  misc_feature: MA Experiment 20000235 PARAMETER Experiment Name: At_Siliques_P Parameter: Tissue Value: 5-10mm Siliques vs. Whole Plant
  misc_feature: MA Experiment ID: 20000451 Result: Up-regulated in Transcription
  misc_feature: MA Experiment 20000451 PARAMETER Experiment Name: At_CS6879_Shoots-Roots_P Parameter: Age (day) Value: 14
  misc_feature: MA Experiment 20000451 PARAMETER Experiment Name: At_CS6879_Shoots-Roots_P Parameter: Organism Value: A. thaliana
  misc_feature: MA Experiment 20000451 PARAMETER Experiment Name: At_CS6879_Shoots-Roots_P Parameter: Plant Line Value: CS6879 vs. WS
  misc_feature: MA Experiment 20000451 PARAMETER Experiment Name: At_CS6879_Shoots-Roots_P Parameter: Tissue Value: Roots
  misc_feature: MA Experiment ID: 20000573 Result: Down-regulated in Transcription
  misc_feature: MA Experiment 20000573 PARAMETER Experiment Name: At_100uM_ABA_Mutants__P Parameter: Organism Value: A. thaliana
  misc_feature: MA Experiment 20000573 PARAMETER Experiment Name: At_100uM_ABA_Mutants__P Parameter: Plant Line Value: CS22 vs. Ler wt
  misc_feature: MA Experiment 20000573 PARAMETER Experiment Name: At_100uM_ABA_Mutants__P Parameter: Timepoint (hr) Value: N/A
  misc_feature: MA Experiment 20000573 PARAMETER Experiment Name: At_100uM_ABA_Mutants__P Parameter: Tissue Value: Whole Plant
  misc_feature: MA Experiment 20000573 PARAMETER Experiment Name: At_100uM_ABA_Mutants__P Parameter: Treatment Value: None
  misc_feature: MA Experiment ID: 20000574 Result: Down-regulated in Transcription
  misc_feature: MA Experiment 20000574 PARAMETER Experiment Name: At_100uM_ABA_Mutants__P Parameter: Organism Value: A. thaliana
  misc_feature: MA Experiment 20000574 PARAMETER Experiment Name: At_100uM_ABA_Mutants__P Parameter: Plant Line Value: CS23 vs. Ler wt
  misc_feature: MA Experiment 20000574 PARAMETER Experiment Name: At_100uM_ABA_Mutants__P Parameter: Timepoint (hr) Value: N/A
  misc_feature: MA Experiment 20000574 PARAMETER Experiment Name: At_100uM_ABA_Mutants__P Parameter: Tissue Value: Whole Plant
  misc_feature: MA Experiment 20000574 PARAMETER Experiment Name: At_100uM_ABA_Mutants__P Parameter: Treatment Value: None
gaacgacgtcgtcttttcttctccgattagcgtcggtcgtcttcttcgtcttctctctgtcgctgatctgggttttgcttcaacgtgaaacatctttgaggttgatgatgaggtttctgtttacttaatatcctgtgagagaaaactcttcttgacttgagtgttgctgacaaaaacgtataggtatatgtacatttgttttcgctgaggctaaagatggataagcttcttgagaatcatcagtttgcgacacatgccatcgctgcctcggcctctgtctcgttaggaactgctctcgcttatcctttagataccatcaaaaccattatccaggttggttcaggacccaataagaaattaagctcctttcaagtttttaatagagttcttcgattctctggctattcaggtctgtacagtggtcttggatcgttaactttaggaagaatttctggttttggtgcaaggtttggtgtctatgagattctaacagctttctacaaagatggtcgacatgataactacgtgagtgttggtgaagcttttctggctggtctggtgggaggtgcagcagaaacagtgatgacttctccatttgagctaatcaaagtccgaaaacaagtgactgctgcatcacgggctccaaatgcttccgctgttgcagagaccgcaccggtctcacccatgatcacaaaactgctaagaagatacactcttgatgtaaagtcattgacacaaacagtcagtctcttatccgtcttaaatcacaaacacccaaacatgacagctgctttgcaagagtacccttggatgatgactggaacaggaaacccaccatcagccatggatgttaagagaccgctcgatgttgcatcacttgaaggatatagagctttatggaggaatctacgttcaggtcttataagagattgtatttacggtggagtattcttttcaacatggcagtttcttcacgaggcaatggtcggttggaaagctgttgggatgaatcctctgcccagttctgaagaagaagttggacctttatctccggtagccattagccttgctgctgggatatctggtgccgttgcagctgcagcatcacatagctttgacacagcaagaacacgtgcacagtgtgtaatattgccaaagtatacagcaaaggagaggaagtttctaaaatggaataaaccagggaagagattagagagatggacaggaatccatcctacagacagaaatctcttgttccgaggtattgggatgaggatggctcgaagctctgttgcatcgactgtgatcgtaggaagctattacttagctgtcgatttattggttcccaagtgagaaaacaaacaatcacataagcctacaaatctgtctttagatcagattaacgataccgcaatagtgattgttttttagtagcctgcgttttgttatacagttaacagagaaatcatatgtgagtttttctcaatactctgaaataaataattaacatcattggctgtatctgtaagtttgatgattacaaattatcaatttcc

SEQ ID NO: 98407 - protein, 378 aa, Arabidopsis thaliana
  peptide (1)..(378): Ceres Seq. ID no. 13593554
  misc_feature (278)..(378): Pfam Name: Mitochondrial carrier protein Pfam Description: Mitochondrial carrier protein
  misc_feature (1)..(378): Homolog of NCBI NO: 18414359 NR Description: mitochondrial carrier protein family [Arabidopsis >gi|15451218|gb|AAK96880.1| Unknown protein [Arabidopsis
  misc_feature (1)..(373): Homolog of NCBI NO: 38344448 NR Description: OSJNBa0038O10.20 [Oryza sativa (japonica
  misc_feature (56)..(268): Homolog of NCBI NO: 25343854 NR Description: hypothetical protein dl3547c [imported] - thaliana >gi|5302777|emb|CAB46055.1| hypothetical protein thaliana] >gi|7268247|emb|CAB78543.1| hypothetical protein
  misc_feature (56)..(241): Homolog of NCBI NO: 7485091 NR Description: hypothetical protein - Arabidopsis thaliana
  misc_feature (1)..(224): Homolog of NCBI NO: 7485091 NR Description: hypothetical protein - Arabidopsis thaliana
  misc_feature (1)..(224): Homolog of NCBI NO: 25343854 NR Description: hypothetical protein dl3547c [imported] - thaliana >gi|5302777|emb|CAB46055.1| hypothetical protein thaliana] >gi|7268247|emb|CAB78543.1| hypothetical protein
  misc_feature (12)..(140): Homolog of NCBI NO: 28828299 NR Description: similar to Mus musculus (Mouse). Calcium-binding carrier protein Aralar2 (Solute carrier family 25, member 13)
  misc_feature (212)..(308): Homolog of NCBI NO: 28828299 NR Description: similar to Mus musculus (Mouse). Calcium-binding carrier protein Aralar2 (Solute carrier family 25, member 13)
  misc_feature (223)..(370): Homolog of NCBI NO: 27807213 NR Description: solute carrier family 25, member 16; carrier; human : Graves disease autoantigen [Bos taurus] Grave's disease carrier protein (GDC) (Mitochondrial solute
  misc_feature (25)..(133): Homolog of NCBI NO: 27807213 NR Description: solute carrier family 25, member 16; carrier; human : Graves disease autoantigen [Bos taurus] Grave's disease carrier protein (GDC) (Mitochondrial solute
MDKLLENHQFATHAIAASASVSLGTALAYPLDTIKTIIQVGSGPNKKLSSFQVFNRVLRFSGYSGLYSGLGSLTLGRISGFGARFGVYEILTAFYKDGRHDNYVSVGEAFLAGLVGGAAETVMTSPFELIKVRKQVTAASRAPNASAVAETAPVSPMITKLLRRYTLDVKSLTQTVSLLSVLNHKHPNMTAALQEYPWMMTGTGNPPSAMDVKRPLDVASLEGYRALWRNLRSGLIRDCIYGGVFFSTWQFLHEAMVGWKAVGMNPLPSSEEEVGPLSPVAISLAAGISGAVAAAASHSFDTARTRAQCVILPKYTAKERKFLKWNKPGKRLERWTGIHPTDRNLLFRGIGMRMARSSVASTVIVGSYYLAVDLLVPK

SEQ ID NO: 98408 - protein, 256 aa, Arabidopsis thaliana
  peptide (1)..(256): Ceres Seq. ID no. 13593555
  misc_feature (156)..(256): Pfam Name: Mitochondrial carrier protein Pfam Description: Mitochondrial carrier protein
  misc_feature (1)..(256): Homolog of NCBI NO: 18414359 NR Description: mitochondrial carrier protein family [Arabidopsis >gi|15451218|gb|AAK96880.1| Unknown protein [Arabidopsis
  misc_feature (1)..(251): Homolog of NCBI NO: 38344448 NR Description: OSJNBa0038O10.20 [Oryza sativa (japonica
  misc_feature (1)..(146): Homolog of NCBI NO: 25343854 NR Description: hypothetical protein dl3547c [imported] - thaliana >gi|5302777|emb|CAB46055.1| hypothetical protein thaliana] >gi|7268247|emb|CAB78543.1| hypothetical protein
  misc_feature (1)..(119): Homolog of NCBI NO: 7485091 NR Description: hypothetical protein - Arabidopsis thaliana
  misc_feature (1)..(102): Homolog of NCBI NO: 7485091 NR Description: hypothetical protein - Arabidopsis thaliana
  misc_feature (1)..(102): Homolog of NCBI NO: 25343854 NR Description: hypothetical protein dl3547c [imported] - thaliana >gi|5302777|emb|CAB46055.1| hypothetical protein thaliana] >gi|7268247|emb|CAB78543.1| hypothetical protein
  misc_feature (1)..(18): Homolog of NCBI NO: 28828299 NR Description: similar to Mus musculus (Mouse). Calcium-binding carrier protein Aralar2 (Solute carrier family 25, member 13)
  misc_feature (90)..(186): Homolog of NCBI NO: 28828299 NR Description: similar to Mus musculus (Mouse). Calcium-binding carrier protein Aralar2 (Solute carrier family 25, member 13)
  misc_feature (101)..(248): Homolog of NCBI NO: 27807213 NR Description: solute carrier family 25, member 16; carrier; human : Graves disease autoantigen [Bos taurus] Grave's disease carrier protein (GDC) (Mitochondrial solute
  misc_feature (1)..(11): Homolog of NCBI NO: 27807213 NR Description: solute carrier family 25, member 16; carrier; human : Graves disease autoantigen [Bos taurus] Grave's disease carrier protein (GDC) (Mitochondrial solute
MTSPFELIKVRKQVTAASRAPNASAVAETAPVSPMITKLLRRYTLDVKSLTQTVSLLSVLNHKHPNMTAALQEYPWMMTGTGNPPSAMDVKRPLDVASLEGYRALWRNLRSGLIRDCIYGGVFFSTWQFLHEAMVGWKAVGMNPLPSSEEEVGPLSPVAISLAAGISGAVAAAASHSFDTARTRAQCVILPKYTAKERKFLKWNKPGKRLERWTGIHPTDRNLLFRGIGMRMARSSVASTVIVGSYYLAVDLLVPK

SEQ ID NO: 98409 - protein, 222 aa, Arabidopsis thaliana
  peptide (1)..(222): Ceres Seq. ID no. 13593556
  misc_feature (122)..(222): Pfam Name: Mitochondrial carrier protein Pfam Description: Mitochondrial carrier protein
  misc_feature (1)..(222): Homolog of NCBI NO: 18414359 NR Description: mitochondrial carrier protein family [Arabidopsis >gi|15451218|gb|AAK96880.1| Unknown protein [Arabidopsis
  misc_feature (1)..(217): Homolog of NCBI NO: 38344448 NR Description: OSJNBa0038O10.20 [Oryza sativa (japonica
  misc_feature (1)..(112): Homolog of NCBI NO: 25343854 NR Description: hypothetical protein dl3547c [imported] - thaliana >gi|5302777|emb|CAB46055.1| hypothetical protein thaliana] >gi|7268247|emb|CAB78543.1| hypothetical protein
  misc_feature (1)..(85): Homolog of NCBI NO: 7485091 NR Description: hypothetical protein - Arabidopsis thaliana
  misc_feature (1)..(68): Homolog of NCBI NO: 7485091 NR Description: hypothetical protein - Arabidopsis thaliana
  misc_feature (1)..(68): Homolog of NCBI NO: 25343854 NR Description: hypothetical protein dl3547c [imported] - thaliana >gi|5302777|emb|CAB46055.1| hypothetical protein thaliana] >gi|7268247|emb|CAB78543.1| hypothetical protein
  misc_feature (56)..(152): Homolog of NCBI NO: 28828299 NR Description: similar to Mus musculus (Mouse). Calcium-binding carrier protein Aralar2 (Solute carrier family 25, member 13)
  misc_feature (67)..(214): Homolog of NCBI NO: 27807213 NR Description: solute carrier family 25, member 16; carrier; human : Graves disease autoantigen [Bos taurus] Grave's disease carrier protein (GDC) (Mitochondrial solute
MITKLLRRYTLDVKSLTQTVSLLSVLNHKHPNMTAALQEYPWMMTGTGNPPSAMDVKRPLDVASLEGYRALWRNLRSGLIRDCIYGGVFFSTWQFLHEAMVGWKAVGMNPLPSSEEEVGPLSPVAISLAAGISGAVAAAASHSFDTARTRAQCVILPKYTAKERKFLKWNKPGKRLERWTGIHPTDRNLLFRGIGMRMARSSVASTVIVGSYYLAVDLLVPK

SEQ ID NO: 98410 - DNA, 1650 bp, Arabidopsis thaliana
  misc_feature (1)..(1650): Ceres Seq. ID no. 13593565
  misc_feature: MA Experiment ID: 20000169 Result: Up-regulated in Transcription
  misc_feature: MA Experiment 20000169 PARAMETER Experiment Name: At_100uM_ABA_P Parameter: Age (day) Value: 14
  misc_feature: MA Experiment 20000169 PARAMETER Experiment Name: At_100uM_ABA_P Parameter: Organism Value: A. thaliana
  misc_feature: MA Experiment 20000169 PARAMETER Experiment Name: At_100uM_ABA_P Parameter: Plant Line Value: WS
  misc_feature: MA Experiment 20000169 PARAMETER Experiment Name: At_100uM_ABA_P Parameter: Timepoint (hr) Value: 6
  misc_feature: MA Experiment 20000169 PARAMETER Experiment Name: At_100uM_ABA_P Parameter: Tissue Value: Aerial
  misc_feature: MA Experiment 20000169 PARAMETER Experiment Name: At_100uM_ABA_P Parameter: Treatment Value: 100uM ABA vs. No Treatment
  misc_feature: MA Experiment ID: 20000173 Result: Down-regulated in Transcription
  misc_feature: MA Experiment 20000173 PARAMETER Experiment Name: At_42deg_Heat_P Parameter: Age (day) Value: 14
  misc_feature: MA Experiment 20000173 PARAMETER Experiment Name: At_42deg_Heat_P Parameter: Organism Value: A. thaliana
  misc_feature: MA Experiment 20000173 PARAMETER Experiment Name: At_42deg_Heat_P Parameter: Plant Line Value: WS
  misc_feature: MA Experiment 20000173 PARAMETER Experiment Name: At_42deg_Heat_P Parameter: Temperature (deg C) Value: 42 vs. 22
  misc_feature: MA Experiment 20000173 PARAMETER Experiment Name: At_42deg_Heat_P Parameter: Timepoint (hr) Value: 6
  misc_feature: MA Experiment 20000173 PARAMETER Experiment Name: At_42deg_Heat_P Parameter: Tissue Value: Aerial
  misc_feature: MA Experiment ID: 20000184 Result: Down-regulated in Transcription
  misc_feature: MA Experiment 20000184 PARAMETER Experiment Name: At_Shoots__P Parameter: Age (day) Value: 7
  misc_feature: MA Experiment 20000184 PARAMETER Experiment Name: At_Shoots__P Parameter: Tissue Value: Shoots vs. Whole Plant
  misc_feature: MA Experiment ID: 20000227 Result: Down-regulated in Transcription
  misc_feature: MA Experiment 20000227 PARAMETER Experiment Name: At_Root-Tips-vs-Tops_P Parameter: Tissue Value: Root Tips vs. Root Tops
  misc_feature: MA Experiment ID: 20000438 Result: Down-regulated in Transcription
  misc_feature: MA Experiment 20000438 PARAMETER Experiment Name: At_Shoots__P Parameter: Age (day) Value: 14
  misc_feature: MA Experiment 20000438 PARAMETER Experiment Name: At_Shoots__P Parameter: Tissue Value: Shoots vs. Whole Plant
  misc_feature: MA Experiment ID: 20001247 Result: Down-regulated in Transcription
  misc_feature: MA Experiment 20001247 PARAMETER Experiment Name: At_Far-red-induction_P Parameter: Age (day) Value: 7
  misc_feature: MA Experiment 20001247 PARAMETER Experiment Name: At_Far-red-induction_P Parameter: Light Value: Far-red vs. White
  misc_feature: MA Experiment 20001247 PARAMETER Experiment Name: At_Far-red-induction_P Parameter: Organism Value: A. thaliana
  misc_feature: MA Experiment 20001247 PARAMETER Experiment Name: At_Far-red-induction_P Parameter: Plant Line Value: Columbia
  misc_feature: MA Experiment 20001247 PARAMETER Experiment Name: At_Far-red-induction_P Parameter: Timepoint (hr) Value: 1
  misc_feature: MA Experiment 20001247 PARAMETER Experiment Name: At_Far-red-induction_P Parameter: Tissue Value: Whole Plant
  misc_feature: MA Experiment ID: 20001248 Result: Down-regulated in Transcription
  misc_feature: MA Experiment 20001248 PARAMETER Experiment Name: At_Far-red-induction_P Parameter: Age (day) Value: 7
  misc_feature: MA Experiment 20001248 PARAMETER Experiment Name: At_Far-red-induction_P Parameter: Light Value: Far-red vs. White
  misc_feature: MA Experiment 20001248 PARAMETER Experiment Name: At_Far-red-induction_P Parameter: Organism Value: A. thaliana
  misc_feature: MA Experiment 20001248 PARAMETER Experiment Name: At_Far-red-induction_P Parameter: Plant Line Value: Columbia
  misc_feature: MA Experiment 20001248 PARAMETER Experiment Name: At_Far-red-induction_P Parameter: Timepoint (hr) Value: 4
  misc_feature: MA Experiment 20001248 PARAMETER Experiment Name: At_Far-red-induction_P Parameter: Tissue Value: Whole Plant
  misc_feature: MA Experiment ID: 20001451 Result: Down-regulated in Transcription
  misc_feature: MA Experiment 20001451 PARAMETER Experiment Name: At_Far-red-induction_P Parameter: Age (day) Value: 7
  misc_feature: MA Experiment 20001451 PARAMETER Experiment Name: At_Far-red-induction_P Parameter: Light Value: Far-red vs. White
  misc_feature: MA Experiment 20001451 PARAMETER Experiment Name: At_Far-red-induction_P Parameter: Organism Value: A. thaliana
  misc_feature: MA Experiment 20001451 PARAMETER Experiment Name: At_Far-red-induction_P Parameter: Plant Line Value: Columbia
  misc_feature: MA Experiment 20001451 PARAMETER Experiment Name: At_Far-red-induction_P Parameter: Timepoint (hr) Value: 24
  misc_feature: MA Experiment 20001451 PARAMETER Experiment Name: At_Far-red-induction_P Parameter: Tissue Value: Whole Plant
acagttctcatgctaaaccatattttttgctctctgttccttcaaaatcatttctttctcttctttgattcccaaagatcacttctttgtctttgatttttgattttttttctctctggcgtgaaggaagaagctttatttcatggagtctctgctctctagttcttctcttgtttccgctgctggtgggttttgttggaagaagcagaatctaaagctccactctttatcagaaatccgagttctgcgttgtgattcgagtaaagttgtcgcaaaaccgaagtttaggaacaatcttgttaggcctgatggtcaaggatcttcattgttgttgtatccaaaacataagtcgagatttcgggttaatgccactgcgggtcagcctgaggctttcgactcgaatagcaaacagaagtcttttagagactcgttagatgcgttttacaggttttctaggcctcatacagttattggcacagtgcttagcattttatctgtatctttcttagcagtagagaaggtttctgatatatctcctttacttttcactggcatcttggaggctgttgttgcagctctcatgatgaacatttacatagttgggctaaatcagttgtctgatgttgaaatagataaggttaacaagccctatcttccattggcatcaggagaatattctgttaacaccggcattgcaatagtagcttccttctccatcatgagtttctggcttgggtggattgttggttcatggccattgttctgggctctttttgtgagtttcatgctcggtactgcatactctatcaatttgccacttttacggtggaaaagatttgcattggttgcagcaatgtgtatcctcgctgtccgagctattattgttcaaatcgccttttatctacatattcagacacatgtgtttggaagaccaatcttgttcactaggcctcttattttcgccactgcgtttatgagctttttctctgtcgttattgcattgtttaaggatatacctgatatcgaaggggataagatattcggaatccgatcattctctgtaactctgggtcagaaacgggtgttttggacatgtgttacactacttcaaatggcttacgctgttgcaattctagttggagccacatctccattcatatggagcaaagtcatctcggttgtgggtcatgttatactcgcaacaactttgtgggctcgagctaagtccgttgatctgagtagcaaaaccgaaataacttcatgttatatgttcatatggaagctcttttatgcagagtacttgctgttaccttttttgaagtgactgacattagaagagaagaagatggagataaaagaataagtcatcactatgcttctgtttttattacaagttcatgaaattaggtagtgaactagtgaattagagttttattctgaaacatggcagactgcaaaaatatgtcaaagatatgaatttctgttgggtaaagaagtctctgcttgggcaaaatcttaaggttcggtgtgttgatataatgctaagcgaagaaatcgattctatgtagaaatttccgaaactatgtgtaaacatgtcagaacatctccattctatatcttcttctgcaagaaagctctgtttttatcacc

SEQ ID NO: 98411 - protein, 393 aa, Arabidopsis thaliana; identical to SEQ ID NO: 47454
  peptide (1)..(393): Ceres Seq. ID no. 13593566
  misc_feature (106)..(392): Pfam Name: UbiA prenyltransferase family Pfam Description: UbiA prenyltransferase family
  misc_feature (1)..(393): Homolog of NCBI NO: 30680535 NR Description: tocopherol polyprenyltransferase (homogentisate (tocopherol phytyltransferase) [Arabidopsis thaliana] tocopherol polyprenyltransferase [Arabidopsis thaliana]
  misc_feature (270)..(381): Homolog of NCBI NO: 7485781 NR Description: hypothetical protein F19F24.15 - Arabidopsis >gi|3004556|gb|AAC09029.1| (AC003673) hypothetical protein
  misc_feature (115)..(223): Homolog of NCBI NO: 7485781 NR Description: hypothetical protein F19F24.15 - Arabidopsis >gi|3004556|gb|AAC09029.1| (AC003673) hypothetical protein
  misc_feature (84)..(393): Homolog of NCBI NO: 33391142 NR Description: homogentisic acid geranylgeranyl transferase
  misc_feature (97)..(393): Homolog of NCBI NO: 33391138 NR Description: homogentisic acid geranylgeranyl transferase
  misc_feature (73)..(393): Homolog of NCBI NO: 33391144 NR Description: homogentisic acid geranylgeranyl transferase
  misc_feature (91)..(390): Homolog of NCBI NO: 23125851 NR Description: hypothetical protein [Nostoc punctiforme]
  misc_feature (96)..(390): Homolog of NCBI NO: 16330366 NR Description: unknown protein [Synechocystis sp. PCC 6803]
  misc_feature (90)..(390): Homolog of NCBI NO: 17230940 NR Description: hypothetical protein [Nostoc sp. PCC 7120]
  misc_feature (96)..(390): Homolog of NCBI NO: 37519852 NR Description: unknown protein [Gloeobacter violaceus]

SEQ ID NO: 98412 - protein, 247 aa, Arabidopsis thaliana; identical to SEQ ID NO: 47455
  peptide (1)..(247): Ceres Seq. ID no. 13593567
  misc_feature (1)..(246): Pfam Name: UbiA prenyltransferase family Pfam Description: UbiA prenyltransferase family
  misc_feature (1)..(247): Homolog of NCBI NO: 30680535 NR Description: tocopherol polyprenyltransferase (homogentisate (tocopherol phytyltransferase) [Arabidopsis thaliana] tocopherol polyprenyltransferase [Arabidopsis thaliana]
  misc_feature (124)..(235): Homolog of NCBI NO: 7485781 NR Description: hypothetical protein F19F24.15 - Arabidopsis >gi|3004556|gb|AAC09029.1| (AC003673) hypothetical protein
  misc_feature (1)..(77): Homolog of NCBI NO: 7485781 NR Description: hypothetical protein F19F24.15 - Arabidopsis >gi|3004556|gb|AAC09029.1| (AC003673) hypothetical protein
  misc_feature (1)..(247): Homolog of NCBI NO: 33391142 NR Description: homogentisic acid geranylgeranyl transferase
  misc_feature (1)..(247): Homolog of NCBI NO: 33391138 NR Description: homogentisic acid geranylgeranyl transferase
  misc_feature (1)..(247): Homolog of NCBI NO: 33391144 NR Description: homogentisic acid geranylgeranyl transferase
  misc_feature (1)..(244): Homolog of NCBI NO: 23125851 NR Description: hypothetical protein [Nostoc punctiforme]
  misc_feature (1)..(244): Homolog of NCBI NO: 16330366 NR Description: unknown protein [Synechocystis sp. PCC 6803]
  misc_feature (1)..(244): Homolog of NCBI NO: 17230940 NR Description: hypothetical protein [Nostoc sp. PCC 7120]
  misc_feature (1)..(244): Homolog of NCBI NO: 37519852 NR Description: unknown protein [Gloeobacter violaceus]

SEQ ID NO: 98413 - protein, 246 aa, Arabidopsis thaliana; identical to SEQ ID NO: 47456
  peptide (1)..(246): Ceres Seq. ID no. 13593568
  misc_feature (1)..(245): Pfam Name: UbiA prenyltransferase family Pfam Description: UbiA prenyltransferase family
  misc_feature (1)..(246): Homolog of NCBI NO: 30680535 NR Description: tocopherol polyprenyltransferase (homogentisate (tocopherol phytyltransferase) [Arabidopsis thaliana] tocopherol polyprenyltransferase [Arabidopsis thaliana]
  misc_feature (123)..(234): Homolog of NCBI NO: 7485781 NR Description: hypothetical protein F19F24.15 - Arabidopsis >gi|3004556|gb|AAC09029.1| (AC003673) hypothetical protein
  misc_feature (1)..(76): Homolog of NCBI NO: 7485781 NR Description: hypothetical protein F19F24.15 - Arabidopsis >gi|3004556|gb|AAC09029.1| (AC003673) hypothetical protein
  misc_feature (1)..(246): Homolog of NCBI NO: 33391142 NR Description: homogentisic acid geranylgeranyl transferase
  misc_feature (1)..(246): Homolog of NCBI NO: 33391138 NR Description: homogentisic acid geranylgeranyl transferase
  misc_feature (1)..(246): Homolog of NCBI NO: 33391144 NR Description: homogentisic acid geranylgeranyl transferase
  misc_feature (1)..(243): Homolog of NCBI NO: 23125851 NR Description: hypothetical protein [Nostoc punctiforme]
  misc_feature (1)..(243): Homolog of NCBI NO: 16330366 NR Description: unknown protein [Synechocystis sp. PCC 6803]
  misc_feature (1)..(243): Homolog of NCBI NO: 17230940 NR Description: hypothetical protein [Nostoc sp. PCC 7120]
  misc_feature (1)..(243): Homolog of NCBI NO: 37519852 NR Description: unknown protein [Gloeobacter violaceus]

SEQ ID NO: 98414 - DNA, 1074 bp, Arabidopsis thaliana
  misc_feature (1)..(1074): Ceres Seq. ID no. 13593579
  misc_feature: MA Experiment ID: 20000171 Result: Up-regulated in Transcription
  misc_feature: MA Experiment 20000171 PARAMETER Experiment Name: At_42deg_Heat_P Parameter: Age (day) Value: 14
  misc_feature: MA Experiment 20000171 PARAMETER Experiment Name: At_42deg_Heat_P Parameter: Organism Value: A. thaliana
  misc_feature: MA Experiment 20000171 PARAMETER Experiment Name: At_42deg_Heat_P Parameter: Plant Line Value: WS
  misc_feature: MA Experiment 20000171 PARAMETER Experiment Name: At_42deg_Heat_P Parameter: Temperature (deg C) Value: 42 vs. 22
  misc_feature: MA Experiment 20000171 PARAMETER Experiment Name: At_42deg_Heat_P Parameter: Timepoint (hr) Value: 1
  misc_feature: MA Experiment 20000171 PARAMETER Experiment Name: At_42deg_Heat_P Parameter: Tissue Value: Aerial
  misc_feature: MA Experiment ID: 20000185 Result: Down-regulated in Transcription
  misc_feature: MA Experiment 20000185 PARAMETER Experiment Name: At_Roots__P Parameter: Age (day) Value: 7 vs. 21
  misc_feature: MA Experiment 20000185 PARAMETER Experiment Name: At_Roots__P Parameter: Organism Value: A. thaliana
  misc_feature: MA Experiment 20000185 PARAMETER Experiment Name: At_Roots__P Parameter: Tissue Value: Roots vs. Whole Plant
  misc_feature: MA Experiment ID: 20000265 Result: Up-regulated in Transcription
  misc_feature: MA Experiment 20000265 PARAMETER Experiment Name: At_Open_Flower_P Parameter: Age (day) Value: 21
  misc_feature: MA Experiment 20000265 PARAMETER Experiment Name: At_Open_Flower_P Parameter: Plant Line Value: WS
  misc_feature: MA Experiment 20000265 PARAMETER Experiment Name: At_Open_Flower_P Parameter: Tissue Value: Closed Flower vs. Whole Plant
  misc_feature: MA Experiment ID: 20000438 Result: Up-regulated in Transcription
  misc_feature: MA Experiment 20000438 PARAMETER Experiment Name: At_Shoots__P Parameter: Age (day) Value: 14
  misc_feature: MA Experiment 20000438 PARAMETER Experiment Name: At_Shoots__P Parameter: Tissue Value: Shoots vs. Whole Plant
atgtataagaatcagttgcaagagcttgcacagaggagttgtttcagtctcccatcatatacatgcacaagagaaggaccagatcatgctccaagattcaaagctagtgtaaacttcaatggtgagatatttgaaagcccaacttactgttctactctcagacaagctgagcattcagctgctgaagttgctcttagtgctctctcttccaaaggtccttcaaagtctctaactgctagagatgagactgggatctacaagaatctgcttcaagagacagcacacagagctggtcttgatctaccggtttacacaagtgtgagatcaggacctggtcacatcccaacattctcttgtactgtggagcttgctggaatgagttttaatggagaatcagcaaagactaagaaacaagctgagaagaatgcagccattgcagcttggttctccttgagaaaaatgccaagattggacccattgagaggtgaagagaaggaacaagagatagttgcaagagtcctctcaagatttagacccaaagaagtgaaaagaagagaaccaaaccagtcaagaagaagaacagtcatcagaacaattcgccaaaacacaacaacaacaacaacaaccacaggagacttgttgtgtgagaaactcagatccatcaatctatataccaatgaagcttcatcatcatcaccaccaccacagagattctggccttcaagaacaaatctcacacaagaacaatccaaagtcaaatcattgctagagaaatgtcaagaatatgcagagaagaaacagagcctagatgatcctaagccagagatgagaatcaaaacatcatcaccatcaccattatcatcatcagtggagagaaactgttatagtaagctcttaccctttccaagttttgtgttaaaccatcagaaactagctccagcagttcacatcagatcagtgatcccagtttgttcagctcctccaccaaaacctaaccctaaccctaattcatcaccgttcatcacaagggagctgggaaatggaagccaagagaagaagtcattaccaaattag

SEQ ID NO: 98415 - protein, 357 aa, Arabidopsis thaliana
  peptide (1)..(357): Ceres Seq. ID no. 13593580
  misc_feature (2)..(68): Pfam Name: Double-stranded RNA binding motif Pfam Description: Double-stranded RNA binding motif
  misc_feature (1)..(357): Homolog of NCBI NO: 15231653 NR Description: hypothetical protein [Arabidopsis thaliana]
  misc_feature (1)..(357): Homolog of NCBI NO: 11994159 NR Description: gb|AAD20688.1~gene_id:MQP17.5~similar to unknown
  misc_feature (1)..(338): Homolog of NCBI NO: 30693732 NR Description: expressed protein [Arabidopsis thaliana]
  misc_feature (1)..(338): Homolog of NCBI NO: 9759153 NR Description: gb|AAD20688.1~gene_id:MEE6.14~similar to unknown
  misc_feature (1)..(181): Homolog of NCBI NO: 18401724 NR Description: expressed protein [Arabidopsis thaliana]
  misc_feature (1)..(181): Homolog of NCBI NO: 37535422 NR Description: putative extensin [Oryza sativa (japonica
  misc_feature (1)..(141): Homolog of NCBI NO: 40788412 NR Description: hypothetical protein [Oryza sativa (japonica
  misc_feature (1)..(182): Homolog of NCBI NO: 18389232 NR Description: unknown protein [Arabidopsis thaliana]
  misc_feature (1)..(182): Homolog of NCBI NO: 22331912 NR Description: expressed protein [Arabidopsis thaliana]
  misc_feature (1)..(182): Homolog of NCBI NO: 11283535 NR Description: hypothetical protein F26K9.230 - Arabidopsis >gi|7362760|emb|CAB83130.1| putative protein [Arabidopsis
MYKNQLQELAQRSCFSLPSYTCTREGPDHAPRFKASVNFNGEIFESPTYCSTLRQAEHSAAEVALSALSSKGPSKSLTARDETGIYKNLLQETAHRAGLDLPVYTSVRSGPGHIPTFSCTVELAGMSFNGESAKTKKQAEKNAAIAAWFSLRKMPRLDPLRGEEKEQEIVARVLSRFRPKEVKRREPNQSRRRTVIRTIRQNTTTTTTTTGDLLCEKLRSINLYTNEASSSSPPPQRFWPSRTNLTQEQSKVKSLLEKCQEYAEKKQSLDDPKPEMRIKTSSPSPLSSSVERNCYSKLLPFPSFVLNHQKLAPAVHIRSVIPVCSAPPPKPNPNPNSSPFITRELGNGSQEKKSLPN

SEQ ID NO: 98416 - protein, 232 aa, Arabidopsis thaliana; identical to SEQ ID NO: 50008
  peptide (1)..(232): Ceres Seq. ID no. 13593581
  misc_feature (1)..(232): Homolog of NCBI NO: 15231653 NR Description: hypothetical protein [Arabidopsis thaliana]
  misc_feature (1)..(232): Homolog of NCBI NO: 11994159 NR Description: gb|AAD20688.1~gene_id:MQP17.5~similar to unknown
  misc_feature (1)..(213): Homolog of NCBI NO: 30693732 NR Description: expressed protein [Arabidopsis thaliana]
  misc_feature (1)..(213): Homolog of NCBI NO: 9759153 NR Description: gb|AAD20688.1~gene_id:MEE6.14~similar to unknown
  misc_feature (1)..(56): Homolog of NCBI NO: 18401724 NR Description: expressed protein [Arabidopsis thaliana]
  misc_feature (1)..(56): Homolog of NCBI NO: 37535422 NR Description: putative extensin [Oryza sativa (japonica
  misc_feature (1)..(16): Homolog of NCBI NO: 40788412 NR Description: hypothetical protein [Oryza sativa (japonica
  misc_feature (1)..(57): Homolog of NCBI NO: 18389232 NR Description: unknown protein [Arabidopsis thaliana]
  misc_feature (1)..(57): Homolog of NCBI NO: 22331912 NR Description: expressed protein [Arabidopsis thaliana]
  misc_feature (1)..(57): Homolog of NCBI NO: 11283535 NR Description: hypothetical protein F26K9.230 - Arabidopsis >gi|7362760|emb|CAB83130.1| putative protein [Arabidopsis

SEQ ID NO: 98417 - protein, 204 aa, Arabidopsis thaliana; identical to SEQ ID NO: 50009
  peptide (1)..(204): Ceres Seq. ID no. 13593582
  misc_feature (1)..(204): Homolog of NCBI NO: 15231653 NR Description: hypothetical protein [Arabidopsis thaliana]
  misc_feature (1)..(204): Homolog of NCBI NO: 11994159 NR Description: gb|AAD20688.1~gene_id:MQP17.5~similar to unknown
  misc_feature (1)..(185): Homolog of NCBI NO: 30693732 NR Description: expressed protein [Arabidopsis thaliana]
  misc_feature (1)..(185): Homolog of NCBI NO: 9759153 NR Description: gb|AAD20688.1~gene_id:MEE6.14~similar to unknown
  misc_feature (1)..(28): Homolog of NCBI NO: 18401724 NR Description: expressed protein [Arabidopsis thaliana]
  misc_feature (1)..(28): Homolog of NCBI NO: 37535422 NR Description: putative extensin [Oryza sativa (japonica
  misc_feature (1)..(29): Homolog of NCBI NO: 18389232 NR Description: unknown protein [Arabidopsis thaliana]
  misc_feature (1)..(29): Homolog of NCBI NO: 22331912 NR Description: expressed protein [Arabidopsis thaliana]
  misc_feature (1)..(29): Homolog of NCBI NO: 11283535 NR Description: hypothetical protein F26K9.230 - Arabidopsis >gi|7362760|emb|CAB83130.1| putative protein [Arabidopsis
  misc_feature (1)..(17): Homolog of NCBI NO: 34909942 NR Description: P0695H10.7 [Oryza sativa (japonica

SEQ ID NO: 98418 - DNA, 447 bp, Arabidopsis thaliana
  misc_feature (1)..(447): Ceres Seq. ID no. 13593591
  misc_feature: MA Experiment ID: 20000306 Result: Up-regulated in Transcription
  misc_feature: MA Experiment 20000306 PARAMETER Experiment Name: At_Germinating_Seeds_Sub_P Parameter: Age (hr) Value: 6 vs. 0
  misc_feature: MA Experiment 20000306 PARAMETER Experiment Name: At_Germinating_Seeds_Sub_P Parameter: Organism Value: A. thaliana
  misc_feature: MA Experiment 20000306 PARAMETER Experiment Name: At_Germinating_Seeds_Sub_P Parameter: Plant Line Value: WS
  misc_feature: MA Experiment 20000306 PARAMETER Experiment Name: At_Germinating_Seeds_Sub_P Parameter: Tissue Value: Germinating Seeds
  misc_feature: MA Experiment ID: 20000307 Result: Up-regulated in Transcription
  misc_feature: MA Experiment 20000307 PARAMETER Experiment Name: At_Germinating_Seeds_Sub_P Parameter: Age (hr) Value: 24 vs. 0
  misc_feature: MA Experiment 20000307 PARAMETER Experiment Name: At_Germinating_Seeds_Sub_P Parameter: Organism Value: A. thaliana
  misc_feature: MA Experiment 20000307 PARAMETER Experiment Name: At_Germinating_Seeds_Sub_P Parameter: Plant Line Value: WS
  misc_feature: MA Experiment 20000307 PARAMETER Experiment Name: At_Germinating_Seeds_Sub_P Parameter: Tissue Value: Germinating Seeds
  misc_feature: MA Experiment ID: 20000328 Result: Down-regulated in Transcription
  misc_feature: MA Experiment 20000328 PARAMETER Experiment Name: At_42deg_Heat_Sub_P Parameter: Age (day) Value: 14
  misc_feature: MA Experiment 20000328 PARAMETER Experiment Name: At_42deg_Heat_Sub_P Parameter: Organism Value: A. thaliana
  misc_feature: MA Experiment 20000328 PARAMETER Experiment Name: At_42deg_Heat_Sub_P Parameter: Plant Line Value: WS
  misc_feature: MA Experiment 20000328 PARAMETER Experiment Name: At_42deg_Heat_Sub_P Parameter: Temperature (deg C) Value: 42 vs. 22
  misc_feature: MA Experiment 20000328 PARAMETER Experiment Name: At_42deg_Heat_Sub_P Parameter: Timepoint (hr) Value: 6
  misc_feature: MA Experiment 20000328 PARAMETER Experiment Name: At_42deg_Heat_Sub_P Parameter: Tissue Value: Aerial
atgagcaaggatggtttgagcaacgaccaagtctcatcaatgaaggaagcattcatgctattcgacacagacggcgacggcaaaatcgcaccgtcggagctcggaatcttaatgcggtcactcggcggcaatccaacagaatcacaactcaaatcaatcataacgacggagaatctctcgtctccgttcgatttcaatcgattcctagatctaatggcgaaacatctgaaaacagagccgttcgatcgccagcttcgtgatgcgttcaaagtgcttgacaaggaaggtactggattcgttgctgtggcagatctgagacatatacttacgagtatcggtgagaaattgcagccgagtgagtttgatgagtggatcaaagaggttgatgttggatctgatggtaagatccggtatgaggattttattgctagaatggttgctaagtaa

SEQ ID NO: 98419 - protein, 148 aa, Arabidopsis thaliana
  peptide (1)..(148): Ceres Seq. ID no. 13593592
  misc_feature (120)..(148): Pfam Name: EF hand Pfam Description: EF hand
  misc_feature (1)..(148): Homolog of NCBI NO: 15221593 NR Description: calmodulin, putative [Arabidopsis thaliana] putative calmodulin protein [Arabidopsis thaliana]
  misc_feature (1)..(147): Homolog of NCBI NO: 6630454 NR Description: F23N19.18 [Arabidopsis thaliana]
  misc_feature (1)..(148): Homolog of NCBI NO: 15221284 NR Description: calmodulin, putative [Arabidopsis thaliana] At1g12310/F5O11_2 [Arabidopsis thaliana]
  misc_feature (1)..(147): Homolog of NCBI NO: 25402719 NR Description: protein F5O11.4 [imported] - Arabidopsis thaliana
  misc_feature (1)..(148): Homolog of NCBI NO: 28629126 NR Description: putative serine/threonine kinase [Vitis vinifera]
  misc_feature (6)..(148): Homolog of NCBI NO: 29367559 NR Description: putative serine/threonine kinase [Oryza sativa
  misc_feature (4)..(148): Homolog of NCBI NO: 115530 NR Description: Calmodulin >gi|71679|pir||MCUTG calmodulin -
  misc_feature (4)..(148): Homolog of NCBI NO: 115531 NR Description: Calmodulin >gi|71680|pir||MCUTC calmodulin -
  misc_feature (4)..(148): Homolog of NCBI NO: 162030 NR Description: calmodulin A >gi|162031|gb|AAA30175.1| calmodulin
  misc_feature (4)..(148): Homolog of NCBI NO: 4959168 NR Description: calmodulin mutant SYNCAM62 [synthetic construct]
MSKDGLSNDQVSSMKEAFMLFDTDGDGKIAPSELGILMRSLGGNPTESQLKSIITTENLSSPFDFNRFLDLMAKHLKTEPFDRQLRDAFKVLDKEGTGFVAVADLRHILTSIGEKLQPSEFDEWIKEVDVGSDGKIRYEDFIARMVAK

SEQ ID NO: 98420 - protein, 135 aa, Arabidopsis thaliana
  peptide (1)..(135): Ceres Seq. ID no. 13593593
  misc_feature (107)..(135): Pfam Name: EF hand Pfam Description: EF hand
  misc_feature (1)..(135): Homolog of NCBI NO: 15221593 NR Description: calmodulin, putative [Arabidopsis thaliana] putative calmodulin protein [Arabidopsis thaliana]
  misc_feature (1)..(134): Homolog of NCBI NO: 6630454 NR Description: F23N19.18 [Arabidopsis thaliana]
  misc_feature (1)..(135): Homolog of NCBI NO: 15221284 NR Description: calmodulin, putative [Arabidopsis thaliana] At1g12310/F5O11_2 [Arabidopsis thaliana]
  misc_feature (1)..(134): Homolog of NCBI NO: 25402719 NR Description: protein F5O11.4 [imported] - Arabidopsis thaliana
  misc_feature (1)..(135): Homolog of NCBI NO: 28629126 NR Description: putative serine/threonine kinase [Vitis vinifera]
  misc_feature (1)..(135): Homolog of NCBI NO: 29367559 NR Description: putative serine/threonine kinase [Oryza sativa
  misc_feature (1)..(135): Homolog of NCBI NO: 115530 NR Description: Calmodulin >gi|71679|pir||MCUTG calmodulin -
  misc_feature (1)..(135): Homolog of NCBI NO: 115531 NR Description: Calmodulin >gi|71680|pir||MCUTC calmodulin -
  misc_feature (1)..(135): Homolog of NCBI NO: 162030 NR Description: calmodulin A >gi|162031|gb|AAA30175.1| calmodulin
  misc_feature (1)..(135): Homolog of NCBI NO: 4959168 NR Description: calmodulin mutant SYNCAM62 [synthetic construct]
MKEAFMLFDTDGDGKIAPSELGILMRSLGGNPTESQLKSIITTENLSSPFDFNRFLDLMAKHLKTEPFDRQLRDAFKVLDKEGTGFVAVADLRHILTSIGEKLQPSEFDEWIKEVDVGSDGKIRYEDFIARMVAK

SEQ ID NO: 98421 - protein, 130 aa, Arabidopsis thaliana
  peptide (1)..(130): Ceres Seq. ID no. 13593594
  misc_feature (102)..(130): Pfam Name: EF hand Pfam Description: EF hand
  misc_feature (1)..(130): Homolog of NCBI NO: 15221593 NR Description: calmodulin, putative [Arabidopsis thaliana] putative calmodulin protein [Arabidopsis thaliana]
  misc_feature (1)..(129): Homolog of NCBI NO: 6630454 NR Description: F23N19.18 [Arabidopsis thaliana]
  misc_feature (1)..(130): Homolog of NCBI NO: 15221284 NR Description: calmodulin, putative [Arabidopsis thaliana] At1g12310/F5O11_2 [Arabidopsis thaliana]
  misc_feature (1)..(129): Homolog of NCBI NO: 25402719 NR Description: protein F5O11.4 [imported] - Arabidopsis thaliana
  misc_feature (1)..(130): Homolog of NCBI NO: 28629126 NR Description: putative serine/threonine kinase [Vitis vinifera]
  misc_feature (1)..(130): Homolog of NCBI NO: 29367559 NR Description: putative serine/threonine kinase [Oryza sativa
  misc_feature (1)..(130): Homolog of NCBI NO: 115530 NR Description: Calmodulin >gi|71679|pir||MCUTG calmodulin -
  misc_feature (1)..(130): Homolog of NCBI NO: 115531 NR Description: Calmodulin >gi|71680|pir||MCUTC calmodulin -
  misc_feature (1)..(130): Homolog of NCBI NO: 162030 NR Description: calmodulin A >gi|162031|gb|AAA30175.1| calmodulin
  misc_feature (1)..(130): Homolog of NCBI NO: 4959168 NR Description: calmodulin mutant SYNCAM62 [synthetic construct]
MLFDTDGDGKIAPSELGILMRSLGGNPTESQLKSIITTENLSSPFDFNRFLDLMAKHLKTEPFDRQLRDAFKVLDKEGTGFVAVADLRHILTSIGEKLQPSEFDEWIKEVDVGSDGKIRYEDFIARMVAK

SEQ ID NO: 98422 - DNA, 1147 bp, Arabidopsis thaliana
  misc_feature (1)..(1147): Ceres Seq. ID no. 13593595
  misc_feature: MA Experiment ID: 20000180 Result: Up-regulated in Transcription
  misc_feature: MA Experiment 20000180 PARAMETER Experiment Name: At_Germinating_Seeds_P Parameter: Age (hr) Value: 24 vs. 0
  misc_feature: MA Experiment 20000180 PARAMETER Experiment Name: At_Germinating_Seeds_P Parameter: Tissue Value: Germinating Seeds
gggacggaccgtgattggtcggtctctctcgttacggtgaggctgaggctgaggcggagattgagagagaccaaccatgatacgacgaatcaccgagagagcttctggtttcgctaagaatattccgattctcaaatcgtctcgatttcacggcgagtccctcgattcctccgtctcccctgttctcattcccggcgtccatgtcttccattgtcaggatgctgttgggattgtagctaaactatcagattgcatagcagcaaaaggtggcaacattcttggctacgatgtttttgttcctgaaaacaacaacgtcttctactctcgcagcgagtttatctttgatccggttaaatggccgagaagccaagtggatgaagattttcaaactattgcacaaagatacggtgccttgaattcagttgtgcgtgtgccttctattgatcctaagtataagatagctcttcttctttcaaaacaggatcattgtcttgtcgaaatgttgcataaatggcaggacgggaaactccctgtggatattacctgtgtgataagcaatcatgaaagagcttcaaacactcacgttatgcggtttcttgagaggcatggcatcccttatcattatgtatctacaactaaagagaataaaagagaagatgatattttggaattggttaaggacactgatttcctagttcttgctagatatatgcagattttatcgggtaactttttgaaaggttatggaaaggatgtaatcaacatccaccatggtctcttaccatcatttaagggtggatatcccgcaaaacaggcattcgacgctggtgtgaaactaattggagccactagtcactttgttaccgaggaacttgattcagggccaattattgaacaaatggttgagagtgtttcccaccgagacaacttaaggagctttgtccagaaatccgaggacctagagaaaaaatgcctcacgagagctataaaatcttactgcgaactaagggtattaccttatggtacaaacaagactgttgtattctagttaagaaagcaataactacgattctcatctgattctttgtttgaacatctcaagaaaaggtgatacgaatttctataagattgttgattcatttgcagt

SEQ ID NO: 98423 - protein, 323 aa, Arabidopsis thaliana; identical to SEQ ID NO: 50207
  peptide (1)..(323): Ceres Seq. ID no. 13593596
  misc_feature (126)..(304): Pfam Name: Formyl transferase Pfam Description: Formyl transferase
  misc_feature (1)..(323): Homolog of NCBI NO: 18422794 NR Description: formyltetrahydrofolate deformylase, putative thaliana] >gi|30695186|ref|NP_851145.1| formyltetrahydrofolate
  misc_feature (20)..(323): Homolog of NCBI NO: 15236046 NR Description: formyltetrahydrofolate deformylase, putative
  misc_feature (58)..(323): Homolog of NCBI NO: 7433570 NR Description: probable formyltransferase purU - Arabidopsis >gi|2245095|emb|CAB10517.1| formyltransferase purU homolog thaliana] >gi|7268488|emb|CAB78739.1| formyltransferase purU
  misc_feature (46)..(323): Homolog of NCBI NO: 15606867 NR Description: formyltetrahydrofolate deformylase [Aquifex
  misc_feature (30)..(323): Homolog of NCBI NO: 37523894 NR Description: formyltetrahydrofolate deformylase [Gloeobacter >gi|35214900|dbj|BAC92266.1| formyltetrahydrofolate deformylase
  misc_feature (46)..(323): Homolog of NCBI NO: 27381066 NR Description: formyltetrahydrofolate deformylase japonicum] >gi|27354232|dbj|BAC51220.1| formyltetrahydrofolate
  misc_feature (43)..(323): Homolog of NCBI NO: 15599510 NR Description: formyltetrahydrofolate deformylase [Pseudomonas PA01] >gi|11348559|pir||C83105 formyltetrahydrofolate deformylase
  misc_feature (43)..(323): Homolog of NCBI NO: 29346791 NR Description: formyltetrahydrofolate deformylase [Bacteroides
  misc_feature (46)..(323): Homolog of NCBI NO: 15805611 NR Description: formyltetrahydrofolate deformylase [Deinococcus
  misc_feature (43)..(323): Homolog of NCBI NO: 23063861 NR Description: hypothetical protein [Pseudomonas fluorescens

SEQ ID NO: 98424 - protein, 182 aa, Arabidopsis thaliana; identical to SEQ ID NO: 50208
  peptide (1)..(182): Ceres Seq. ID no. 13593597
  misc_feature (1)..(163): Pfam Name: Formyl transferase Pfam Description: Formyl transferase
  misc_feature (1)..(182): Homolog of NCBI NO: 18422794 NR Description: formyltetrahydrofolate deformylase, putative thaliana] >gi|30695186|ref|NP_851145.1| formyltetrahydrofolate
  misc_feature (1)..(182): Homolog of NCBI NO: 15236046 NR Description: formyltetrahydrofolate deformylase, putative
  misc_feature (1)..(182): Homolog of NCBI NO: 7433570 NR Description: probable formyltransferase purU - Arabidopsis >gi|2245095|emb|CAB10517.1| formyltransferase purU homolog thaliana] >gi|7268488|emb|CAB78739.1| formyltransferase purU
  misc_feature (1)..(182): Homolog of NCBI NO: 15606867 NR Description: formyltetrahydrofolate deformylase [Aquifex
  misc_feature (1)..(182): Homolog of NCBI NO: 37523894 NR Description: formyltetrahydrofolate deformylase [Gloeobacter >gi|35214900|dbj|BAC92266.1| formyltetrahydrofolate deformylase
  misc_feature (1)..(182): Homolog of NCBI NO: 27381066 NR Description: formyltetrahydrofolate deformylase japonicum] >gi|27354232|dbj|BAC51220.1| formyltetrahydrofolate
  misc_feature (1)..(182): Homolog of NCBI NO: 15599510 NR Description: formyltetrahydrofolate deformylase [Pseudomonas PA01] >gi|11348559|pir||C83105 formyltetrahydrofolate deformylase
  misc_feature (1)..(182): Homolog of NCBI NO: 29346791 NR Description: formyltetrahydrofolate deformylase [Bacteroides
  misc_feature (1)..(182): Homolog of NCBI NO: 15805611 NR Description: formyltetrahydrofolate deformylase [Deinococcus
  misc_feature (1)..(182): Homolog of NCBI NO: 23063861 NR Description: hypothetical protein [Pseudomonas fluorescens

SEQ ID NO: 98425 - DNA, 1414 bp, Arabidopsis thaliana
  misc_feature (1)..(1414): Ceres Seq. ID no. 13593611
  misc_feature: MA Experiment ID: 20000180 Result: Down-regulated in Transcription
  misc_feature: MA Experiment 20000180 PARAMETER Experiment Name: At_Germinating_Seeds_P Parameter: Age (hr) Value: 24 vs. 0
  misc_feature: MA Experiment 20000180 PARAMETER Experiment Name: At_Germinating_Seeds_P Parameter: Tissue Value: Germinating Seeds
  misc_feature: MA Experiment ID: 20000211 Result: Up-regulated in Transcription
  misc_feature: MA Experiment 20000211 PARAMETER Experiment Name: At_0.001percent_MeJA__P Parameter: Age (day) Value: 14
  misc_feature: MA Experiment 20000211 PARAMETER Experiment Name: At_0.001percent_MeJA__P Parameter: Organism Value: A. thaliana
  misc_feature: MA Experiment 20000211 PARAMETER Experiment Name: At_0.001percent_MeJA__P Parameter: Plant Line Value: WS
  misc_feature: MA Experiment 20000211 PARAMETER Experiment Name: At_0.001percent_MeJA__P Parameter: Timepoint (hr) Value: 1
  misc_feature: MA Experiment 20000211 PARAMETER Experiment Name: At_0.001percent_MeJA__P Parameter: Tissue Value: Aerial
  misc_feature: MA Experiment 20000211 PARAMETER Experiment Name: At_0.001percent_MeJA__P Parameter: Treatment Value: 0.001percent MeJA vs. No Treatment
  misc_feature: MA Experiment ID: 20000227 Result: Up-regulated in Transcription
  misc_feature: MA Experiment 20000227 PARAMETER Experiment Name: At_Root-Tips-vs-Tops_P Parameter: Tissue Value: Root Tips vs. Root Tops
  misc_feature: MA Experiment ID: 20000234 Result: Up-regulated in Transcription
  misc_feature: MA Experiment 20000234 PARAMETER Experiment Name: At_Siliques_P Parameter: Age (day) Value: 21
  misc_feature: MA Experiment 20000234 PARAMETER Experiment Name: At_Siliques_P Parameter: Organism Value: A. thaliana
  misc_feature: MA Experiment 20000234 PARAMETER Experiment Name: At_Siliques_P Parameter: Plant Line Value: WS
  misc_feature: MA Experiment 20000234 PARAMETER Experiment Name: At_Siliques_P Parameter: Tissue Value: Less Than 5mm Siliques vs. Whole Plant
  misc_feature: MA Experiment ID: 20000235 Result: Up-regulated in Transcription
  misc_feature: MA Experiment 20000235 PARAMETER Experiment Name: At_Siliques_P Parameter: Age (day) Value: 21
  misc_feature: MA Experiment 20000235 PARAMETER Experiment Name: At_Siliques_P Parameter: Organism Value: A. thaliana
  misc_feature: MA Experiment 20000235 PARAMETER Experiment Name: At_Siliques_P Parameter: Plant Line Value: WS
  misc_feature: MA Experiment 20000235 PARAMETER Experiment Name: At_Siliques_P Parameter: Tissue Value: 5-10mm Siliques vs. Whole Plant
  misc_feature: MA Experiment ID: 20000264 Result: Up-regulated in Transcription
  misc_feature: MA Experiment 20000264 PARAMETER Experiment Name: At_Open_Flower_P Parameter: Age (day) Value: 21
  misc_feature: MA Experiment 20000264 PARAMETER Experiment Name: At_Open_Flower_P Parameter: Plant Line Value: WS
  misc_feature: MA Experiment 20000264 PARAMETER Experiment Name: At_Open_Flower_P Parameter: Tissue Value: Open Flower vs. Whole Plant
  misc_feature: MA Experiment ID: 20000265 Result: Up-regulated in Transcription
  misc_feature: MA Experiment 20000265 PARAMETER Experiment Name: At_Open_Flower_P Parameter: Age (day) Value: 21
  misc_feature: MA Experiment 20000265 PARAMETER Experiment Name: At_Open_Flower_P Parameter: Plant Line Value: WS
  misc_feature: MA Experiment 20000265 PARAMETER Experiment Name: At_Open_Flower_P Parameter: Tissue Value: Closed Flower vs. Whole Plant
  misc_feature: MA Experiment ID: 20000286 Result: Up-regulated in Transcription
  misc_feature: MA Experiment 20000286 PARAMETER Experiment Name: At_Open_Flower_P Parameter: Age (day) Value: 21
  misc_feature: MA Experiment 20000286 PARAMETER Experiment Name: At_Open_Flower_P Parameter: Plant Line Value: WS
  misc_feature: MA Experiment 20000286 PARAMETER Experiment Name: At_Open_Flower_P Parameter: Tissue Value: Half Open vs. Whole Plant
  misc_feature: MA Experiment ID: 20000794 Result: Up-regulated in Transcription
  misc_feature: MA Experiment 20000794 PARAMETER Experiment Name: At_Petals_P Parameter: Age (day) Value: 23-25 days
  misc_feature: MA Experiment 20000794 PARAMETER Experiment Name: At_Petals_P Parameter: Plant Line Value: WS
  misc_feature: MA Experiment 20000794 PARAMETER Experiment Name: At_Petals_P Parameter: Tissue Value: Petals vs. Whole plant
aacccacccaaaatatcacaagcaccgactaaaacaattcggatctaaacccgacccggtaaaaccaatcccaaattttactccgttgtgaacgcatcaaacccagaaaatttcttcctccgatctcgcattctccacttccataatccccaaaattgtttcgttgatttttccacaagatgaagctaacggacaacgaagagatcaccatgaacggaactcgagaaatggagacgacagagcaagagacatcgtcgccgtgttcgttagtaatcgaagcttttccggtgaagaaatccattattgtaggttacgctcttacatcaaagaagattaagagctttttacaaccaaaactcgaaggtttagctaggaataaggggatattatttgtggcaatagatcagaataagccactttcagagcagggtccgtttgatattgtgttgcataagcaaattggaaaagaatggcgtcgaattctcgaggaatttaggctagcacatccagatgtcacagttcttgatcctccagatgcaatactacatctccgtaatcgtcagtcaatgcttcagtgtgttgcggacatgaatctgtctgatagtaatggacgcgttggtgtgcccaagcaattggtaattaaaaaggatgcatcttcaattccggaggctgtcaataatgctggtctgagactacctcttgttgcaaagccattggttgctgatggaagtgcaaagtcacatgagctttcgctggcttacgatcaacactcccttctgaagctcgagcctcctcttgttcttcaggagtttgttaaccatggaggtgttcttttcaaggtttacattgttggggaggctattagagttgtccggcgcttctccctacctgatgtctctagacgagaactccccaaatcagctggtgtattccgcttcccacgggtctcttgtgctgcagcttcagctgatgatgcagatctggacccgagcattgccgagcttccaccacgtcctctgttggagagactggcaaaggaactccgtcgtggattgggtctaaggctgttcaatttagacataattagagagcacgggacaagagatcggttttatgtgatcgacatcaactatttcccagggtacgggaaaatgccagagtatgagcatgtattcactgatttcttactgagtgtggtacaaagccaatgtaagaaacgagctttggcagatcaatactaaactcaacggagagaccattgttcctccccaaagaaaaaaagaagattagtagtctatgcaatttatttctgtacaggacaaagcaccgatttccctcgatgttgttctttagcttcattgtgctgtacaaaagaacaatggaagattgcatttaaaagaaaatccttgggacc

SEQ ID NO: 98426 - protein, 353 aa, Arabidopsis thaliana
  peptide (1)..(353): Ceres Seq. ID no. 13593612
  misc_feature (34)..(338): Pfam Name: Inositol 1, 3, 4-trisphosphate 5/6-kinase Pfam Description: Inositol 1, 3, 4-trisphosphate 5/6-kinase
  misc_feature (1)..(353): Homolog of NCBI NO: 18413088 NR Description: inositol 1,3,4-trisphosphate 5/6-kinase-related [Arabidopsis thaliana] >gi|15215758|gb|AAK91424.1| [Arabidopsis thaliana] >gi|16323320|gb|AAL15415.1|
  misc_feature (1)..(321): Homolog of NCBI NO: 7487925 NR Description: inositol 1,3,4-trisphosphate 5/6-kinase homolog
  misc_feature (92)..(353): Homolog of NCBI NO: 30680654 NR Description: inositol 1,3,4-trisphosphate 5/6-kinase-related
  misc_feature (41)..(347): Homolog of NCBI NO: 37530372 NR Description: putative inositol 1,3,4-trisphosphate 5/6-kinase
  misc_feature (34)..(346): Homolog of NCBI NO: 27311236 NR Description: Putative inositol 1,3,4-trisphosphate 5/6-kinase
  misc_feature (175)..(347): Homolog of NCBI NO: 30689810 NR Description: expressed protein [Arabidopsis thaliana]
  misc_feature (38)..(174): Homolog of NCBI NO: 30689810 NR Description: expressed protein [Arabidopsis thaliana]
  misc_feature (175)..(321): Homolog of NCBI NO: 7487088 NR Description: hypothetical protein T16L1.260 - Arabidopsis >gi|3549679|emb|CAA20590.1| putative protein [Arabidopsis >gi|7270326|emb|CAB80094.1| putative protein [Arabidopsis
  misc_feature (38)..(174): Homolog of NCBI NO: 7487088 NR Description: hypothetical protein T16L1.260 - Arabidopsis >gi|3549679|emb|CAA20590.1| putative protein [Arabidopsis >gi|7270326|emb|CAB80094.1| putative protein [Arabidopsis
  misc_feature (38)..(340): Homolog of NCBI NO: 37537118 NR Description: putative inositol 1,3,4-trisphosphate 5/6-kinase
MKLTDNEEITMNGTREMETTEQETSSPCSLVIEAFPVKKSIIVGYALTSKKIKSFLQPKLEGLARNKGILFVAIDQNKPLSEQGPFDIVLHKQIGKEWRRILEEFRLAHPDVTVLDPPDAILHLRNRQSMLQCVADMNLSDSNGRVGVPKQLVIKKDASSIPEAVNNAGLRLPLVAKPLVADGSAKSHELSLAYDQHSLLKLEPPLVLQEFVNHGGVLFKVYIVGEAIRVVRRFSLPDVSRRELPKSAGVFRFPRVSCAAASADDADLDPSIAELPPRPLLERLAKELRRGLGLRLFNLDIIREHGTRDRFYVIDINYFPGYGKMPEYEHVFTDFLLSVVQSQCKKRALADQY

SEQ ID NO: 98427 - protein, 343 aa, Arabidopsis thaliana
  peptide (1)..(343): Ceres Seq. ID no. 13593613
  misc_feature (24)..(328): Pfam Name: Inositol 1, 3, 4-trisphosphate 5/6-kinase Pfam Description: Inositol 1, 3, 4-trisphosphate 5/6-kinase
  misc_feature (1)..(343): Homolog of NCBI NO: 18413088 NR Description: inositol 1,3,4-trisphosphate 5/6-kinase-related [Arabidopsis thaliana] >gi|15215758|gb|AAK91424.1| [Arabidopsis thaliana] >gi|16323320|gb|AAL15415.1|
  misc_feature (1)..(311): Homolog of NCBI NO: 7487925 NR Description: inositol 1,3,4-trisphosphate 5/6-kinase homolog
  misc_feature (82)..(343): Homolog of NCBI NO: 30680654 NR Description: inositol 1,3,4-trisphosphate 5/6-kinase-related
  misc_feature (31)..(337): Homolog of NCBI NO: 37530372 NR Description: putative inositol 1,3,4-trisphosphate 5/6-kinase
  misc_feature (24)..(336): Homolog of NCBI NO: 27311236 NR Description: Putative inositol 1,3,4-trisphosphate 5/6-kinase
  misc_feature (165)..(337): Homolog of NCBI NO: 30689810 NR Description: expressed protein [Arabidopsis thaliana]
  misc_feature (28)..(164): Homolog of NCBI NO: 30689810 NR Description: expressed protein [Arabidopsis thaliana]
  misc_feature (165)..(311): Homolog of NCBI NO: 7487088 NR Description: hypothetical protein T16L1.260 - Arabidopsis >gi|3549679|emb|CAA20590.1| putative protein [Arabidopsis >gi|7270326|emb|CAB80094.1| putative protein [Arabidopsis
  misc_feature (28)..(164): Homolog of NCBI NO: 7487088 NR Description: hypothetical protein T16L1.260 - Arabidopsis >gi|3549679|emb|CAA20590.1| putative protein [Arabidopsis >gi|7270326|emb|CAB80094.1| putative protein [Arabidopsis
  misc_feature (28)..(330): Homolog of NCBI NO: 37537118 NR Description: putative inositol 1,3,4-trisphosphate 5/6-kinase
MNGTREMETTEQETSSPCSLVIEAFPVKKSIIVGYALTSKKIKSFLQPKLEGLARNKGILFVAIDQNKPLSEQGPFDIVLHKQIGKEWRRILEEFRLAHPDVTVLDPPDAILHLRNRQSMLQCVADMNLSDSNGRVGVPKQLVIKKDASSIPEAVNNAGLRLPLVAKPLVADGSAKSHELSLAYDQHSLLKLEPPLVLQEFVNHGGVLFKVYIVGEAIRVVRRFSLPDVSRRELPKSAGVFRFPRVSCAAASADDADLDPSIAELPPRPLLERLAKELRRGLGLRLFNLDIIREHGTRDRFYVIDINYFPGYGKMPEYEHVFTDFLLSVVQSQCKKRALADQY

SEQ ID NO: 98428 - protein, 337 aa, Arabidopsis thaliana
  peptide (1)..(337): Ceres Seq. ID no. 13593614
  misc_feature (18)..(322): Pfam Name: Inositol 1, 3, 4-trisphosphate 5/6-kinase Pfam Description: Inositol 1, 3, 4-trisphosphate 5/6-kinase
  misc_feature (1)..(337): Homolog of NCBI NO: 18413088 NR Description: inositol 1,3,4-trisphosphate 5/6-kinase-related [Arabidopsis thaliana] >gi|15215758|gb|AAK91424.1| [Arabidopsis thaliana] >gi|16323320|gb|AAL15415.1|
  misc_feature (1)..(305): Homolog of NCBI NO: 7487925 NR Description: inositol 1,3,4-trisphosphate 5/6-kinase homolog
  misc_feature (76)..(337): Homolog of NCBI NO: 30680654 NR Description: inositol 1,3,4-trisphosphate 5/6-kinase-related
  misc_feature (25)..(331): Homolog of NCBI NO: 37530372 NR Description: putative inositol 1,3,4-trisphosphate 5/6-kinase
  misc_feature (18)..(330): Homolog of NCBI NO: 27311236 NR Description: Putative inositol 1,3,4-trisphosphate 5/6-kinase
  misc_feature (159)..(331): Homolog of NCBI NO: 30689810 NR Description: expressed protein [Arabidopsis thaliana]
  misc_feature (22)..(158): Homolog of NCBI NO: 30689810 NR Description: expressed protein [Arabidopsis thaliana]
  misc_feature (159)..(305): Homolog of NCBI NO: 7487088 NR Description: hypothetical protein T16L1.260 - Arabidopsis >gi|3549679|emb|CAA20590.1| putative protein [Arabidopsis >gi|7270326|emb|CAB80094.1| putative protein [Arabidopsis
  misc_feature (22)..(158): Homolog of NCBI NO: 7487088 NR Description: hypothetical protein T16L1.260 - Arabidopsis >gi|3549679|emb|CAA20590.1| putative protein [Arabidopsis >gi|7270326|emb|CAB80094.1| putative protein [Arabidopsis
  misc_feature (22)..(324): Homolog of NCBI NO: 37537118 NR Description: putative inositol 1,3,4-trisphosphate 5/6-kinase
METTEQETSSPCSLVIEAFPVKKSIIVGYALTSKKIKSFLQPKLEGLARNKGILFVAIDQNKPLSEQGPFDIVLHKQIGKEWRRILEEFRLAHPDVTVLDPPDAILHLRNRQSMLQCVADMNLSDSNGRVGVPKQLVIKKDASSIPEAVNNAGLRLPLVAKPLVADGSAKSHELSLAYDQHSLLKLEPPLVLQEFVNHGGVLFKVYIVGEAIRVVRRFSLPDVSRRELPKSAGVFRFPRVSCAAASADDADLDPSIAELPPRPLLERLAKELRRGLGLRLFNLDIIREHGTRDRFYVIDINYFPGYGKMPEYEHVFTDFLLSVVQSQCKKRALADQY

SEQ ID NO: 98429 - DNA, 951 bp, Arabidopsis thaliana
  misc_feature (1)..(951): Ceres Seq. ID no. 13593631
  misc_feature: MA Experiment ID: 20000171 Result: Down-regulated in Transcription
  misc_feature: MA Experiment 20000171 PARAMETER Experiment Name: At_42deg_Heat_P Parameter: Age (day) Value: 14
  misc_feature: MA Experiment 20000171 PARAMETER Experiment Name: At_42deg_Heat_P Parameter: Organism Value: A. thaliana
  misc_feature: MA Experiment 20000171 PARAMETER Experiment Name: At_42deg_Heat_P Parameter: Plant Line Value: WS
  misc_feature: MA Experiment 20000171 PARAMETER Experiment Name: At_42deg_Heat_P Parameter: Temperature (deg C) Value: 42 vs. 22
  misc_feature: MA Experiment 20000171 PARAMETER Experiment Name: At_42deg_Heat_P Parameter: Timepoint (hr) Value: 1
  misc_feature: MA Experiment 20000171 PARAMETER Experiment Name: At_42deg_Heat_P Parameter: Tissue Value: Aerial
  misc_feature: MA Experiment ID: 20000184 Result: Down-regulated in Transcription
  misc_feature: MA Experiment 20000184 PARAMETER Experiment Name: At_Shoots__P Parameter: Age (day) Value: 7
  misc_feature: MA Experiment 20000184 PARAMETER Experiment Name: At_Shoots__P Parameter: Tissue Value: Shoots vs. Whole Plant
  misc_feature: MA Experiment ID: 20000185 Result: Up-regulated in Transcription
  misc_feature: MA Experiment 20000185 PARAMETER Experiment Name: At_Roots__P Parameter: Age (day) Value: 7 vs. 21
  misc_feature: MA Experiment 20000185 PARAMETER Experiment Name: At_Roots__P Parameter: Organism Value: A. thaliana
  misc_feature: MA Experiment 20000185 PARAMETER Experiment Name: At_Roots__P Parameter: Tissue Value: Roots vs. Whole Plant
  misc_feature: MA Experiment ID: 20000227 Result: Up-regulated in Transcription
  misc_feature: MA Experiment 20000227 PARAMETER Experiment Name: At_Root-Tips-vs-Tops_P Parameter: Tissue Value: Root Tips vs. Root Tops
  misc_feature: MA Experiment ID: 20001770 Result: Down-regulated in Transcription
  misc_feature: MA Experiment 20001770 PARAMETER Experiment Name: At_Far-red-enriched-adult_P Parameter: Age (day) Value: 28
  misc_feature: MA Experiment 20001770 PARAMETER Experiment Name: At_Far-red-enriched-adult_P Parameter: Light Value: Far-red enriched vs. White
  misc_feature: MA Experiment 20001770 PARAMETER Experiment Name: At_Far-red-enriched-adult_P Parameter: Organism Value: A. thaliana
  misc_feature: MA Experiment 20001770 PARAMETER Experiment Name: At_Far-red-enriched-adult_P Parameter: Plant Line Value: Columbia
  misc_feature: MA Experiment 20001770 PARAMETER Experiment Name: At_Far-red-enriched-adult_P Parameter: Timepoint (hr) Value: 8
  misc_feature: MA Experiment 20001770 PARAMETER Experiment Name: At_Far-red-enriched-adult_P Parameter: Tissue Value: Aerial
  misc_feature: MA Experiment ID: 20001771 Result: Up-regulated in Transcription
  misc_feature: MA Experiment 20001771 PARAMETER Experiment Name: At_Far-red-enriched-adult_P Parameter: Age (day) Value: 28
  misc_feature: MA Experiment 20001771 PARAMETER Experiment Name: At_Far-red-enriched-adult_P Parameter: Light Value: Far-red enriched vs. White
  misc_feature: MA Experiment 20001771 PARAMETER Experiment Name: At_Far-red-enriched-adult_P Parameter: Organism Value: A. thaliana
  misc_feature: MA Experiment 20001771 PARAMETER Experiment Name: At_Far-red-enriched-adult_P Parameter: Plant Line Value: Columbia
  misc_feature: MA Experiment 20001771 PARAMETER Experiment Name: At_Far-red-enriched-adult_P Parameter: Timepoint (hr) Value: 16
  misc_feature: MA Experiment 20001771 PARAMETER Experiment Name: At_Far-red-enriched-adult_P Parameter: Tissue Value: Aerial
atgagtccggacaataaactgcttccgaagcggatcatccttgtacggcacggtgaatcggaagggaatctcgacacggcggcgtatacaacgacgccggatcataagatccagttaacggattccggtttgcttcaggcgcaggaagccggagctcgtctccacgctttgatctcttctaatccttcttcaccggagtggcgtgtgtacttctacgtttcgccgtacgatcggactcgatctacgctccgggagatcggacggtcgttctcgcgtcgccgtgtgattggtgttcgcgaagaatgtcggattagggaacaggattttgggaattttcaggttaaagagcgaatgagagcaacgaaaaaggtcagagagagatttggccgctttttttaccggttcccggagggagaatccgccgccgatgtcttcgatcgcgtctccagttttctcgagtctctatggagagacattgacatgaacagactgcacatcaacccgtctcatgagctaaactttgtgattgtctcacatggcttaacatcgcgtgtgtttctgatgaaatggtttaagtggtcagtggaacagttcgagggactaaacaatccagggaacagtgagatcagagtgatggaattaggacaaggcggtgattacagcttggcgattcatcacacagaggaagagttagccacatggggactgtcaccagagatgattgcagatcaaaagtggcgggctaacgcgcataaaggcgaatggaaagaagattgtaagtggtattttggtgatttcttcgaccatatggcagattccgataaagagtgcgagactgaggccactgaagatagagaagaagaagaagaagaagaggggaaaagggtaaatctgctaacgagttcagaatatagcaatgagccagagttatacaatggacaatgctgctga

SEQ ID NO: 98430 - protein, 316 aa, Arabidopsis thaliana
  peptide (1)..(316): Ceres Seq. ID no. 13593632
  misc_feature (10)..(224): Pfam Name: Phosphoglycerate mutase family Pfam Description: Phosphoglycerate mutase family
  misc_feature (1)..(316): Homolog of NCBI NO: 15229917 NR Description: expressed protein [Arabidopsis thaliana]
  misc_feature (1)..(276): Homolog of NCBI NO: 15223983 NR Description: expressed protein [Arabidopsis thaliana]
  misc_feature (9)..(284): Homolog of NCBI NO: 34897810 NR Description: P0514G12.25 [Oryza sativa (japonica
  misc_feature (9)..(222): Homolog of NCBI NO: 29469213 NR Description: unknown [Streptomyces murayamaensis]
  misc_feature (9)..(222): Homolog of NCBI NO: 21224153 NR Description: conserved hypothetical protein SC4H2.29 coelicolor A3(2)] >gi|7479557|pir||T35128 hypothetical protein
  misc_feature (9)..(222): Homolog of NCBI NO: 29829000 NR Description: hypothetical protein [Streptomyces avermitilis
  misc_feature (1)..(119): Homolog of NCBI NO: 38454096 NR Description: At1g08940 [Arabidopsis thaliana]
  misc_feature (12)..(234): Homolog of NCBI NO: 40741871 NR Description: hypothetical protein AN4983.2 [Aspergillus
  misc_feature (98)..(216): Homolog of NCBI NO: 6320256 NR Description: Hypothetical ORF; Ydr051cp [Saccharomyces
  misc_feature (9)..(54): Homolog of NCBI NO: 6320256 NR Description: Hypothetical ORF; Ydr051cp [Saccharomyces
MSPDNKLLPKRIILVRHGESEGNLDTAAYTTTPDHKIQLTDSGLLQAQEAGARLHALISSNPSSPEWRVYFYVSPYDRTRSTLREIGRSFSRRRVIGVREECRIREQDFGNFQVKERMRATKKVRERFGRFFYRFPEGESAADVFDRVSSFLESLWRDIDMNRLHINPSHELNFVIVSHGLTSRVFLMKWFKWSVEQFEGLNNPGNSEIRVMELGQGGDYSLAIHHTEEELATWGLSPEMIADQKWRANAHKGEWKEDCKWYFGDFFDHMADSDKECETEATEDREEEEEEEGKRVNLLTSSEYSNEPELYNGQCC

SEQ ID NO: 98431 - protein, 199 aa, Arabidopsis thaliana
  peptide (1)..(199): Ceres Seq. ID no. 13593633
  misc_feature (1)..(107): Pfam Name: Phosphoglycerate mutase family Pfam Description: Phosphoglycerate mutase family
  misc_feature (1)..(199): Homolog of NCBI NO: 15229917 NR Description: expressed protein [Arabidopsis thaliana]
  misc_feature (1)..(159): Homolog of NCBI NO: 15223983 NR Description: expressed protein [Arabidopsis thaliana]
  misc_feature (1)..(167): Homolog of NCBI NO: 34897810 NR Description: P0514G12.25 [Oryza sativa (japonica
  misc_feature (1)..(105): Homolog of NCBI NO: 29469213 NR Description: unknown [Streptomyces murayamaensis]
  misc_feature (1)..(105): Homolog of NCBI NO: 21224153 NR Description: conserved hypothetical protein SC4H2.29 coelicolor A3(2)] >gi|7479557|pir||T35128 hypothetical protein
  misc_feature (1)..(105): Homolog of NCBI NO: 29829000 NR Description: hypothetical protein [Streptomyces avermitilis
  misc_feature (1)..(117): Homolog of NCBI NO: 40741871 NR Description: hypothetical protein AN4983.2 [Aspergillus
  misc_feature (1)..(99): Homolog of NCBI NO: 6320256 NR Description: Hypothetical ORF; Ydr051cp [Saccharomyces
  misc_feature (71)..(129): Homolog of NCBI NO: 37532206 NR Description: hypothetical protein [Oryza sativa (japonica group)] >gi|20451045|gb|AAM22016.1| Hypothetical protein [Oryza
MRATKKVRERFGRFFYRFPEGESAADVFDRVSSFLESLWRDIDMNRLHINPSHELNFVIVSHGLTSRVFLMKWFKWSVEQFEGLNNPGNSEIRVMELGQGGDYSLAIHHTEEELATWGLSPEMIADQKWRANAHKGEWKEDCKWYFGDFFDHMADSDKECETEATEDREEEEEEEGKRVNLLTSSEYSNEPELYNGQCC

SEQ ID NO: 98432 - DNA, 3546 bp, Arabidopsis thaliana
  misc_feature (1)..(3546): Ceres Seq. ID no. 13593638
  misc_feature: MA Experiment ID: 20000180 Result: Up-regulated in Transcription
  misc_feature: MA Experiment 20000180 PARAMETER Experiment Name: At_Germinating_Seeds_P Parameter: Age (hr) Value: 24 vs. 0
  misc_feature: MA Experiment 20000180 PARAMETER Experiment Name: At_Germinating_Seeds_P Parameter: Tissue Value: Germinating Seeds
  misc_feature: MA Experiment ID: 20000495 Result: Up-regulated in Transcription
  misc_feature: MA Experiment 20000495 PARAMETER Experiment Name: At_Guard_Cells_P Parameter: Harvest Date Value: 8/2/2002
  misc_feature: MA Experiment 20000495 PARAMETER Experiment Name: At_Guard_Cells_P Parameter: Organism Value: A. thaliana
  misc_feature: MA Experiment 20000495 PARAMETER Experiment Name: At_Guard_Cells_P Parameter: Tissue Value: Guard Cells vs. Leaves
  misc_feature: MA Experiment ID: 20001555 Result: Down-regulated in Transcription
  misc_feature: MA Experiment 20001555 PARAMETER Experiment Name: At_Drought_Soil_Dry_P Parameter: Age (day) Value: 24
  misc_feature: MA Experiment 20001555 PARAMETER Experiment Name: At_Drought_Soil_Dry_P Parameter: Organism Value: A. thaliana
  misc_feature: MA Experiment 20001555 PARAMETER Experiment Name: At_Drought_Soil_Dry_P Parameter: Plant Line Value: WS
  misc_feature: MA Experiment 20001555 PARAMETER Experiment Name: At_Drought_Soil_Dry_P Parameter: Post Timepoint (hr) Value: None
  misc_feature: MA Experiment 20001555 PARAMETER Experiment Name: At_Drought_Soil_Dry_P Parameter: Post-Treatment Value: None
  misc_feature: MA Experiment 20001555 PARAMETER Experiment Name: At_Drought_Soil_Dry_P Parameter: Timepoint (day) Value: 10
  misc_feature: MA Experiment 20001555 PARAMETER Experiment Name: At_Drought_Soil_Dry_P Parameter: Treatment Value: Drought vs. No Drought
  misc_feature: MA Experiment ID: 20001556 Result: Down-regulated in Transcription
  misc_feature: MA Experiment 20001556 PARAMETER Experiment Name: At_Drought_Soil_Dry_P Parameter: Age (day) Value: 26
  misc_feature: MA Experiment 20001556 PARAMETER Experiment Name: At_Drought_Soil_Dry_P Parameter: Organism Value: A. thaliana
  misc_feature: MA Experiment 20001556 PARAMETER Experiment Name: At_Drought_Soil_Dry_P Parameter: Plant Line Value: WS
  misc_feature: MA Experiment 20001556 PARAMETER Experiment Name: At_Drought_Soil_Dry_P Parameter: Post Timepoint (hr) Value: None
  misc_feature: MA Experiment 20001556 PARAMETER Experiment Name: At_Drought_Soil_Dry_P Parameter: Post-Treatment Value: None
  misc_feature: MA Experiment 20001556 PARAMETER Experiment Name: At_Drought_Soil_Dry_P Parameter: Timepoint (day) Value: 12
  misc_feature: MA Experiment 20001556 PARAMETER Experiment Name: At_Drought_Soil_Dry_P Parameter: Treatment Value: Drought vs. No Drought
  misc_feature: MA Experiment ID: 20001911 Result: Down-regulated in Transcription
  misc_feature: MA Experiment 20001911 PARAMETER Experiment Name: At_Drought_Reproduction_P Parameter: Age (day) Value: 40
  misc_feature: MA Experiment 20001911 PARAMETER Experiment Name: At_Drought_Reproduction_P Parameter: Organism Value: A. thaliana
  misc_feature: MA Experiment 20001911 PARAMETER Experiment Name: At_Drought_Reproduction_P Parameter: Plant Line Value: WS
  misc_feature: MA Experiment 20001911 PARAMETER Experiment Name: At_Drought_Reproduction_P Parameter: Timepoint (day) Value: 10
  misc_feature: MA Experiment 20001911 PARAMETER Experiment Name: At_Drought_Reproduction_P Parameter: Tissue Value: Flowers
  misc_feature: MA Experiment 20001911 PARAMETER Experiment Name: At_Drought_Reproduction_P Parameter: Treatment Value: Drought vs. No Drought
atggtgaaatcagcagcttctcagtcaccatctccggtgactataacggtgacaccatgtaaaggatccggcgacagaagcttaggattgacgagtcctatcccacgcgcctccgtcatcaccaaccaaaactctcctctaagctcaagagccacgcgtcgcacttccattagcagcgggaatcggagatctaacggtgatgaaggaagatactgttctatgtctgtggaagatctaacggcggagacgactaattcagagtgcgttctgagctatactgttcatatcccacctacgccggatcatcagacggtgttcgcttcacaggagagtgaagaagacgagatgctaaaagggaattcgaatcaaaaaagtttcctctctgggacgattttcaccggtgggtttaaatcggtgacacgtggtcatgtgatcgattgttctatggatagagctgatccggagaagaagtcaggtcagatctgctggttaaaaggttgtgatgagaaagttgttcacgggagatgtgagtgtggtttccgaatctgtagagattgttactttgattgtatcacaagtggtggaggcaattgtcctggttgcaaagagccttatagggatatcaacgatgatccagagactgaggaagaagacgaagaagatgaggcgaaaccacttcctcagatgggtgaatcaaagcttgacaagaggctttcggttgtgaagtcgtttaaagcgcagaatcaagctggagattttgatcatactcggtggttgtttgagactaaaggtacttatgggtatgggaacgctgtttggcctaaagatgggtatggaatcgggtcgggtggtggtggaaacgggtatgaaacgccacctgagtttggggagagaagcaagaggcctcttactaggaaagtcagtgtctctgctgcaattatcagtccttacagattactcattgcactgcgtctggtggctcttggtttgttcctgacatggagggttcgccacccaaaccgagaagcaatgtggttgtggggaatgtcaacgacctgtgagctttggtttgccttgtcttggcttttggatcagcttccaaaactctgtccggttaacagattaactgatttaggtgttcttaaagaacgctttgagtctccaaacctcaggaaccccaaaggaagatctgatcttccgggtatcgatgtgtttgtctcaactgcagaccctgagaaagaaccacctctggtcacagccaacaccattctctcgatccttgctgttgattaccctgtggagaaacttgcttgctacttgtcagacgatggaggagctttgctaacatttgaagccttggctcaaacagctagctttgcaagtacatgggtgccattttgcaggaaacacaatatagagccaaggaaccctgaggcctactttggacagaagcgtaactttctcaagaacaaagtcaggctggattttgtgagggaaaggaggagagtgaagagagaatatgatgagtttaaggtcagaatcaactcattgcctgaagcgataaggagaaggtctgatgcttataacgtgcacgaagagctaagggctaagaagaaacagatggaaatgatgatgggaaacaatccacaagaaactgttatagttccaaaggccacttggatgtcagatggttctcactggccagggacttggtcctctggagaaaccgataactctcgaggagatcatgctggaatcattcaggcaatgttggctcctccaaatgcagaaccagtttatggagctgaagcagatgctgagaacttaattgatacaacagacgttgacatcaggctaccaatgctggtctatgtgtcgagagagaagcgtccgggttatgaccacaacaagaaagcaggagccatgaatgctttggttagaaccagcgcaattatgtctaatggcccattcatcctcaatcttgattgtgaccactacatctacaactctatggctttgagagaaggaatgtgcttcatgcttgatcgtggtggcgatagaatctgctatgttcagttccctcagaggtttgaaggtattgacccaaatgatcgttatgcaaaccacaacactgtcttctttgatgttagtatgagagctttggatggacttcaaggtccaatgtatgtgggaactggctgcatctttcggagaacagctctttatggatttagcccgccaagagcaactgaacatcatggctggcttggaagaagaaaagtcaagatatcgctgaggagaccaaaagccatgatgaagaaagacgatgaagtttctttgcctataaatggagaatacaacgaagaagagaatgatgatggagatattgaatctctgcttctcccaaagagatttggtaactcaaactctttcgttgcttcaatcccagttgctgaataccaagggagactcatacaagacttgcaaggcaaaggcaagaacagtagaccagctggctcacttgctgtcccacgtgaaccacttgatgcagccactgtagctgaagcaatcagtgtgatatcttgcttctatgaggacaaaactgaatggggtaaaagagttggatggatctatggatcagtgactgaagatgtagtcacgggatatcgaatgcacaacagaggatggagatcaatctactgcgtgacaaaaagagacgctttccgtggaacagctccgatcaatctaacggatagacttcaccaggttctgagatgggcaacaggatctgttgagatcttcttctcaaggaacaatgcaatttttgcaaccagaaggatgaagtttttgcagagagtggcttacttcaacgttggaatgtatccattcacatcgctattcctcatcgtctactgcattctccctgcgatttcgctcttctcgggtcaattcatagtccaatcactcgacataacgttcttgatctatctcctctcgataacactcacgctctgtatgctatcactccttgagatcaaatggtcaggcataactctccatgaatggtggagaaacgagcagttctgggtcataggaggtacaagcgcacaccctgcagctgttcttcagggtcttcttaaggtaattgcaggagttgatatctcatttaccttgacttccaagtcatctgcaccagaagatggagacgatgagtttgcggatctgtatgttgtgaaatggagctttttgatggttcctccattaactatcatgatggtgaatatgattgcaattgcggtggggctagcgaggactctgtacagtccgtttccacagtggagtaagcttgttggaggagtgttcttcagcttttgggtgctttgtcatctgtatccgtttgctaaaggattgatgggaagaagaggcagagttccgaccatagtgtttgtgtggtcaggtttgttgtcgattattgtgtcgttgctttgggtttatattaaccctccttcagggaaacaggactatatgcagtttcaattcccttga

SEQ ID NO: 98433 - protein, 1181 aa, Arabidopsis thaliana
  peptide (1)..(1181): Ceres Seq. ID no. 13593639
  misc_feature (303)..(1166): Homolog of NCBI NO: 15222596 NR Description: cellulose synthase family [Arabidopsis thaliana]
  misc_feature (533)..(1168): Homolog of NCBI NO: 9622888 NR Description: cellulose synthase-8 [Zea mays]
  misc_feature (266)..(517): Homolog of NCBI NO: 9622888 NR Description: cellulose synthase-8 [Zea mays]
  misc_feature (177)..(221): Homolog of NCBI NO: 9622888 NR Description: cellulose synthase-8 [Zea mays]
  misc_feature (578)..(1168): Homolog of NCBI NO: 6446577 NR Description: cellulose synthase catalytic subunit [Gossypium
  misc_feature (294)..(517): Homolog of NCBI NO: 6446577 NR Description: cellulose synthase catalytic subunit [Gossypium
  misc_feature (843)..(1173): Homolog of NCBI NO: 27462651 NR Description: cellulose synthase [Arabidopsis thaliana]
  misc_feature (299)..(526): Homolog of NCBI NO: 27462651 NR Description: cellulose synthase [Arabidopsis thaliana]
  misc_feature (578)..(747): Homolog of NCBI NO: 27462651 NR Description: cellulose synthase [Arabidopsis thaliana]
  misc_feature (843)..(1173): Homolog of NCBI NO: 9758562 NR Description: cellulose synthase catalytic subunit-like protein
MVKSAASQSPSPVTITVTPCKGSGDRSLGLTSPIPRASVITNQNSPLSSRATRRTSISSGNRRSNGDEGRYCSMSVEDLTAETTNSECVLSYTVHIPPTPDHQTVFASQESEEDEMLKGNSNQKSFLSGTIFTGGFKSVTRGHVIDCSMDRADPEKKSGQICWLKGCDEKVVHGRCECGFRICRDCYFDCITSGGGNCPGCKEPYRDINDDPETEEEDEEDEAKPLPQMGESKLDKRLSVVKSFKAQNQAGDFDHTRWLFETKGTYGYGNAVWPKDGYGIGSGGGGNGYETPPEFGERSKRPLTRKVSVSAAIISPYRLLIALRLVALGLFLTWRVRHPNREAMWLWGMSTTCELWFALSWLLDQLPKLCPVNRLTDLGVLKERFESPNLRNPKGRSDLPGIDVFVSTADPEKEPPLVTANTILSILAVDYPVEKLACYLSDDGGALLTFEALAQTASFASTWVPFCRKHNIEPRNPEAYFGQKRNFLKNKVRLDFVRERRRVKREYDEFKVRINSLPEAIRRRSDAYNVHEELRAKKKQMEMMMGNNPQETVIVPKATWMSDGSHWPGTWSSGETDNSRGDHAGIIQAMLAPPNAEPVYGAEADAENLIDTTDVDIRLPMLVYVSREKRPGYDHNKKAGAMNALVRTSAIMSNGPFILNLDCDHYIYNSMALREGMCFMLDRGGDRICYVQFPQRFEGIDPNDRYANHNTVFFDVSMRALDGLQGPMYVGTGCIFRRTALYGFSPPRATEHHGWLGRRKVKISLRRPKAMMKKDDEVSLPINGEYNEEENDDGDIESLLLPKRFGNSNSFVASIPVAEYQGRLIQDLQGKGKNSRPAGSLAVPREPLDAATVAEAISVISCFYEDKTEWGKRVGWIYGSVTEDVVTGYRMHNRGWRSIYCVTKRDAFRGTAPINLTDRLHQVLRWATGSVEIFFSRNNAIFATRRMKFLQRVAYFNVGMYPFTSLFLIVYCILPAISLFSGQFIVQSLDITFLIYLLSITLTLCMLSLLEIKWSGITLHEWWRNEQFWVIGGTSAHPAAVLQGLLKVIAGVDISFTLTSKSSAPEDGDDEFADLYVVKWSFLMVPPLTIMMVNMIAIAVGLARTLYSPFPQWSKLVGGVFFSFWVLCHLYPFAKGLMGRRGRVPTIVFVWSGLLSIIVSLLWVYINPPSGKQDYMQFQFP

SEQ ID NO: 98434 - protein, 1108 aa, Arabidopsis thaliana
  peptide (1)..(1108): Ceres Seq. ID no. 13593640
  misc_feature (230)..(1093): Homolog of NCBI NO: 15222596 NR Description: cellulose synthase family [Arabidopsis thaliana]
  misc_feature (460)..(1095): Homolog of NCBI NO: 9622888 NR Description: cellulose synthase-8 [Zea mays]
  misc_feature (193)..(444): Homolog of NCBI NO: 9622888 NR Description: cellulose synthase-8 [Zea mays]
  misc_feature (104)..(148): Homolog of NCBI NO: 9622888 NR Description: cellulose synthase-8 [Zea mays]
  misc_feature (505)..(1095): Homolog of NCBI NO: 6446577 NR Description: cellulose synthase catalytic subunit [Gossypium
  misc_feature (221)..(444): Homolog of NCBI NO: 6446577 NR Description: cellulose synthase catalytic subunit [Gossypium
  misc_feature (770)..(1100): Homolog of NCBI NO: 27462651 NR Description: cellulose synthase [Arabidopsis thaliana]
  misc_feature (226)..(453): Homolog of NCBI NO: 27462651 NR Description: cellulose synthase [Arabidopsis thaliana]
  misc_feature (505)..(674): Homolog of NCBI NO: 27462651 NR Description: cellulose synthase [Arabidopsis thaliana]
  misc_feature (770)..(1100): Homolog of NCBI NO: 9758562 NR Description: cellulose synthase catalytic subunit-like protein
MSVEDLTAETTNSECVLSYTVHIPPTPDHQTVFASQESEEDEMLKGNSNQKSFLSGTIFTGGFKSVTRGHVIDCSMDRADPEKKSGQICWLKGCDEKVVHGRCECGFRICRDCYFDCITSGGGNCPGCKEPYRDINDDPETEEEDEEDEAKPLPQMGESKLDKRLSVVKSFKAQNQAGDFDHTRWLFETKGTYGYGNAVWPKDGYGIGSGGGGNGYETPPEFGERSKRPLTRKVSVSAAIISPYRLLIALRLVALGLFLTWRVRHPNREAMWLWGMSTTCELWFALSWLLDQLPKLCPVNRLTDLGVLKERFESPNLRNPKGRSDLPGIDVFVSTADPEKEPPLVTANTILSILAVDYPVEKLACYLSDDGGALLTFEALAQTASFASTWVPFCRKHNIEPRNPEAYFGQKRNFLKNKVRLDFVRERRRVKREYDEFKVRINSLPEAIRRRSDAYNVHEELRAKKKQMEMMMGNNPQETVIVPKATWMSDGSHWPGTWSSGETDNSRGDHAGIIQAMLAPPNAEPVYGAEADAENLIDTTDVDIRLPMLVYVSREKRPGYDHNKKAGAMNALVRTSAIMSNGPFILNLDCDHYIYNSMALREGMCFMLDRGGDRICYVQFPQRFEGIDPNDRYANHNTVFFDVSMRALDGLQGPMYVGTGCIFRRTALYGFSPPRATEHHGWLGRRKVKISLRRPKAMMKKDDEVSLPINGEYNEEENDDGDIESLLLPKRFGNSNSFVASIPVAEYQGRLIQDLQGKGKNSRPAGSLAVPREPLDAATVAEAISVISCFYEDKTEWGKRVGWIYGSVTEDVVTGYRMHNRGWRSIYCVTKRDAFRGTAPINLTDRLHQVLRWATGSVEIFFSRNNAIFATRRMKFLQRVAYFNVGMYPFTSLFLIVYCILPAISLFSGQFIVQSLDITFLIYLLSITLTLCMLSLLEIKWSGITLHEWWRNEQFWVIGGTSAHPAAVLQGLLKVIAGVDISFTLTSKSSAPEDGDDEFADLYVVKWSFLMVPPLTIMMVNMIAIAVGLARTLYSPFPQWSKLVGGVFFSFWVLCHLYPFAKGLMGRRGRVPTIVFVWSGLLSIIVSLLWVYINPPSGKQDYMQFQFP

SEQ ID NO: 98435 - protein, 1066 aa, Arabidopsis thaliana
  peptide (1)..(1066): Ceres Seq. ID no. 13593641
  misc_feature (188)..(1051): Homolog of NCBI NO: 15222596 NR Description: cellulose synthase family [Arabidopsis thaliana]
  misc_feature (418)..(1053): Homolog of NCBI NO: 9622888 NR Description: cellulose synthase-8 [Zea mays]
  misc_feature (151)..(402): Homolog of NCBI NO: 9622888 NR Description: cellulose synthase-8 [Zea mays]
  misc_feature (62)..(106): Homolog of NCBI NO: 9622888 NR Description: cellulose synthase-8 [Zea mays]
  misc_feature (463)..(1053): Homolog of NCBI NO: 6446577 NR Description: cellulose synthase catalytic subunit [Gossypium
  misc_feature (179)..(402): Homolog of NCBI NO: 6446577 NR Description: cellulose synthase catalytic subunit [Gossypium
  misc_feature (728)..(1058): Homolog of NCBI NO: 27462651 NR Description: cellulose synthase [Arabidopsis thaliana]
  misc_feature (184)..(411): Homolog of NCBI NO: 27462651 NR Description: cellulose synthase [Arabidopsis thaliana]
  misc_feature (463)..(632): Homolog of NCBI NO: 27462651 NR Description: cellulose synthase [Arabidopsis thaliana]
  misc_feature (728)..(1058): Homolog of NCBI NO: 9758562 NR Description: cellulose synthase catalytic subunit-like protein
MLKGNSNQKSFLSGTIFTGGFKSVTRGHVIDCSMDRADPEKKSGQICWLKGCDEKVVHGRCECGFRICRDCYFDCITSGGGNCPGCKEPYRDINDDPETEEEDEEDEAKPLPQMGESKLDKRLSVVKSFKAQNQAGDFDHTRWLFETKGTYGYGNAVWPKDGYGIGSGGGGNGYETPPEFGERSKRPLTRKVSVSAAIISPYRLLIALRLVALGLFLTWRVRHPNREAMWLWGMSTTCELWFALSWLLDQLPKLCPVNRLTDLGVLKERFESPNLRNPKGRSDLPGIDVFVSTADPEKEPPLVTANTILSILAVDYPVEKLACYLSDDGGALLTFEALAQTASFASTWVPFCRKHNIEPRNPEAYFGQKRNFLKNKVRLDFVRERRRVKREYDEFKVRINSLPEAIRRRSDAYNVHEELRAKKKQMEMMMGNNPQETVIVPKATWMSDGSHWPGTWSSGETDNSRGDHAGIIQAMLAPPNAEPVYGAEADAENLIDTTDVDIRLPMLVYVSREKRPGYDHNKKAGAMNALVRTSAIMSNGPFILNLDCDHYIYNSMALREGMCFMLDRGGDRICYVQFPQRFEGIDPNDRYANHNTVFFDVSMRALDGLQGPMYVGTGCIFRRTALYGFSPPRATEHHGWLGRRKVKISLRRPKAMMKKDDEVSLPINGEYNEEENDDGDIESLLLPKRFGNSNSFVASIPVAEYQGRLIQDLQGKGKNSRPAGSLAVPREPLDAATVAEAISVISCFYEDKTEWGKRVGWIYGSVTEDVVTGYRMHNRGWRSIYCVTKRDAFRGTAPINLTDRLHQVLRWATGSVEIFFSRNNAIFATRRMKFLQRVAYFNVGMYPFTSLFLIVYCILPAISLFSGQFIVQSLDITFLIYLLSITLTLCMLSLLEIKWSGITLHEWWRNEQFWVIGGTSAHPAAVLQGLLKVIAGVDISFTLTSKSSAPEDGDDEFADLYVVKWSFLMVPPLTIMMVNMIAIAVGLARTLYSPFPQWSKLVGGVFFSFWVLCHLYPFAKGLMGRRGRVPTIVFVWSGLLSIIVSLLWVYINPPSGKQDYMQFQFP

SEQ ID NO: 98436 - DNA, 1632 bp, Arabidopsis thaliana
  misc_feature (1)..(1632): Ceres Seq. ID no. 13593661
  misc_feature: MA Experiment ID: 20000328 Result: Down-regulated in Transcription
  misc_feature: MA Experiment 20000328 PARAMETER Experiment Name: At_42deg_Heat_Sub_P Parameter: Age (day) Value: 14
  misc_feature: MA Experiment 20000328 PARAMETER Experiment Name: At_42deg_Heat_Sub_P Parameter: Organism Value: A. thaliana
  misc_feature: MA Experiment 20000328 PARAMETER Experiment Name: At_42deg_Heat_Sub_P Parameter: Plant Line Value: WS
  misc_feature: MA Experiment 20000328 PARAMETER Experiment Name: At_42deg_Heat_Sub_P Parameter: Temperature (deg C) Value: 42 vs. 22
  misc_feature: MA Experiment 20000328 PARAMETER Experiment Name: At_42deg_Heat_Sub_P Parameter: Timepoint (hr) Value: 6
  misc_feature: MA Experiment 20000328 PARAMETER Experiment Name: At_42deg_Heat_Sub_P Parameter: Tissue Value: Aerial
ctctctctcttctttctctttgtcatgaaccagtaatcttgtttctcttcatcttccattgacgtttccttctatcctcgttgccttcatttttcactcgcacgctaatcttcgcctactttgttagattttcggttttgggtttttgtcttttggtcgatttcccctgttcccagaatctccgattaagctgcttccttaatctcttgtctgaatataaactttttccggcgtgtaatttagataggtggttaaaattacgagtagtgagaggagtgttgttgctgttttgtttattcggtaaaacgaaatcggaagttctttgttgtcgtttgattccttttgagaaagagagatgttgggagctggatttaacttcactcagcttcagagagctcaaattgacgtctcttatggctgcagatcgagtcacactaaggatcgtgagaacggctctgcattgttgaaacaccatgtttctgaggcatcgtcaagtaatgtggaacggtttttggattcggtgacaccatctgttccggctcactatttatctaagacaatagttagggaaagaggaggcagtgatgttgagtctcaagttccttattttcttcttggagatgtatgggaatcgtttgcagagtggagtgcttatggcattggagttcctctcactttgaataacaataaagatcgtgtctttcaatactacgtgccctcgctttctggtattcaagtatacgctgatgttgatgctttaacttcatctcttcaagcaaggcggcaaggtgaggagagcgaaagcgattttagggattcaagtagtgaaggaagcagtagtgaatctgaaagaggactctgttattcaaaagagcagatctccgctagaatggacaaactctccttaagaaaggagcatcaagaagattcgtctagtgatgatggcgagcctttaagctctcaaggtcgtttgatatttgagtatcttgaacgtgatcttccttacgtccgtgaaccctttgccgacaagatgtctgaccttgcctctagatttcccgagctgaagacgctaagaagctgtgatttgcttccttcaagctggttttctgtggcatggtacccaatttacaaaatacccacaggaccgacactcaaggatctggatgcttgtttcttgacctatcattcccttcacacaccctttcaaggtccaggcgttacaacagggtctatgcatgtggtgcagccaagggaaagtgttgagaagatggaactgcctgtctttggtctcgcctcatacaagttgagaggttctgtatggacaagctttggtggctcgggccaccagctcgcgaactctctcttccaagccgcagataattggctgaggttgcgtcaagtcaaccatcctgatttcatcttcttctgccgccggtaatgatagattatactatgatgacgaaaaatgatataggaagttataaaaaggaactctttatgattactgtcttgaggaaaccttacatataggatactgtcaaaagtttttcatttggtagcttctgtaaattcacagaatgctagttttcttattgtgtgtaaaactgtttttgcaataaaggctaatagttg

SEQ ID NO: 98437 - protein, 360 aa, Arabidopsis thaliana
  peptide (1)..(360): Ceres Seq. ID no. 13593662
  misc_feature (47)..(357): Pfam Name: Protein of unknown function (DUF789) Pfam Description: Protein of unknown function (DUF789)
  misc_feature (1)..(360): Homolog of NCBI NO: 22329567 NR Description: expressed protein [Arabidopsis thaliana]
  misc_feature (10)..(360): Homolog of NCBI NO: 18379188 NR Description: expressed protein [Arabidopsis thaliana] predicted by genscan and genefinder [Arabidopsis thaliana]
  misc_feature (10)..(253): Homolog of NCBI NO: 25373432 NR Description: hypothetical protein At2g01260 [imported] -
  misc_feature (292)..(360): Homolog of NCBI NO: 25373432 NR Description: hypothetical protein At2g01260 [imported] -
  misc_feature (46)..(360): Homolog of NCBI NO: 34897254 NR Description: hypothetical protein [Oryza sativa (japonica group)] >gi|28372687|gb|AAO39871.1| hypothetical protein [Oryza
  misc_feature (45)..(357): Homolog of NCBI NO: 15450996 NR Description: Unknown protein [Arabidopsis thaliana]
  misc_feature (44)..(357): Homolog of NCBI NO: 10177151 NR Description: gb|AAF31026.1~gene_id:K21P3.10~similar to unknown
  misc_feature (44)..(357): Homolog of NCBI NO: 22327664 NR Description: expressed protein [Arabidopsis thaliana] unknown protein [Arabidopsis thaliana]
  misc_feature (179)..(360): Homolog of NCBI NO: 34914654 NR Description: P0504D03.18 [Oryza sativa (japonica
  misc_feature (46)..(131): Homolog of NCBI NO: 34914654 NR Description: P0504D03.18 [Oryza sativa (japonica
MLGAGFNFTQLQRAQIDVSYGCRSSHTKDRENGSALLKHHVSEASSSNVERFLDSVTPSVPAHYLSKTIVRERGGSDVESQVPYFLLGDVWESFAEWSAYGIGVPLTLNNNKDRVFQYYVPSLSGIQVYADVDALTSSLQARRQGEESESDFRDSSSEGSSSESERGLCYSKEQISARMDKLSLRKEHQEDSSSDDGEPLSSQGRLIFEYLERDLPYVREPFADKMSDLASRFPELKTLRSCDLLPSSWFSVAWYPIYKIPTGPTLKDLDACFLTYHSLHTPFQGPGVTTGSMHVVQPRESVEKMELPVFGLASYKLRGSVWTSFGGSGHQLANSLFQAADNWLRLRQVNHPDFIFFCRR

SEQ ID NO: 98438 - protein, 182 aa, Arabidopsis thaliana
  peptide (1)..(182): Ceres Seq. ID no. 13593663
  misc_feature (1)..(179): Pfam Name: Protein of unknown function (DUF789) Pfam Description: Protein of unknown function (DUF789)
  misc_feature (1)..(182): Homolog of NCBI NO: 22329567 NR Description: expressed protein [Arabidopsis thaliana]
  misc_feature (1)..(182): Homolog of NCBI NO: 18379188 NR Description: expressed protein [Arabidopsis thaliana] predicted by genscan and genefinder [Arabidopsis thaliana]
  misc_feature (1)..(75): Homolog of NCBI NO: 25373432 NR Description: hypothetical protein At2g01260 [imported] -
  misc_feature (114)..(182): Homolog of NCBI NO: 25373432 NR Description: hypothetical protein At2g01260 [imported] -
  misc_feature (1)..(182): Homolog of NCBI NO: 34897254 NR Description: hypothetical protein [Oryza sativa (japonica group)] >gi|28372687|gb|AAO39871.1| hypothetical protein [Oryza
  misc_feature (1)..(179): Homolog of NCBI NO: 15450996 NR Description: Unknown protein [Arabidopsis thaliana]
  misc_feature (1)..(179): Homolog of NCBI NO: 10177151 NR Description: gb|AAF31026.1~gene_id:K21P3.10~similar to unknown
  misc_feature (1)..(179): Homolog of NCBI NO: 22327664 NR Description: expressed protein [Arabidopsis thaliana] unknown protein [Arabidopsis thaliana]
  misc_feature (1)..(182): Homolog of NCBI NO: 34914654 NR Description: P0504D03.18 [Oryza sativa (japonica
  misc_feature (1)..(180): Homolog of NCBI NO: 18958013 NR Description: At1g03610/F21B7_13 [Arabidopsis thaliana]
MDKLSLRKEHQEDSSSDDGEPLSSQGRLIFEYLERDLPYVREPFADKMSDLASRFPELKTLRSCDLLPSSWFSVAWYPIYKIPTGPTLKDLDACFLTYHSLHTPFQGPGVTTGSMHVVQPRESVEKMELPVFGLASYKLRGSVWTSFGGSGHQLANSLFQAADNWLRLRQVNHPDFIFFCRR

SEQ ID NO: 98439 - DNA, 1161 bp, Arabidopsis thaliana
  misc_feature (1)..(1161): Ceres Seq. ID no. 13593693
  misc_feature: MA Experiment ID: 20000355 Result: Up-regulated in Transcription
  misc_feature: MA Experiment 20000355 PARAMETER Experiment Name: At_Siliques_Sub_P Parameter: Age (day) Value: 21
  misc_feature: MA Experiment 20000355 PARAMETER Experiment Name: At_Siliques_Sub_P Parameter: Organism Value: A. thaliana
  misc_feature: MA Experiment 20000355 PARAMETER Experiment Name: At_Siliques_Sub_P Parameter: Plant Line Value: WS
  misc_feature: MA Experiment 20000355 PARAMETER Experiment Name: At_Siliques_Sub_P Parameter: Tissue Value: Less Than 5mm Siliques vs. Whole Plant
  misc_feature: MA Experiment ID: 20000440 Result: Up-regulated in Transcription
  misc_feature: MA Experiment 20000440 PARAMETER Experiment Name: At_Closed-Flower__Sub_P Parameter: Tissue Value: Closed Flower vs. Whole Plant
atgaaaatcaattgcttgttctgttgtatgtcccacagacgatttaacagacgatcatcatcgagacaaagcatcaaagactgcattgatgcaaagaacaatataactacatttgacaacatctcttttaaaacagatagcagtaggcgaagatacatatccgaggagatagcaaaactcggtaaagggaacatcagtgctcatatttttacattcagagagctttgcgtcgctaccaagaacttcaaccccgataatcagctcggtgaaggcgggtttggaagggtttacaaagggcagatagaaaccccggaacaagttgttgcggttaagcagctagacaggaatggttaccaagggaacagagagtttcttgtggaagtcatgatgttgagtctcttacatcatcaaaaccttgtcaatttggtcggatattgcgcagacggtgatcaacggattcttgtctatgaatacatgcaaaatggctctttagaggatcatcttctagaattggcgcggaacaagaagaagccgttggattgggacacaagaatgaaagttgcggcaggagcagctagagggcttgagtatctacacgaaacagcagatcctcctgttatctacagagacttcaaggcctcaaatatattacttgacgaagaattcaacccaaagctttcggatttcggtttagctaaggttggtccgaccggtggagagactcatgtgtcaacgagagtgatgggaacatacggctattgtgcgcctgagtatgctctcacaggacagctcactgtgaaatccgatgtatacagcttcggagtcgtgttcttggagatgatcacaggaagacgagtcattgacacaacaaaaccaactgaagaacagaacttagtcacttgggcgagtccattgttcaaagataggagaaagttcacgttaatggcagatccattgcttgaaggaaagtatccaataaaaggattgtatcaagcgcttgcagtagcagcaatgtgtcttcaagaagaagcagcaacgagaccaatgatgagtgatgtagtcactgcgcttgagtacttagccgtgaccaaaaccgaagaagatggacaaactgtagaaggagaagaagaagaagaagaagacgaaagatccaaactttga

SEQ ID NO: 98440 - protein, 386 aa, Arabidopsis thaliana
  peptide (1)..(386): Ceres Seq. ID no. 13593694
  misc_feature (1)..(386): Homolog of NCBI NO: 15232294 NR Description: protein kinase family [Arabidopsis thaliana]
  misc_feature (1)..(386): Homolog of NCBI NO: 28392990 NR Description: putative protein kinase [Arabidopsis thaliana]
  misc_feature (10)..(386): Homolog of NCBI NO: 11994140 NR Description: receptor protein kinase-like protein [Arabidopsis
  misc_feature (5)..(361): Homolog of NCBI NO: 15238886 NR Description: protein kinase family [Arabidopsis thaliana]
  misc_feature (64)..(385): Homolog of NCBI NO: 34907210 NR Description: putative serine/threonine kinase PBS1 protein
  misc_feature (39)..(361): Homolog of NCBI NO: 15240038 NR Description: protein kinase family [Arabidopsis thaliana]
  misc_feature (18)..(374): Homolog of NCBI NO: 11259782 NR Description: protein kinase-like - Arabidopsis thaliana
  misc_feature (18)..(374): Homolog of NCBI NO: 30679773 NR Description: protein kinase family [Arabidopsis thaliana]
  misc_feature (44)..(361): Homolog of NCBI NO: 34395193 NR Description: putative protein serine/threonine kinase [Oryza
  misc_feature (39)..(381): Homolog of NCBI NO: 34908796 NR Description: protein kinase-like [Oryza sativa (japonica
MKINCLFCCMSHRRFNRRSSSRQSIKDCIDAKNNITTFDNISFKTDSSRRRYISEEIAKLGKGNISAHIFTFRELCVATKNFNPDNQLGEGGFGRVYKGQIETPEQVVAVKQLDRNGYQGNREFLVEVMMLSLLHHQNLVNLVGYCADGDQRILVYEYMQNGSLEDHLLELARNKKKPLDWDTRMKVAAGAARGLEYLHETADPPVIYRDFKASNILLDEEFNPKLSDFGLAKVGPTGGETHVSTRVMGTYGYCAPEYALTGQLTVKSDVYSFGVVFLEMITGRRVIDTTKPTEEQNLVTWASPLFKDRRKFTLMADPLLEGKYPIKGLYQALAVAAMCLQEEAATRPMMSDVVTALEYLAVTKTEEDGQTVEGEEEEEEDERSKL

SEQ ID NO: 98441 - protein, 377 aa, Arabidopsis thaliana
  peptide (1)..(377): Ceres Seq. ID no. 13593695
  misc_feature (1)..(377): Homolog of NCBI NO: 15232294 NR Description: protein kinase family [Arabidopsis thaliana]
  misc_feature (1)..(377): Homolog of NCBI NO: 28392990 NR Description: putative protein kinase [Arabidopsis thaliana]
  misc_feature (1)..(377): Homolog of NCBI NO: 11994140 NR Description: receptor protein kinase-like protein [Arabidopsis
  misc_feature (1)..(352): Homolog of NCBI NO: 15238886 NR Description: protein kinase family [Arabidopsis thaliana]
  misc_feature (55)..(376): Homolog of NCBI NO: 34907210 NR Description: putative serine/threonine kinase PBS1 protein
  misc_feature (30)..(352): Homolog of NCBI NO: 15240038 NR Description: protein kinase family [Arabidopsis thaliana]
  misc_feature (9)..(365): Homolog of NCBI NO: 11259782 NR Description: protein kinase-like - Arabidopsis thaliana
  misc_feature (9)..(365): Homolog of NCBI NO: 30679773 NR Description: protein kinase family [Arabidopsis thaliana]
  misc_feature (35)..(352): Homolog of NCBI NO: 34395193 NR Description: putative protein serine/threonine kinase [Oryza
  misc_feature (30)..(372): Homolog of NCBI NO: 34908796 NR Description: protein kinase-like [Oryza sativa (japonica
MSHRRFNRRSSSRQSIKDCIDAKNNITTFDNISFKTDSSRRRYISEEIAKLGKGNISAHIFTFRELCVATKNFNPDNQLGEGGFGRVYKGQIETPEQVVAVKQLDRNGYQGNREFLVEVMMLSLLHHQNLVNLVGYCADGDQRILVYEYMQNGSLEDHLLELARNKKKPLDWDTRMKVAAGAARGLEYLHETADPPVIYRDFKASNILLDEEFNPKLSDFGLAKVGPTGGETHVSTRVMGTYGYCAPEYALTGQLTVKSDVYSFGVVFLEMITGRRVIDTTKPTEEQNLVTWASPLFKDRRKFTLMADPLLEGKYPIKGLYQALAVAAMCLQEEAATRPMMSDVVTALEYLAVTKTEEDGQTVEGEEEEEEDERSKL

SEQ ID NO: 98442 - protein, 258 aa, Arabidopsis thaliana
  peptide (1)..(258): Ceres Seq. ID no. 13593696
  misc_feature (1)..(258): Homolog of NCBI NO: 15232294 NR Description: protein kinase family [Arabidopsis thaliana]
  misc_feature (1)..(258): Homolog of NCBI NO: 28392990 NR Description: putative protein kinase [Arabidopsis thaliana]
  misc_feature (1)..(258): Homolog of NCBI NO: 11994140 NR Description: receptor protein kinase-like protein [Arabidopsis
  misc_feature (1)..(233): Homolog of NCBI NO: 15238886 NR Description: protein kinase family [Arabidopsis thaliana]
  misc_feature (1)..(257): Homolog of NCBI NO: 34907210 NR Description: putative serine/threonine kinase PBS1 protein
  misc_feature (1)..(233): Homolog of NCBI NO: 15240038 NR Description: protein kinase family [Arabidopsis thaliana]
  misc_feature (1)..(246): Homolog of NCBI NO: 11259782 NR Description: protein kinase-like - Arabidopsis thaliana
  misc_feature (1)..(246): Homolog of NCBI NO: 30679773 NR Description: protein kinase family [Arabidopsis thaliana]
  misc_feature (1)..(233): Homolog of NCBI NO: 34395193 NR Description: putative protein serine/threonine kinase [Oryza
  misc_feature (1)..(253): Homolog of NCBI NO: 34908796 NR Description: protein kinase-like [Oryza sativa (japonica
MMLSLLHHQNLVNLVGYCADGDQRILVYEYMQNGSLEDHLLELARNKKKPLDWDTRMKVAAGAARGLEYLHETADPPVIYRDFKASNILLDEEFNPKLSDFGLAKVGPTGGETHVSTRVMGTYGYCAPEYALTGQLTVKSDVYSFGVVFLEMITGRRVIDTTKPTEEQNLVTWASPLFKDRRKFTLMADPLLEGKYPIKGLYQALAVAAMCLQEEAATRPMMSDVVTALEYLAVTKTEEDGQTVEGEEEEEEDERSKL

SEQ ID NO: 98443 - DNA, 1965 bp, Arabidopsis thaliana
  misc_feature (1)..(1965): Ceres Seq. ID no. 13593698
  misc_feature: MA Experiment ID: 20000185 Result: Up-regulated in Transcription
  misc_feature: MA Experiment 20000185 PARAMETER Experiment Name: At_Roots__P Parameter: Age (day) Value: 7 vs. 21
  misc_feature: MA Experiment 20000185 PARAMETER Experiment Name: At_Roots__P Parameter: Organism Value: A. thaliana
  misc_feature: MA Experiment 20000185 PARAMETER Experiment Name: At_Roots__P Parameter: Tissue Value: Roots vs. Whole Plant
  misc_feature: MA Experiment ID: 20000234 Result: Up-regulated in Transcription
  misc_feature: MA Experiment 20000234 PARAMETER Experiment Name: At_Siliques_P Parameter: Age (day) Value: 21
  misc_feature: MA Experiment 20000234 PARAMETER Experiment Name: At_Siliques_P Parameter: Organism Value: A. thaliana
  misc_feature: MA Experiment 20000234 PARAMETER Experiment Name: At_Siliques_P Parameter: Plant Line Value: WS
  misc_feature: MA Experiment 20000234 PARAMETER Experiment Name: At_Siliques_P Parameter: Tissue Value: Less Than 5mm Siliques vs. Whole Plant
  misc_feature: MA Experiment ID: 20000264 Result: Up-regulated in Transcription
  misc_feature: MA Experiment 20000264 PARAMETER Experiment Name: At_Open_Flower_P Parameter: Age (day) Value: 21
  misc_feature: MA Experiment 20000264 PARAMETER Experiment Name: At_Open_Flower_P Parameter: Plant Line Value: WS
  misc_feature: MA Experiment 20000264 PARAMETER Experiment Name: At_Open_Flower_P Parameter: Tissue Value: Open Flower vs. Whole Plant
  misc_feature: MA Experiment ID: 20000286 Result: Up-regulated in Transcription
  misc_feature: MA Experiment 20000286 PARAMETER Experiment Name: At_Open_Flower_P Parameter: Age (day) Value: 21
  misc_feature: MA Experiment 20000286 PARAMETER Experiment Name: At_Open_Flower_P Parameter: Plant Line Value: WS
  misc_feature: MA Experiment 20000286 PARAMETER Experiment Name: At_Open_Flower_P Parameter: Tissue Value: Half Open vs. Whole Plant
  misc_feature: MA Experiment ID: 20000437 Result: Down-regulated in Transcription
  misc_feature: MA Experiment 20000437 PARAMETER Experiment Name: At_Drought_P Parameter: Age (day) Value: 8
  misc_feature: MA Experiment 20000437 PARAMETER Experiment Name: At_Drought_P Parameter: Organism Value: A. thaliana
  misc_feature: MA Experiment 20000437 PARAMETER Experiment Name: At_Drought_P Parameter: Plant Line Value: WS
  misc_feature: MA Experiment 20000437 PARAMETER Experiment Name: At_Drought_P Parameter: Timepoint (hr) Value: 24
  misc_feature: MA Experiment 20000437 PARAMETER Experiment Name: At_Drought_P Parameter: Tissue Value: Whole Plant
  misc_feature: MA Experiment 20000437 PARAMETER Experiment Name: At_Drought_P Parameter: Treatment Value: Drought vs. No Drought
  misc_feature: MA Experiment ID: 20000439 Result: Up-regulated in Transcription
  misc_feature: MA Experiment 20000439 PARAMETER Experiment Name: At_Roots__P Parameter: Age (day) Value: 14 vs. 21
  misc_feature: MA Experiment 20000439 PARAMETER Experiment Name: At_Roots__P Parameter: Organism Value: A. thaliana
  misc_feature: MA Experiment 20000439 PARAMETER Experiment Name: At_Roots__P Parameter: Tissue Value: Roots vs. Whole Plant
  misc_feature: MA Experiment ID: 20000495 Result: Down-regulated in Transcription
  misc_feature: MA Experiment 20000495 PARAMETER Experiment Name: At_Guard_Cells_P Parameter: Harvest Date Value: 8/2/2002
  misc_feature: MA Experiment 20000495 PARAMETER Experiment Name: At_Guard_Cells_P Parameter: Organism Value: A. thaliana
  misc_feature: MA Experiment 20000495 PARAMETER Experiment Name: At_Guard_Cells_P Parameter: Tissue Value: Guard Cells vs. Leaves
  misc_feature: MA Experiment ID: 20001451 Result: Down-regulated in Transcription
  misc_feature: MA Experiment 20001451 PARAMETER Experiment Name: At_Far-red-induction_P Parameter: Age (day) Value: 7
  misc_feature: MA Experiment 20001451 PARAMETER Experiment Name: At_Far-red-induction_P Parameter: Light Value: Far-red vs. White
  misc_feature: MA Experiment 20001451 PARAMETER Experiment Name: At_Far-red-induction_P Parameter: Organism Value: A. thaliana
  misc_feature: MA Experiment 20001451 PARAMETER Experiment Name: At_Far-red-induction_P Parameter: Plant Line Value: Columbia
  misc_feature: MA Experiment 20001451 PARAMETER Experiment Name: At_Far-red-induction_P Parameter: Timepoint (hr) Value: 24
  misc_feature: MA Experiment 20001451 PARAMETER Experiment Name: At_Far-red-induction_P Parameter: Tissue Value: Whole Plant
  misc_feature: MA Experiment ID: 20001558 Result: Up-regulated in Transcription
  misc_feature: MA Experiment 20001558 PARAMETER Experiment Name: At_Drought_Soil_Dry_P Parameter: Age (day) Value: 27
  misc_feature: MA Experiment 20001558 PARAMETER Experiment Name: At_Drought_Soil_Dry_P Parameter: Organism Value: A. thaliana
  misc_feature: MA Experiment 20001558 PARAMETER Experiment Name: At_Drought_Soil_Dry_P Parameter: Plant Line Value: WS
  misc_feature: MA Experiment 20001558 PARAMETER Experiment Name: At_Drought_Soil_Dry_P Parameter: Post Timepoint (hr) Value: 6
  misc_feature: MA Experiment 20001558 PARAMETER Experiment Name: At_Drought_Soil_Dry_P Parameter: Post-Treatment Value: Re-Water vs. No Drought
  misc_feature: MA Experiment 20001558 PARAMETER Experiment Name: At_Drought_Soil_Dry_P Parameter: Timepoint (day) Value: 13
  misc_feature: MA Experiment 20001558 PARAMETER Experiment Name: At_Drought_Soil_Dry_P Parameter: Treatment Value: Drought vs. No Drought
  misc_feature: MA Experiment ID: 20001757 Result: Up-regulated in Transcription
  misc_feature: MA Experiment 20001757 PARAMETER Experiment Name: At_50mM_NH4NO3_L-to-H_P Parameter: Timepoint (hr) Value: 6
  misc_feature: MA Experiment 20001757 PARAMETER Experiment Name: At_50mM_NH4NO3_L-to-H_P Parameter: Tissue Value: Leaf
  misc_feature: MA Experiment 20001757 PARAMETER Experiment Name: At_50mM_NH4NO3_L-to-H_P Parameter: Treatment Value: 50mM NH4NO3 vs 100mM Mannitol
  misc_feature: MA Experiment ID: 20001911 Result: Down-regulated in Transcription
  misc_feature: MA Experiment 20001911 PARAMETER Experiment Name: At_Drought_Reproduction_P Parameter: Age (day) Value: 40
  misc_feature: MA Experiment 20001911 PARAMETER Experiment Name: At_Drought_Reproduction_P Parameter: Organism Value: A. thaliana
  misc_feature: MA Experiment 20001911 PARAMETER Experiment Name: At_Drought_Reproduction_P Parameter: Plant Line Value: WS
  misc_feature: MA Experiment 20001911 PARAMETER Experiment Name: At_Drought_Reproduction_P Parameter: Timepoint (day) Value: 10
  misc_feature: MA Experiment 20001911 PARAMETER Experiment Name: At_Drought_Reproduction_P Parameter: Tissue Value: Flowers
  misc_feature: MA Experiment 20001911 PARAMETER Experiment Name: At_Drought_Reproduction_P Parameter: Treatment Value: Drought vs. No Drought
gaagtgaactccattgacgacgagtgaacgaaaggagggaagaaaaaagttaggttcgaaacgaaagtaaactagttaggtgaaaagcgaaacaacacccacagagcaatggcccctgctctcgccgttacacgagatctcaccgccgtcggatctccggagaatgctcctgcgaaaggacgtgcttcggtttacagtgaagttcaatcaagccgtattaacaacactcttcctttgccttctgttctcaaaggagctttcaaaatcgtcgaaggtcccgctagttccgccgccgggaatccagatgagatagcgaagttgtttccgggtctatatggccagccatcagtagcagtggttccagatcaggatgcaccttcgtcggcaccgaaattgaagattggtgttgttttgtctggaggtcaggcacctggtgggcacaatgttatttctggactgtttgattacctgcaagagcgtgcgaaaggtagcacattttacgggttcaagggtggtccagctggtatcatgaaatgcaaatatgttgagttgaatgctgaatatattcagccttacagaaaccagggtggttttgacatgatctgcagtggaagagacaagattgaaacacctgaccagtttaaacaagctgaagaaacagcaaagaagcttgatttggatgggttggtggttatcggtggagatgattccaacaccaatgcttgccttcttgctgaaaacttcaggagtaagaacttgaaaacccgagtcattgggtgccccaagaccattgatggtgatttgaaatgcaaagaggttcctactagttttgggtttgatacagcttgcaagatttactctgaaatgatcggaaacgtcatgattgatgcaaggtcgactggaaagtactatcattttgtaagacttatgggtcgtgctgcttcccacattacgcttgagtgtgctttacaaactcacccaaacataaccattattggagaagaggtttctgcccagaagcagactttgaagaatgtcacagactacatggtggatgttatctgcaaacgtgctgaacttggttacaactacggtgtcatactgattccagaaggtctgatcgactttattcctgaggtccaagagctcattgctgaactgaatgaaattctggcaaatgaggttgtcgatgaaaatggtttgtggaagaagaagctcaccgagcaatccctgaagctgtttgatcttctgcctgaagcaattcaggaacagctgatgcttgagagagacccacacggaaatgtccaggttgctaagattgagactgagaagatgcttattcaaatggttgaaactgaattggagaaaagaaagcaagctggtgcatacaagggacaattcatgggacagtcacatttcttcgggtatgaaggaagatgcggcttgcccacaaattttgatgccacatactgttatgcacttggttatggcgctggagtactcctcaacagtgggaagaccggactaatttcttcggttgggaacttggctgctcctgtggaagaatggactgtaggtgggactgctctcacagccttgatggatgtcgagaggagacacggtaagttcaagcctgtgatcaagaaagcaatggtggaacttgaaggtgcaccatttaagaaattcgcatcactgcgtgaagaatgggcattgaagaaccgatacatcagcccaggtccgatccaattcactggacctggttcagactctctcagccacactctacttcttgaactcggggctcaatagtctctcgactaaccaccattcctttgcttttctgccttccttggaatttcgcatcagtcttgttttatcttgaatattacgtgtccgtaacatttcgattaagttgattcctctcgtgtttcttcaacatataagataattataatattatttctc

SEQ ID NO: 98444 - protein, 566 aa, Arabidopsis thaliana; identical to SEQ ID NO: 38319
  peptide (1)..(566): Ceres Seq. ID no. 13593699
  misc_feature (97)..(383): Pfam Name: Phosphofructokinase Pfam Description: Phosphofructokinase
  misc_feature (1)..(566): Homolog of NCBI NO: 15221156 NR Description: pyrophosphate-fructose-6-phosphate - related [Arabidopsis thaliana] >gi|17064794|gb|AAL32551.1|
  misc_feature (1)..(566): Homolog of NCBI NO: 25314952 NR Description: hypothetical protein [imported] - Arabidopsis
  misc_feature (1)..(566): Homolog of NCBI NO: 3790100 NR Description: pyrophosphate-dependent phosphofructokinase beta
  misc_feature (21)..(565): Homolog of NCBI NO: 2499489 NR Description: Pyrophosphate--fructose 6-phosphate
  misc_feature (91)..(566): Homolog of NCBI NO: 30679628 NR Description: phosphofructokinase beta subunit -related
  misc_feature (19)..(120): Homolog of NCBI NO: 30679628 NR Description: phosphofructokinase beta subunit -related
  misc_feature (26)..(564): Homolog of NCBI NO: 2507174 NR Description: PYROPHOSPHATE--FRUCTOSE 6-PHOSPHATE
  misc_feature (19)..(566): Homolog of NCBI NO: 7447689 NR Description: diphosphate-fructose-6-phosphate
  misc_feature (76)..(564): Homolog of NCBI NO: 100462 NR Description: diphosphate-fructose-6-phosphate
  misc_feature (30)..(566): Homolog of NCBI NO: 11528427 NR Description: pyrophosphate-dependent phosphofructokinase

SEQ ID NO: 98445 - protein, 426 aa, Arabidopsis thaliana; identical to SEQ ID NO: 38320
  peptide (1)..(426): Ceres Seq. ID no. 13593700
  misc_feature (1)..(243): Pfam Name: Phosphofructokinase Pfam Description: Phosphofructokinase
  misc_feature (1)..(426): Homolog of NCBI NO: 15221156 NR Description: pyrophosphate-fructose-6-phosphate - related [Arabidopsis thaliana] >gi|17064794|gb|AAL32551.1|
  misc_feature (1)..(426): Homolog of NCBI NO: 25314952 NR Description: hypothetical protein [imported] - Arabidopsis
  misc_feature (1)..(426): Homolog of NCBI NO: 3790100 NR Description: pyrophosphate-dependent phosphofructokinase beta
  misc_feature (1)..(425): Homolog of NCBI NO: 2499489 NR Description: Pyrophosphate--fructose 6-phosphate
  misc_feature (1)..(426): Homolog of NCBI NO: 30679628 NR Description: phosphofructokinase beta subunit -related
  misc_feature (1)..(424): Homolog of NCBI NO: 2507174 NR Description: PYROPHOSPHATE--FRUCTOSE 6-PHOSPHATE
  misc_feature (1)..(426): Homolog of NCBI NO: 7447689 NR Description: diphosphate-fructose-6-phosphate
  misc_feature (1)..(424): Homolog of NCBI NO: 100462 NR Description: diphosphate-fructose-6-phosphate
  misc_feature (1)..(426): Homolog of NCBI NO: 11528427 NR Description: pyrophosphate-dependent phosphofructokinase
  misc_feature (1)..(422): Homolog of NCBI NO: 34540025 NR Description: phosphofructokinase [Porphyromonas gingivalis >gi|10801546|dbj|BAB16715.1| phosphofructokinase [Porphyromonas >gi|34396336|gb|AAQ65403.1| phosphofructokinase [Porphyromonas

SEQ ID NO: 98446 - protein, 403 aa, Arabidopsis thaliana; identical to SEQ ID NO: 38321
  peptide (1)..(403): Ceres Seq. ID no. 13593701
  misc_feature (1)..(220): Pfam Name: Phosphofructokinase Pfam Description: Phosphofructokinase
  misc_feature (1)..(403): Homolog of NCBI NO: 15221156 NR Description: pyrophosphate-fructose-6-phosphate - related [Arabidopsis thaliana] >gi|17064794|gb|AAL32551.1|
  misc_feature (1)..(403): Homolog of NCBI NO: 25314952 NR Description: hypothetical protein [imported] - Arabidopsis
  misc_feature (1)..(403): Homolog of NCBI NO: 3790100 NR Description: pyrophosphate-dependent phosphofructokinase beta
  misc_feature (1)..(402): Homolog of NCBI NO: 2499489 NR Description: Pyrophosphate--fructose 6-phosphate
  misc_feature (1)..(403): Homolog of NCBI NO: 30679628 NR Description: phosphofructokinase beta subunit -related
  misc_feature (1)..(401): Homolog of NCBI NO: 2507174 NR Description: PYROPHOSPHATE--FRUCTOSE 6-PHOSPHATE
  misc_feature (1)..(403): Homolog of NCBI NO: 7447689 NR Description: diphosphate-fructose-6-phosphate
  misc_feature (1)..(401): Homolog of NCBI NO: 100462 NR Description: diphosphate-fructose-6-phosphate
  misc_feature (1)..(403): Homolog of NCBI NO: 11528427 NR Description: pyrophosphate-dependent phosphofructokinase
  misc_feature (1)..(399): Homolog of NCBI NO: 34540025 NR Description: phosphofructokinase [Porphyromonas gingivalis >gi|10801546|dbj|BAB16715.1| phosphofructokinase [Porphyromonas >gi|34396336|gb|AAQ65403.1| phosphofructokinase [Porphyromonas

SEQ ID NO: 98447 - DNA, 1559 bp, Arabidopsis thaliana
  misc_feature (1)..(1559): Ceres Seq. ID no. 13593720
  misc_feature: MA Experiment ID: 20000180 Result: Up-regulated in Transcription
  misc_feature: MA Experiment 20000180 PARAMETER Experiment Name: At_Germinating_Seeds_P Parameter: Age (hr) Value: 24 vs. 0
  misc_feature: MA Experiment 20000180 PARAMETER Experiment Name: At_Germinating_Seeds_P Parameter: Tissue Value: Germinating Seeds
  misc_feature: MA Experiment ID: 20000184 Result: Up-regulated in Transcription
  misc_feature: MA Experiment 20000184 PARAMETER Experiment Name: At_Shoots__P Parameter: Age (day) Value: 7
  misc_feature: MA Experiment 20000184 PARAMETER Experiment Name: At_Shoots__P Parameter: Tissue Value: Shoots vs. Whole Plant
  misc_feature: MA Experiment ID: 20000185 Result: Down-regulated in Transcription
  misc_feature: MA Experiment 20000185 PARAMETER Experiment Name: At_Roots__P Parameter: Age (day) Value: 7 vs. 21
  misc_feature: MA Experiment 20000185 PARAMETER Experiment Name: At_Roots__P Parameter: Organism Value: A. thaliana
  misc_feature: MA Experiment 20000185 PARAMETER Experiment Name: At_Roots__P Parameter: Tissue Value: Roots vs. Whole Plant
  misc_feature: MA Experiment ID: 20000214 Result: Up-regulated in Transcription
  misc_feature: MA Experiment 20000214 PARAMETER Experiment Name: At_4deg_Cold_P Parameter: Timepoint (hr) Value: 6
  misc_feature: MA Experiment ID: 20000227 Result: Down-regulated in Transcription
  misc_feature: MA Experiment 20000227 PARAMETER Experiment Name: At_Root-Tips-vs-Tops_P Parameter: Tissue Value: Root Tips vs. Root Tops
  misc_feature: MA Experiment ID: 20000438 Result: Up-regulated in Transcription
  misc_feature: MA Experiment 20000438 PARAMETER Experiment Name: At_Shoots__P Parameter: Age (day) Value: 14
  misc_feature: MA Experiment 20000438 PARAMETER Experiment Name: At_Shoots__P Parameter: Tissue Value: Shoots vs. Whole Plant
  misc_feature: MA Experiment ID: 20000439 Result: Down-regulated in Transcription
  misc_feature: MA Experiment 20000439 PARAMETER Experiment Name: At_Roots__P Parameter: Age (day) Value: 14 vs. 21
  misc_feature: MA Experiment 20000439 PARAMETER Experiment Name: At_Roots__P Parameter: Organism Value: A. thaliana
  misc_feature: MA Experiment 20000439 PARAMETER Experiment Name: At_Roots__P Parameter: Tissue Value: Roots vs. Whole Plant
  misc_feature: MA Experiment ID: 20000794 Result: Down-regulated in Transcription
  misc_feature: MA Experiment 20000794 PARAMETER Experiment Name: At_Petals_P Parameter: Age (day) Value: 23-25 days
  misc_feature: MA Experiment 20000794 PARAMETER Experiment Name: At_Petals_P Parameter: Plant Line Value: WS
  misc_feature: MA Experiment 20000794 PARAMETER Experiment Name: At_Petals_P Parameter: Tissue Value: Petals vs. Whole plant
  misc_feature: MA Experiment ID: 20001450 Result: Down-regulated in Transcription
  misc_feature: MA Experiment 20001450 PARAMETER Experiment Name: At_Far-red-induction_P Parameter: Age (day) Value: 7
  misc_feature: MA Experiment 20001450 PARAMETER Experiment Name: At_Far-red-induction_P Parameter: Light Value: Far-red vs. White
  misc_feature: MA Experiment 20001450 PARAMETER Experiment Name: At_Far-red-induction_P Parameter: Organism Value: A. thaliana
  misc_feature: MA Experiment 20001450 PARAMETER Experiment Name: At_Far-red-induction_P Parameter: Plant Line Value: Columbia
  misc_feature: MA Experiment 20001450 PARAMETER Experiment Name: At_Far-red-induction_P Parameter: Timepoint (hr) Value: 8
  misc_feature: MA Experiment 20001450 PARAMETER Experiment Name: At_Far-red-induction_P Parameter: Tissue Value: Whole Plant
  misc_feature: MA Experiment ID: 20001904 Result: Down-regulated in Transcription
  misc_feature: MA Experiment 20001904 PARAMETER Experiment Name: At_Drought_Reproduction_P Parameter: Age (day) Value: 37
  misc_feature: MA Experiment 20001904 PARAMETER Experiment Name: At_Drought_Reproduction_P Parameter: Organism Value: A. thaliana
  misc_feature: MA Experiment 20001904 PARAMETER Experiment Name: At_Drought_Reproduction_P Parameter: Plant Line Value: WS
  misc_feature: MA Experiment 20001904 PARAMETER Experiment Name: At_Drought_Reproduction_P Parameter: Timepoint (day) Value: 7
  misc_feature: MA Experiment 20001904 PARAMETER Experiment Name: At_Drought_Reproduction_P Parameter: Tissue Value: Rosettes
  misc_feature: MA Experiment 20001904 PARAMETER Experiment Name: At_Drought_Reproduction_P Parameter: Treatment Value: Drought vs. No Drought
  misc_feature: MA Experiment ID: 20001905 Result: Down-regulated in Transcription
  misc_feature: MA Experiment 20001905 PARAMETER Experiment Name: At_Drought_Reproduction_P Parameter: Age (day) Value: 40
  misc_feature: MA Experiment 20001905 PARAMETER Experiment Name: At_Drought_Reproduction_P Parameter: Organism Value: A. thaliana
  misc_feature: MA Experiment 20001905 PARAMETER Experiment Name: At_Drought_Reproduction_P Parameter: Plant Line Value: WS
  misc_feature: MA Experiment 20001905 PARAMETER Experiment Name: At_Drought_Reproduction_P Parameter: Timepoint (day) Value: 10
  misc_feature: MA Experiment 20001905 PARAMETER Experiment Name: At_Drought_Reproduction_P Parameter: Tissue Value: Rosettes
  misc_feature: MA Experiment 20001905 PARAMETER Experiment Name: At_Drought_Reproduction_P Parameter: Treatment Value: Drought vs. No Drought
  misc_feature: MA Experiment ID: 20001908 Result: Down-regulated in Transcription
  misc_feature: MA Experiment 20001908 PARAMETER Experiment Name: At_Drought_Reproduction_P Parameter: Age (day) Value: 40
  misc_feature: MA Experiment 20001908 PARAMETER Experiment Name: At_Drought_Reproduction_P Parameter: Organism Value: A. thaliana
  misc_feature: MA Experiment 20001908 PARAMETER Experiment Name: At_Drought_Reproduction_P Parameter: Plant Line Value: WS
  misc_feature: MA Experiment 20001908 PARAMETER Experiment Name: At_Drought_Reproduction_P Parameter: Timepoint (day) Value: 10
  misc_feature: MA Experiment 20001908 PARAMETER Experiment Name: At_Drought_Reproduction_P Parameter: Tissue Value: Siliques
  misc_feature: MA Experiment 20001908 PARAMETER Experiment Name: At_Drought_Reproduction_P Parameter: Treatment Value: Drought vs. No Drought
agcattcctagatttttccttcttgtgatcacttgcagctatggccacacatgcagctctcgccgtctcaagaatcccggtcacacagcgactgcagtctaagagtgccattcactctttccctgctcaatgctcctccaagaggctagaagtcgctgaattctccggtctgcgtatgagtagtatcggtggggaagcatctttcttcgatgctgtagctgcacaaatcatccctaaggctgtgacaacatcaactcctgttagaggagagacagtggcgaaactgaaagttgcgattaacggttttggaaggattggtaggaactttcttaggtgttggcatggtcgtaaagactctcctctcgaagttgttgtacttaacgacagtggtggtgtcaagaatgcatcccacttgcttaagtatgactccatgcttggaaccttcaaggctgaagtgaaaattgtggacaatgaaactattagtgttgatggtaagctcatcaaagttgtctccaacagagaccctcttaagcttccatgggctgagctcggcattgacattgttatcgagggaacaggagtgtttgttgatgggccaggagcagggaagcatatccaagccggagcctcgaaagttatcatcactgcaccagccaaaggtgctgatatccctacctatgttatgggagtcaatgagcaagactatggtcacgatgtcgctaacattattagcaatgcatcttgcaccaccaactgtttggcaccttttgctaaagtcttggatgaagaatttggaattgtcaaggggacaatgacaaccacacactcctacaccggagaccaaaggcttctagatgcatcacacagggacctaaggcgtgcaagagccgcagcactgaacatagtgcctaccagcacaggagcagccaaggcggtgtcattagtgttgccgcagctgaagggtaaacttaacggcattgcactccgtgtgccaacaccaaacgtctcagtggttgaccttgttataaacgttgagaagaaaggtttgacagcagaggatgtgaacgaggcctttagaaaagccgctaatggaccgatgaaaggcattttagacgtttgcgatgcgcctcttgtctctgttgacttcaggtgctctgatgtctctaccaccattgactcgtccctcactatggttatgggtgatgatatggtcaaggtggttgcttggtatgataacgagtggggttacagccaaagagtggtggatttggctcacctagtggctagcaagtggccgggagcggaagctgttggaagtggagatcctttggaggatttctgcaagacaaacccggctgatgaggaatgcaaagtctatgactgaacaactttgatcatttctttctttatttttcaccaaaacaatactttgtatcatgagttacttattcgaaatcgtactatgcatacttgtttttctcataagattttcttgtctgatgaacaactatatgttaagactgagagaattgtatttgagaaataaccattttatgcta

SEQ ID NO: 98448 - protein, 447 aa, Arabidopsis thaliana; identical to SEQ ID NO: 49987
  peptide (1)..(447): Ceres Seq. ID no. 13593721
  misc_feature (236)..(397): Pfam Name: Glyceraldehyde 3-phosphate dehydrogenase, Pfam Description: Glyceraldehyde 3-phosphate dehydrogenase,
  misc_feature (1)..(447): Homolog of NCBI NO: 15217555 NR Description: glyceraldehyde-3-phosphate dehydrogenase
  misc_feature (46)..(447): Homolog of NCBI NO: 81621 NR Description: glyceraldehyde-3-phosphate dehydrogenase (NADP)
  misc_feature (1)..(447): Homolog of NCBI NO: 120663 NR Description: Glyceraldehyde 3-phosphate dehydrogenase B,
  misc_feature (5)..(447): Homolog of NCBI NO: 20733 NR Description: precursor C-terminal fragment (AA -80 to 367)
  misc_feature (1)..(447): Homolog of NCBI NO: 66028 NR Description: glyceraldehyde-3-phosphate dehydrogenase (NADP)
  misc_feature (1)..(447): Homolog of NCBI NO: 120664 NR Description: Glyceraldehyde 3-phosphate dehydrogenase B,
  misc_feature (1)..(447): Homolog of NCBI NO: 6063542 NR Description: EST C74302(E30840) corresponds to a region of the
  misc_feature (31)..(421): Homolog of NCBI NO: 120665 NR Description: Glyceraldehyde 3-phosphate dehydrogenase B,
  misc_feature (1)..(431): Homolog of NCBI NO: 18076102 NR Description: glyceraldehyde-3-phosphate dehydrogenase
  misc_feature (83)..(447): Homolog of NCBI NO: 18073141 NR Description: glyceraldehyde-3-phosphate dehydrogenase [Chara

SEQ ID NO: 98449 - protein, 402 aa, Arabidopsis thaliana; identical to SEQ ID NO: 49988
  peptide (1)..(402): Ceres Seq. ID no. 13593722
  misc_feature (191)..(352): Pfam Name: Glyceraldehyde 3-phosphate dehydrogenase, Pfam Description: Glyceraldehyde 3-phosphate dehydrogenase,
  misc_feature (1)..(402): Homolog of NCBI NO: 15217555 NR Description: glyceraldehyde-3-phosphate dehydrogenase
  misc_feature (1)..(402): Homolog of NCBI NO: 81621 NR Description: glyceraldehyde-3-phosphate dehydrogenase (NADP)
  misc_feature (1)..(402): Homolog of NCBI NO: 120663 NR Description: Glyceraldehyde 3-phosphate dehydrogenase B,
  misc_feature (1)..(402): Homolog of NCBI NO: 20733 NR Description: precursor C-terminal fragment (AA -80 to 367)
  misc_feature (1)..(402): Homolog of NCBI NO: 66028 NR Description: glyceraldehyde-3-phosphate dehydrogenase (NADP)
  misc_feature (1)..(402): Homolog of NCBI NO: 120664 NR Description: Glyceraldehyde 3-phosphate dehydrogenase B,
  misc_feature (1)..(402): Homolog of NCBI NO: 6063542 NR Description: EST C74302(E30840) corresponds to a region of the
  misc_feature (1)..(376): Homolog of NCBI NO: 120665 NR Description: Glyceraldehyde 3-phosphate dehydrogenase B,
  misc_feature (1)..(386): Homolog of NCBI NO: 18076102 NR Description: glyceraldehyde-3-phosphate dehydrogenase
  misc_feature (38)..(402): Homolog of NCBI NO: 18073141 NR Description: glyceraldehyde-3-phosphate dehydrogenase [Chara

SEQ ID NO: 98450 - protein, 317 aa, Arabidopsis thaliana; identical to SEQ ID NO: 49989
  peptide (1)..(317): Ceres Seq. ID no. 13593723
  misc_feature (106)..(267): Pfam Name: Glyceraldehyde 3-phosphate dehydrogenase, Pfam Description: Glyceraldehyde 3-phosphate dehydrogenase,
  misc_feature (1)..(317): Homolog of NCBI NO: 15217555 NR Description: glyceraldehyde-3-phosphate dehydrogenase
  misc_feature (1)..(317): Homolog of NCBI NO: 81621 NR Description: glyceraldehyde-3-phosphate dehydrogenase (NADP)
  misc_feature (1)..(317): Homolog of NCBI NO: 120663 NR Description: Glyceraldehyde 3-phosphate dehydrogenase B,
  misc_feature (1)..(317): Homolog of NCBI NO: 20733 NR Description: precursor C-terminal fragment (AA -80 to 367)
  misc_feature (1)..(317): Homolog of NCBI NO: 66028 NR Description: glyceraldehyde-3-phosphate dehydrogenase (NADP)
  misc_feature (1)..(317): Homolog of NCBI NO: 120664 NR Description: Glyceraldehyde 3-phosphate dehydrogenase B,
  misc_feature (1)..(317): Homolog of NCBI NO: 6063542 NR Description: EST C74302(E30840) corresponds to a region of the
  misc_feature (1)..(291): Homolog of NCBI NO: 120665 NR Description: Glyceraldehyde 3-phosphate dehydrogenase B,
  misc_feature (1)..(301): Homolog of NCBI NO: 18076102 NR Description: glyceraldehyde-3-phosphate dehydrogenase
  misc_feature (1)..(317): Homolog of NCBI NO: 18073141 NR Description: glyceraldehyde-3-phosphate dehydrogenase [Chara

SEQ ID NO: 98451 - DNA, 1247 bp, Arabidopsis thaliana
  misc_feature (1)..(1247): Ceres Seq. ID no. 13593724
  misc_feature: MA Experiment ID: 108434 Result: Up-regulated in Transcription
  misc_feature: MA Experiment 108434 PARAMETER Experiment Name: At_Root_Tips_cDNA_P Parameter: Tissue Value: Root Tips
  misc_feature: MA Experiment ID: 20000111 Result: Down-regulated in Transcription
  misc_feature: MA Experiment 20000111 PARAMETER Experiment Name: At_42deg_Heat_cDNA_P Parameter: Temperature (deg C) Value: 42 vs. 22
  misc_feature: MA Experiment 20000111 PARAMETER Experiment Name: At_42deg_Heat_cDNA_P Parameter: Timepoint (hr) Value: 6
  misc_feature: MA Experiment 20000111 PARAMETER Experiment Name: At_42deg_Heat_cDNA_P Parameter: Tissue Value: Aerial
  misc_feature: MA Experiment ID: 20000113 Result: Down-regulated in Transcription
  misc_feature: MA Experiment 20000113 PARAMETER Experiment Name: At_42deg_Heat_cDNA_P Parameter: Temperature (deg C) Value: 42 vs. 22
  misc_feature: MA Experiment 20000113 PARAMETER Experiment Name: At_42deg_Heat_cDNA_P Parameter: Timepoint (hr) Value: 8
  misc_feature: MA Experiment 20000113 PARAMETER Experiment Name: At_42deg_Heat_cDNA_P Parameter: Tissue Value: Aerial
  misc_feature: MA Experiment ID: 20000234 Result: Up-regulated in Transcription
  misc_feature: MA Experiment 20000234 PARAMETER Experiment Name: At_Siliques_P Parameter: Age (day) Value: 21
  misc_feature: MA Experiment 20000234 PARAMETER Experiment Name: At_Siliques_P Parameter: Organism Value: A. thaliana
  misc_feature: MA Experiment 20000234 PARAMETER Experiment Name: At_Siliques_P Parameter: Plant Line Value: WS
  misc_feature: MA Experiment 20000234 PARAMETER Experiment Name: At_Siliques_P Parameter: Tissue Value: Less Than 5mm Siliques vs. Whole Plant
  misc_feature: MA Experiment ID: 20000286 Result: Up-regulated in Transcription
  misc_feature: MA Experiment 20000286 PARAMETER Experiment Name: At_Open_Flower_P Parameter: Age (day) Value: 21
  misc_feature: MA Experiment 20000286 PARAMETER Experiment Name: At_Open_Flower_P Parameter: Plant Line Value: WS
  misc_feature: MA Experiment 20000286 PARAMETER Experiment Name: At_Open_Flower_P Parameter: Tissue Value: Half Open vs. Whole Plant
  misc_feature: MA Experiment ID: 20001451 Result: Down-regulated in Transcription
  misc_feature: MA Experiment 20001451 PARAMETER Experiment Name: At_Far-red-induction_P Parameter: Age (day) Value: 7
  misc_feature: MA Experiment 20001451 PARAMETER Experiment Name: At_Far-red-induction_P Parameter: Light Value: Far-red vs. White
  misc_feature: MA Experiment 20001451 PARAMETER Experiment Name: At_Far-red-induction_P Parameter: Organism Value: A. thaliana
  misc_feature: MA Experiment 20001451 PARAMETER Experiment Name: At_Far-red-induction_P Parameter: Plant Line Value: Columbia
  misc_feature: MA Experiment 20001451 PARAMETER Experiment Name: At_Far-red-induction_P Parameter: Timepoint (hr) Value: 24
  misc_feature: MA Experiment 20001451 PARAMETER Experiment Name: At_Far-red-induction_P Parameter: Tissue Value: Whole Plant
agaaagttgatggaggagattgttcgttttgtgaacgcttcaatggcataaatttccggccatcacatttcttctactttctctttctctctcccttgttgttgttctctagaattcgattcatcgttgttaacgtcgtccattcttcttctttgatcccttctttgatctctcacatttccgattccaatttagggtttcctctcttttcacatttctagggtttttcttgttccctttgtaccggagatggtgaattgaaaggaaaaataaaacgcttttgagagcttatatttgaggttgtttcctcaggttttgtagatctgaggttgctatttttgaattagagattcttttttttttttttcaaaattttgtttgttgtgatcatacatagacgtacgtagctccatttctggtggagaaggaagaagaagagaaatgagcgcttcgaggttcataaagtgtgtcaccgttggcgacggagctgttggtaaaacctgtttgctgatttcttacaccagcaacacttttcctacggattatgtaccgactgttttcgataactttagcgcaaatgtggttgttaatggagccactgtgaatcttgggctatgggataccgcagggcaggaggattataacagattaagacctttgagttaccgcggtgctgatgttttcatcttagcattctctcttatcagtaaggctagttatgagaatgtctccaagaagtggatcccagagctgaagcattatgcccctggtgtccctatagttcttgttggaaccaaactagatcttcgggatgacaaacagttcttcattgaccaccctggcgctgtaccaattactactgctcagggagaggaactgaagaaactaattggagctcccgcatacatcgagtgcagttcaaaaacacaagagaacgtgaaaggagtatttgatgcagcgatccgagtggttcttcaacctccaaagcagaagaaaaagaaaagcaaagcacaaaaagcctgctccattttgtaatttctctacgcttctcttacgtatctctctctgtctctctgtctcttccactcttctagtgaaggcttaagaagaaaacacattgggcttaaaaattgttccagagttcgttgtgataagctctcttaatccttaaaaaaacgattatttctgtttattgatgaatagtttccagctttagctgagacctaatattgcacttaccacttctc

SEQ ID NO: 98452 - protein, 197 aa, Arabidopsis thaliana; identical to SEQ ID NO: 22405
  peptide (1)..(197): Ceres Seq. ID no. 13593725
  misc_feature (8)..(179): Pfam Name: Ras family Pfam Description: Ras family
  misc_feature (1)..(197): Homolog of NCBI NO: 15227902 NR Description: Rac-like GTP-binding protein (ARAC1) [Arabidopsis
  misc_feature (1)..(197): Homolog of NCBI NO: 15233418 NR Description: GTP-binding protein, putative [Arabidopsis
  misc_feature (1)..(197): Homolog of NCBI NO: 2500195 NR Description: RAC-LIKE GTP BINDING PROTEIN RHO1
  misc_feature (1)..(197): Homolog of NCBI NO: 15230443 NR Description: GTP binding protein, putative [Arabidopsis
  misc_feature (1)..(197): Homolog of NCBI NO: 27413417 NR Description: putative ROP family GTPase [Brassica napus]
  misc_feature (1)..(197): Homolog of NCBI NO: 2500199 NR Description: RAC-LIKE GTP BINDING PROTEIN RHO1
  misc_feature (1)..(197): Homolog of NCBI NO: 14278856 NR Description: Rac-like GTPase 1 [Nicotiana tabacum]
  misc_feature (1)..(197): Homolog of NCBI NO: 20269985 NR Description: small G-protein ROP6 [Medicago truncatula]
  misc_feature (1)..(196): Homolog of NCBI NO: 27413411 NR Description: putative ROP family GTPase [Brassica napus]
  misc_feature (1)..(197): Homolog of NCBI NO: 4097581 NR Description: NTGP2 [Nicotiana tabacum]

SEQ ID NO: 98453 - DNA, 1086 bp, Arabidopsis thaliana
  misc_feature (1)..(1086): Ceres Seq. ID no. 13593730
  misc_feature: MA Experiment ID: 20000185 Result: Down-regulated in Transcription
  misc_feature: MA Experiment 20000185 PARAMETER Experiment Name: At_Roots__P Parameter: Age (day) Value: 7 vs. 21
  misc_feature: MA Experiment 20000185 PARAMETER Experiment Name: At_Roots__P Parameter: Organism Value: A. thaliana
  misc_feature: MA Experiment 20000185 PARAMETER Experiment Name: At_Roots__P Parameter: Tissue Value: Roots vs. Whole Plant
  misc_feature: MA Experiment ID: 20000234 Result: Up-regulated in Transcription
  misc_feature: MA Experiment 20000234 PARAMETER Experiment Name: At_Siliques_P Parameter: Age (day) Value: 21
  misc_feature: MA Experiment 20000234 PARAMETER Experiment Name: At_Siliques_P Parameter: Organism Value: A. thaliana
  misc_feature: MA Experiment 20000234 PARAMETER Experiment Name: At_Siliques_P Parameter: Plant Line Value: WS
  misc_feature: MA Experiment 20000234 PARAMETER Experiment Name: At_Siliques_P Parameter: Tissue Value: Less Than 5mm Siliques vs. Whole Plant
  misc_feature: MA Experiment ID: 20000264 Result: Up-regulated in Transcription
  misc_feature: MA Experiment 20000264 PARAMETER Experiment Name: At_Open_Flower_P Parameter: Age (day) Value: 21
  misc_feature: MA Experiment 20000264 PARAMETER Experiment Name: At_Open_Flower_P Parameter: Plant Line Value: WS
  misc_feature: MA Experiment 20000264 PARAMETER Experiment Name: At_Open_Flower_P Parameter: Tissue Value: Open Flower vs. Whole Plant
  misc_feature: MA Experiment ID: 20000265 Result: Up-regulated in Transcription
  misc_feature: MA Experiment 20000265 PARAMETER Experiment Name: At_Open_Flower_P Parameter: Age (day) Value: 21
  misc_feature: MA Experiment 20000265 PARAMETER Experiment Name: At_Open_Flower_P Parameter: Plant Line Value: WS
  misc_feature: MA Experiment 20000265 PARAMETER Experiment Name: At_Open_Flower_P Parameter: Tissue Value: Closed Flower vs. Whole Plant
  misc_feature: MA Experiment ID: 20000286 Result: Up-regulated in Transcription
  misc_feature: MA Experiment 20000286 PARAMETER Experiment Name: At_Open_Flower_P Parameter: Age (day) Value: 21
  misc_feature: MA Experiment 20000286 PARAMETER Experiment Name: At_Open_Flower_P Parameter: Plant Line Value: WS
  misc_feature: MA Experiment 20000286 PARAMETER Experiment Name: At_Open_Flower_P Parameter: Tissue Value: Half Open vs. Whole Plant
  misc_feature: MA Experiment ID: 20000438 Result: Down-regulated in Transcription
  misc_feature: MA Experiment 20000438 PARAMETER Experiment Name: At_Shoots__P Parameter: Age (day) Value: 14
  misc_feature: MA Experiment 20000438 PARAMETER Experiment Name: At_Shoots__P Parameter: Tissue Value: Shoots vs. Whole Plant
  misc_feature: MA Experiment ID: 20000439 Result: Down-regulated in Transcription
  misc_feature: MA Experiment 20000439 PARAMETER Experiment Name: At_Roots__P Parameter: Age (day) Value: 14 vs. 21
  misc_feature: MA Experiment 20000439 PARAMETER Experiment Name: At_Roots__P Parameter: Organism Value: A. thaliana
  misc_feature: MA Experiment 20000439 PARAMETER Experiment Name: At_Roots__P Parameter: Tissue Value: Roots vs. Whole Plant
  misc_feature: MA Experiment ID: 20000794 Result: Up-regulated in Transcription
  misc_feature: MA Experiment 20000794 PARAMETER Experiment Name: At_Petals_P Parameter: Age (day) Value: 23-25 days
  misc_feature: MA Experiment 20000794 PARAMETER Experiment Name: At_Petals_P Parameter: Plant Line Value: WS
  misc_feature: MA Experiment 20000794 PARAMETER Experiment Name: At_Petals_P Parameter: Tissue Value: Petals vs. Whole plant
  misc_feature: MA Experiment ID: 20001451 Result: Up-regulated in Transcription
  misc_feature: MA Experiment 20001451 PARAMETER Experiment Name: At_Far-red-induction_P Parameter: Age (day) Value: 7
  misc_feature: MA Experiment 20001451 PARAMETER Experiment Name: At_Far-red-induction_P Parameter: Light Value: Far-red vs. White
  misc_feature: MA Experiment 20001451 PARAMETER Experiment Name: At_Far-red-induction_P Parameter: Organism Value: A. thaliana
  misc_feature: MA Experiment 20001451 PARAMETER Experiment Name: At_Far-red-induction_P Parameter: Plant Line Value: Columbia
  misc_feature: MA Experiment 20001451 PARAMETER Experiment Name: At_Far-red-induction_P Parameter: Timepoint (hr) Value: 24
  misc_feature: MA Experiment 20001451 PARAMETER Experiment Name: At_Far-red-induction_P Parameter: Tissue Value: Whole Plant
  misc_feature: MA Experiment ID: 20001757 Result: Down-regulated in Transcription
  misc_feature: MA Experiment 20001757 PARAMETER Experiment Name: At_50mM_NH4NO3_L-to-H_P Parameter: Timepoint (hr) Value: 6
  misc_feature: MA Experiment 20001757 PARAMETER Experiment Name: At_50mM_NH4NO3_L-to-H_P Parameter: Tissue Value: Leaf
  misc_feature: MA Experiment 20001757 PARAMETER Experiment Name: At_50mM_NH4NO3_L-to-H_P Parameter: Treatment Value: 50mM NH4NO3 vs 100mM Mannitol
  misc_feature: MA Experiment ID: 20001905 Result: Up-regulated in Transcription
  misc_feature: MA Experiment 20001905 PARAMETER Experiment Name: At_Drought_Reproduction_P Parameter: Age (day) Value: 40
  misc_feature: MA Experiment 20001905 PARAMETER Experiment Name: At_Drought_Reproduction_P Parameter: Organism Value: A. thaliana
  misc_feature: MA Experiment 20001905 PARAMETER Experiment Name: At_Drought_Reproduction_P Parameter: Plant Line Value: WS
  misc_feature: MA Experiment 20001905 PARAMETER Experiment Name: At_Drought_Reproduction_P Parameter: Timepoint (day) Value: 10
  misc_feature: MA Experiment 20001905 PARAMETER Experiment Name: At_Drought_Reproduction_P Parameter: Tissue Value: Rosettes
  misc_feature: MA Experiment 20001905 PARAMETER Experiment Name: At_Drought_Reproduction_P Parameter: Treatment Value: Drought vs. No Drought
atgggttacatttcaatgtccgtggttgcattccttgttgtttttgcttcgccggtggttctagccaccgatacagatccgattccagaaaacagagcccaaatcccgcaatggtttaaaacaaacgttaaaccatattcccagagaaagggcacgctagaccccgccctcgaagctgctgaagcagcgcgacaaattatcaccgtgaatcaaaaaggtggcgctaatttcaagacattaaacgaagctatcaagagcattccgacaggaaacaagaaccgtgtgatcatcaagttggctcctggtgtatacaatgagaaggtcacaatcgacatagctcgaccattcattacattgcttggtcaacctggtgcggaaacggtcttgacttaccacgggacagccgctcagtacggaaccgttgagagtgcaactcttatcgtctgggctgaatatttccaggcagctcacctcaccattaaaaacactgctccaatgccgaaaccaggttcacagggacaagctctagcaatgaggatcaacgctgataaggcagctttctatagttgtagattccatggttttcaagatactctctgtgacgacaagggcaaccatttcttcaaggattgttacatcgaaggaacttatgattttatctttggaagaggagcttccttgtacttgaatacgcaattgcacgctgttggagatggattaagagtgatcacagctcaaggtagacaaagtgcaaccgaacaaaacggatacacgttcgtgcactgcaaagtcactggaaccggaaccggaatctatttgggcaggtcttggatgagccaccctaaagtcgtctatgctttcacagagatgaccagcgtggtcaatccatctggctggagggagaacctcaaccgcggatatgacaagacggtgttctatggagaatacaagtgtttcggaccagggtcacacttagagaagagagtgccttacacacaagatattgacaaaaacgaagttacgcctttcctcactcttggttacattaagggctccacatggctacttcctcctcctaaatactga

SEQ ID NO: 98454 - protein, 361 aa, Arabidopsis thaliana
  peptide (1)..(361): Ceres Seq. ID no. 13593731
  misc_feature (67)..(352): Pfam Name: Pectinesterase Pfam Description: Pectinesterase
  misc_feature (1)..(361): Homolog of NCBI NO: 15240792 NR Description: pectinesterase family [Arabidopsis thaliana]
  misc_feature (1)..(361): Homolog of NCBI NO: 15240781 NR Description: pectinesterase family [Arabidopsis thaliana]
  misc_feature (1)..(359): Homolog of NCBI NO: 30697951 NR Description: pectinesterase family [Arabidopsis thaliana]
  misc_feature (1)..(359): Homolog of NCBI NO: 18415486 NR Description: pectinesterase family [Arabidopsis thaliana]
  misc_feature (3)..(361): Homolog of NCBI NO: 9758483 NR Description: pectin methylesterase-like protein [Arabidopsis
  misc_feature (19)..(359): Homolog of NCBI NO: 11358603 NR Description: pectin methyl-esterase-like protein - Arabidopsis
  misc_feature (19)..(359): Homolog of NCBI NO: 21593398 NR Description: pectin methyl-esterase-like protein [Arabidopsis
  misc_feature (19)..(359): Homolog of NCBI NO: 25404855 NR Description: probable pectin methylesterase T17F3.3 [imported] Arabidopsis thaliana >gi|12325236|gb|AAG52566.1|AC010675_14
  misc_feature (69)..(361): Homolog of NCBI NO: 15240325 NR Description: pectinesterase family [Arabidopsis thaliana]
  misc_feature (67)..(355): Homolog of NCBI NO: 15241163 NR Description: pectinesterase family [Arabidopsis thaliana] putative pectin methylesterase [Arabidopsis thaliana]
MGYISMSVVAFLVVFASPVVLATDTDPIPENRAQIPQWFKTNVKPYSQRKGTLDPALEAAEAARQIITVNQKGGANFKTLNEAIKSIPTGNKNRVIIKLAPGVYNEKVTIDIARPFITLLGQPGAETVLTYHGTAAQYGTVESATLIVWAEYFQAAHLTIKNTAPMPKPGSQGQALAMRINADKAAFYSCRFHGFQDTLCDDKGNHFFKDCYIEGTYDFIFGRGASLYLNTQLHAVGDGLRVITAQGRQSATEQNGYTFVHCKVTGTGTGIYLGRSWMSHPKVVYAFTEMTSVVNPSGWRENLNRGYDKTVFYGEYKCFGPGSHLEKRVPYTQDIDKNEVTPFLTLGYIKGSTWLLPPPKY

SEQ ID NO: 98455 - protein, 356 aa, Arabidopsis thaliana
  peptide (1)..(356): Ceres Seq. ID no. 13593732
  misc_feature (62)..(347): Pfam Name: Pectinesterase Pfam Description: Pectinesterase
  misc_feature (1)..(356): Homolog of NCBI NO: 15240792 NR Description: pectinesterase family [Arabidopsis thaliana]
  misc_feature (1)..(356): Homolog of NCBI NO: 15240781 NR Description: pectinesterase family [Arabidopsis thaliana]
  misc_feature (1)..(354): Homolog of NCBI NO: 30697951 NR Description: pectinesterase family [Arabidopsis thaliana]
  misc_feature (1)..(354): Homolog of NCBI NO: 18415486 NR Description: pectinesterase family [Arabidopsis thaliana]
  misc_feature (1)..(356): Homolog of NCBI NO: 9758483 NR Description: pectin methylesterase-like protein [Arabidopsis
  misc_feature (14)..(354): Homolog of NCBI NO: 11358603 NR Description: pectin methyl-esterase-like protein - Arabidopsis
  misc_feature (14)..(354): Homolog of NCBI NO: 21593398 NR Description: pectin methyl-esterase-like protein [Arabidopsis
  misc_feature (14)..(354): Homolog of NCBI NO: 25404855 NR Description: probable pectin methylesterase T17F3.3 [imported] Arabidopsis thaliana >gi|12325236|gb|AAG52566.1|AC010675_14
  misc_feature (64)..(356): Homolog of NCBI NO: 15240325 NR Description: pectinesterase family [Arabidopsis thaliana]
  misc_feature (62)..(350): Homolog of NCBI NO: 15241163 NR Description: pectinesterase family [Arabidopsis thaliana] putative pectin methylesterase [Arabidopsis thaliana]
MSVVAFLVVFASPVVLATDTDPIPENRAQIPQWFKTNVKPYSQRKGTLDPALEAAEAARQIITVNQKGGANFKTLNEAIKSIPTGNKNRVIIKLAPGVYNEKVTIDIARPFITLLGQPGAETVLTYHGTAAQYGTVESATLIVWAEYFQAAHLTIKNTAPMPKPGSQGQALAMRINADKAAFYSCRFHGFQDTLCDDKGNHFFKDCYIEGTYDFIFGRGASLYLNTQLHAVGDGLRVITAQGRQSATEQNGYTFVHCKVTGTGTGIYLGRSWMSHPKVVYAFTEMTSVVNPSGWRENLNRGYDKTVFYGEYKCFGPGSHLEKRVPYTQDIDKNEVTPFLTLGYIKGSTWLLPPPKY

SEQ ID NO: 98456 - protein, 196 aa, Arabidopsis thaliana
  peptide (1)..(196): Ceres Seq. ID no. 13593733
  misc_feature (1)..(187): Pfam Name: Pectinesterase Pfam Description: Pectinesterase
  misc_feature (1)..(196): Homolog of NCBI NO: 15240792 NR Description: pectinesterase family [Arabidopsis thaliana]
  misc_feature (1)..(196): Homolog of NCBI NO: 15240781 NR Description: pectinesterase family [Arabidopsis thaliana]
  misc_feature (1)..(194): Homolog of NCBI NO: 30697951 NR Description: pectinesterase family [Arabidopsis thaliana]
  misc_feature (1)..(194): Homolog of NCBI NO: 18415486 NR Description: pectinesterase family [Arabidopsis thaliana]
  misc_feature (1)..(196): Homolog of NCBI NO: 9758483 NR Description: pectin methylesterase-like protein [Arabidopsis
  misc_feature (1)..(194): Homolog of NCBI NO: 11358603 NR Description: pectin methyl-esterase-like protein - Arabidopsis
  misc_feature (1)..(194): Homolog of NCBI NO: 21593398 NR Description: pectin methyl-esterase-like protein [Arabidopsis
  misc_feature (1)..(194): Homolog of NCBI NO: 25404855 NR Description: probable pectin methylesterase T17F3.3 [imported] Arabidopsis thaliana >gi|12325236|gb|AAG52566.1|AC010675_14
  misc_feature (1)..(196): Homolog of NCBI NO: 15240325 NR Description: pectinesterase family [Arabidopsis thaliana]
  misc_feature (1)..(190): Homolog of NCBI NO: 15241163 NR Description: pectinesterase family [Arabidopsis thaliana] putative pectin methylesterase [Arabidopsis thaliana]
MPKPGSQGQALAMRINADKAAFYSCRFHGFQDTLCDDKGNHFFKDCYIEGTYDFIFGRGASLYLNTQLHAVGDGLRVITAQGRQSATEQNGYTFVHCKVTGTGTGIYLGRSWMSHPKVVYAFTEMTSVVNPSGWRENLNRGYDKTVFYGEYKCFGPGSHLEKRVPYTQDIDKNEVTPFLTLGYIKGSTWLLPPPKY

SEQ ID NO: 98457 - DNA, 1518 bp, Arabidopsis thaliana
  misc_feature (1)..(1518): Ceres Seq. ID no. 13593735
  misc_feature: MA Experiment ID: 20000173 Result: Down-regulated in Transcription
  misc_feature: MA Experiment 20000173 PARAMETER Experiment Name: At_42deg_Heat_P Parameter: Age (day) Value: 14
  misc_feature: MA Experiment 20000173 PARAMETER Experiment Name: At_42deg_Heat_P Parameter: Organism Value: A. thaliana
  misc_feature: MA Experiment 20000173 PARAMETER Experiment Name: At_42deg_Heat_P Parameter: Plant Line Value: WS
  misc_feature: MA Experiment 20000173 PARAMETER Experiment Name: At_42deg_Heat_P Parameter: Temperature (deg C) Value: 42 vs. 22
  misc_feature: MA Experiment 20000173 PARAMETER Experiment Name: At_42deg_Heat_P Parameter: Timepoint (hr) Value: 6
  misc_feature: MA Experiment 20000173 PARAMETER Experiment Name: At_42deg_Heat_P Parameter: Tissue Value: Aerial
  misc_feature: MA Experiment ID: 20000180 Result: Up-regulated in Transcription
  misc_feature: MA Experiment 20000180 PARAMETER Experiment Name: At_Germinating_Seeds_P Parameter: Age (hr) Value: 24 vs. 0
  misc_feature: MA Experiment 20000180 PARAMETER Experiment Name: At_Germinating_Seeds_P Parameter: Tissue Value: Germinating Seeds
  misc_feature: MA Experiment ID: 20000182 Result: Up-regulated in Transcription
  misc_feature: MA Experiment 20000182 PARAMETER Experiment Name: At_2mM_SA_P Parameter: Age (day) Value: 14
  misc_feature: MA Experiment 20000182 PARAMETER Experiment Name: At_2mM_SA_P Parameter: Organism Value: A. thaliana
  misc_feature: MA Experiment 20000182 PARAMETER Experiment Name: At_2mM_SA_P Parameter: Plant Line Value: WS
  misc_feature: MA Experiment 20000182 PARAMETER Experiment Name: At_2mM_SA_P Parameter: Timepoint (hr) Value: 6
  misc_feature: MA Experiment 20000182 PARAMETER Experiment Name: At_2mM_SA_P Parameter: Tissue Value: Aerial
  misc_feature: MA Experiment 20000182 PARAMETER Experiment Name: At_2mM_SA_P Parameter: Treatment Value: 2mM SA vs. No Treatment
  misc_feature: MA Experiment ID: 20000184 Result: Down-regulated in Transcription
  misc_feature: MA Experiment 20000184 PARAMETER Experiment Name: At_Shoots__P Parameter: Age (day) Value: 7
  misc_feature: MA Experiment 20000184 PARAMETER Experiment Name: At_Shoots__P Parameter: Tissue Value: Shoots vs. Whole Plant
  misc_feature: MA Experiment ID: 20000437 Result: Up-regulated in Transcription
  misc_feature: MA Experiment 20000437 PARAMETER Experiment Name: At_Drought_P Parameter: Age (day) Value: 8
  misc_feature: MA Experiment 20000437 PARAMETER Experiment Name: At_Drought_P Parameter: Organism Value: A. thaliana
  misc_feature: MA Experiment 20000437 PARAMETER Experiment Name: At_Drought_P Parameter: Plant Line Value: WS
  misc_feature: MA Experiment 20000437 PARAMETER Experiment Name: At_Drought_P Parameter: Timepoint (hr) Value: 24
  misc_feature: MA Experiment 20000437 PARAMETER Experiment Name: At_Drought_P Parameter: Tissue Value: Whole Plant
  misc_feature: MA Experiment 20000437 PARAMETER Experiment Name: At_Drought_P Parameter: Treatment Value: Drought vs. No Drought
  misc_feature: MA Experiment ID: 20000495 Result: Down-regulated in Transcription
  misc_feature: MA Experiment 20000495 PARAMETER Experiment Name: At_Guard_Cells_P Parameter: Harvest Date Value: 8/2/2002
  misc_feature: MA Experiment 20000495 PARAMETER Experiment Name: At_Guard_Cells_P Parameter: Organism Value: A. thaliana
  misc_feature: MA Experiment 20000495 PARAMETER Experiment Name: At_Guard_Cells_P Parameter: Tissue Value: Guard Cells vs. Leaves
  misc_feature: MA Experiment ID: 20000496 Result: Down-regulated in Transcription
  misc_feature: MA Experiment 20000496 PARAMETER Experiment Name: At_Guard_Cells_P Parameter: Harvest Date Value: 7/19/2002
  misc_feature: MA Experiment 20000496 PARAMETER Experiment Name: At_Guard_Cells_P Parameter: Organism Value: Canola
  misc_feature: MA Experiment 20000496 PARAMETER Experiment Name: At_Guard_Cells_P Parameter: Tissue Value: Guard Cells vs. Leaves
  misc_feature: MA Experiment ID: 20001451 Result: Down-regulated in Transcription
  misc_feature: MA Experiment 20001451 PARAMETER Experiment Name: At_Far-red-induction_P Parameter: Age (day) Value: 7
  misc_feature: MA Experiment 20001451 PARAMETER Experiment Name: At_Far-red-induction_P Parameter: Light Value: Far-red vs. White
  misc_feature: MA Experiment 20001451 PARAMETER Experiment Name: At_Far-red-induction_P Parameter: Organism Value: A. thaliana
  misc_feature: MA Experiment 20001451 PARAMETER Experiment Name: At_Far-red-induction_P Parameter: Plant Line Value: Columbia
  misc_feature: MA Experiment 20001451 PARAMETER Experiment Name: At_Far-red-induction_P Parameter: Timepoint (hr) Value: 24
  misc_feature: MA Experiment 20001451 PARAMETER Experiment Name: At_Far-red-induction_P Parameter: Tissue Value: Whole Plant
caagactcatatagtaaaaatgttttgacaatcaaaaaccaaataagcaaagagatctctgactctctatctgaaatctcaaaacggagaacgcgagggaacaagagattaaagcatagtgagaccctaagagagagagctttaggtctagaggggatcttcacaattcacacaacaactacgagataggatcgtgcgcgtcaaaagaagctggtactgctgattccagccgaagattagtctccgcttctggttgttccggtggagactcgtcggaaatgagaggtcttttcaaatccaaaccgcggactcccgctgatattgttcgtcagactcgcgatctcctcctctacgccgatcgatccaactccttccctgaccttcgagagtccaaacgcgaggaaaagatggtggaactaagtaagagcatacgagatttgaagttgattctatatggaaacagtgaggctgagcctgttgctgaagcttgtgctcagttgactcaggagttctttaaggctgatactcttcgccgtttgctcacttctcttcctaatttgaacttggaggcgaggaaagatgctacacaagttgttgcaaatcttcagaggcaacaagtcaattcacgtcttattgctgctgattatcttgaatccaacattgatcttatggattttctagttgatgggtttgaaaacaccgatatggcgttacactatggtactatgtttagagagtgcatccgtcatcagattgttgcaaaatatgttttggactcggagcacgtgaagaagtttttttactacatacagcttcccaatttcgacattgctgctgatgctgctgcaacttttaaggaacttctgacaaggcacaagtctacagttgctgagtttctcattaagaatgaagactggttttttgcagactacaactcaaagcttcttgaatcaactaattatattacccgacggcaagctattaagttgttgggcgatatattattggataggtcaaattcggctgtgatgacgaagtatgtgagctcgatggataacttgaggattctgatgaatcttctcagagaatcaagcaagactattcagatagaagctttccatgttttcaagctgtttgtagcgaaccaaaacaagccttcagacatcgccaacattctggtggcaaacagaaacaagcttctgagattgttggctgatatcaagccggacaaagaggacgagaggtttgacgcagacaaagctcaggttgtgagagagattgcaaaccttaagctgcgagagcttgcttgagcatgcacatatacacagaagctcatgatttctgttaatctttgaaagacatttttggaccatcaaagattgttgttatttattaggtactgtttcttttctctctctcagcatctacgctgttgactactctggatttttttagatcatatgaattcacatgtacactcctttagtgttgatcaaataaaaatggcattataaatcc

SEQ ID NO: 98458 - protein, 343 aa, Arabidopsis thaliana; identical to SEQ ID NO: 49601
  peptide (1)..(343): Ceres Seq. ID no. 13593736
  misc_feature (39)..(339): Pfam Name: Mo25 protein family Pfam Description: Mo25 protein family
  misc_feature (1)..(343): Homolog of NCBI NO: 15236013 NR Description: MO25 protein family [Arabidopsis thaliana]
  misc_feature (1)..(343): Homolog of NCBI NO: 15214076 NR Description: Hypothetical MO25-like protein At5g47540 emb|CAB78730.1~gene_id:MNJ7.13~similar to unknown protein thaliana] >gi|16226301|gb|AAL16128.1|AF428296_1 AT5g47540/MNJ7_13
  misc_feature (1)..(343): Homolog of NCBI NO: 15238126 NR Description: MO25 protein family [Arabidopsis thaliana]
  misc_feature (44)..(343): Homolog of NCBI NO: 7485184 NR Description: hypothetical protein - Arabidopsis thaliana
  misc_feature (1)..(337): Homolog of NCBI NO: 34901086 NR Description: putative MO25 protein (CGI-66) [Oryza sativa
  misc_feature (1)..(342): Homolog of NCBI NO: 15227629 NR Description: MO25 protein family [Arabidopsis thaliana]
  misc_feature (5)..(338): Homolog of NCBI NO: 34877516 NR Description: similar to MO25 protein [Rattus norvegicus]
  misc_feature (5)..(338): Homolog of NCBI NO: 7706481 NR Description: MO25 protein [Homo sapiens]
  misc_feature (5)..(338): Homolog of NCBI NO: 33150758 NR Description: MO25-like protein [Homo sapiens]
  misc_feature (4)..(338): Homolog of NCBI NO: 7459568 NR Description: hypothetical protein R02E12.2 - Caenorhabditis >gi|30794587|gb|AAP40522.1| Hypothetical protein R02E12.2b

SEQ ID NO: 98459 - protein, 300 aa, Arabidopsis thaliana; identical to SEQ ID NO: 49602
  peptide (1)..(300): Ceres Seq. ID no. 13593737
  misc_feature (1)..(296): Pfam Name: Mo25 protein family Pfam Description: Mo25 protein family
  misc_feature (1)..(300): Homolog of NCBI NO: 15236013 NR Description: MO25 protein family [Arabidopsis thaliana]
  misc_feature (1)..(300): Homolog of NCBI NO: 15214076 NR Description: Hypothetical MO25-like protein At5g47540 emb|CAB78730.1~gene_id:MNJ7.13~similar to unknown protein thaliana] >gi|16226301|gb|AAL16128.1|AF428296_1 AT5g47540/MNJ7_13
  misc_feature (1)..(300): Homolog of NCBI NO: 15238126 NR Description: MO25 protein family [Arabidopsis thaliana]
  misc_feature (1)..(300): Homolog of NCBI NO: 7485184 NR Description: hypothetical protein - Arabidopsis thaliana
  misc_feature (1)..(294): Homolog of NCBI NO: 34901086 NR Description: putative MO25 protein (CGI-66) [Oryza sativa
  misc_feature (1)..(299): Homolog of NCBI NO: 15227629 NR Description: MO25 protein family [Arabidopsis thaliana]
  misc_feature (1)..(295): Homolog of NCBI NO: 34877516 NR Description: similar to MO25 protein [Rattus norvegicus]
  misc_feature (1)..(295): Homolog of NCBI NO: 7706481 NR Description: MO25 protein [Homo sapiens]
  misc_feature (1)..(295): Homolog of NCBI NO: 33150758 NR Description: MO25-like protein [Homo sapiens]
  misc_feature (1)..(295): Homolog of NCBI NO: 7459568 NR Description: hypothetical protein R02E12.2 - Caenorhabditis >gi|30794587|gb|AAP40522.1| Hypothetical protein R02E12.2b

SEQ ID NO: 98460 - protein, 213 aa, Arabidopsis thaliana; identical to SEQ ID NO: 49603
  peptide (1)..(213): Ceres Seq. ID no. 13593738
  misc_feature (1)..(209): Pfam Name: Mo25 protein family Pfam Description: Mo25 protein family
  misc_feature (1)..(213): Homolog of NCBI NO: 15236013 NR Description: MO25 protein family [Arabidopsis thaliana]
  misc_feature (1)..(213): Homolog of NCBI NO: 15214076 NR Description: Hypothetical MO25-like protein At5g47540 emb|CAB78730.1~gene_id:MNJ7.13~similar to unknown protein thaliana] >gi|16226301|gb|AAL16128.1|AF428296_1 AT5g47540/MNJ7_13
  misc_feature (1)..(213): Homolog of NCBI NO: 15238126 NR Description: MO25 protein family [Arabidopsis thaliana]
  misc_feature (1)..(213): Homolog of NCBI NO: 7485184 NR Description: hypothetical protein - Arabidopsis thaliana
  misc_feature (1)..(207): Homolog of NCBI NO: 34901086 NR Description: putative MO25 protein (CGI-66) [Oryza sativa
  misc_feature (1)..(212): Homolog of NCBI NO: 15227629 NR Description: MO25 protein family [Arabidopsis thaliana]
  misc_feature (1)..(208): Homolog of NCBI NO: 34877516 NR Description: similar to MO25 protein [Rattus norvegicus]
  misc_feature (1)..(208): Homolog of NCBI NO: 7706481 NR Description: MO25 protein [Homo sapiens]
  misc_feature (1)..(208): Homolog of NCBI NO: 33150758 NR Description: MO25-like protein [Homo sapiens]
  misc_feature (1)..(208): Homolog of NCBI NO: 7459568 NR Description: hypothetical protein R02E12.2 - Caenorhabditis >gi|30794587|gb|AAP40522.1| Hypothetical protein R02E12.2b

SEQ ID NO: 98461 - DNA, 1020 bp, Arabidopsis thaliana
  misc_feature (1)..(1020): Ceres Seq. ID no. 13593740
  misc_feature: MA Experiment ID: 20000184 Result: Down-regulated in Transcription
  misc_feature: MA Experiment 20000184 PARAMETER Experiment Name: At_Shoots__P Parameter: Age (day) Value: 7
  misc_feature: MA Experiment 20000184 PARAMETER Experiment Name: At_Shoots__P Parameter: Tissue Value: Shoots vs. Whole Plant
  misc_feature: MA Experiment ID: 20000185 Result: Down-regulated in Transcription
  misc_feature: MA Experiment 20000185 PARAMETER Experiment Name: At_Roots__P Parameter: Age (day) Value: 7 vs. 21
  misc_feature: MA Experiment 20000185 PARAMETER Experiment Name: At_Roots__P Parameter: Organism Value: A. thaliana
  misc_feature: MA Experiment 20000185 PARAMETER Experiment Name: At_Roots__P Parameter: Tissue Value: Roots vs. Whole Plant
  misc_feature: MA Experiment ID: 20001451 Result: Down-regulated in Transcription
  misc_feature: MA Experiment 20001451 PARAMETER Experiment Name: At_Far-red-induction_P Parameter: Age (day) Value: 7
  misc_feature: MA Experiment 20001451 PARAMETER Experiment Name: At_Far-red-induction_P Parameter: Light Value: Far-red vs. White
  misc_feature: MA Experiment 20001451 PARAMETER Experiment Name: At_Far-red-induction_P Parameter: Organism Value: A. thaliana
  misc_feature: MA Experiment 20001451 PARAMETER Experiment Name: At_Far-red-induction_P Parameter: Plant Line Value: Columbia
  misc_feature: MA Experiment 20001451 PARAMETER Experiment Name: At_Far-red-induction_P Parameter: Timepoint (hr) Value: 24
  misc_feature: MA Experiment 20001451 PARAMETER Experiment Name: At_Far-red-induction_P Parameter: Tissue Value: Whole Plant
  misc_feature: MA Experiment ID: 20001557 Result: Up-regulated in Transcription
  misc_feature: MA Experiment 20001557 PARAMETER Experiment Name: At_Drought_Soil_Dry_P Parameter: Age (day) Value: 27
  misc_feature: MA Experiment 20001557 PARAMETER Experiment Name: At_Drought_Soil_Dry_P Parameter: Organism Value: A. thaliana
  misc_feature: MA Experiment 20001557 PARAMETER Experiment Name: At_Drought_Soil_Dry_P Parameter: Plant Line Value: WS
  misc_feature: MA Experiment 20001557 PARAMETER Experiment Name: At_Drought_Soil_Dry_P Parameter: Post Timepoint (hr) Value: 3
  misc_feature: MA Experiment 20001557 PARAMETER Experiment Name: At_Drought_Soil_Dry_P Parameter: Post-Treatment Value: Re-Water vs. No Drought
  misc_feature: MA Experiment 20001557 PARAMETER Experiment Name: At_Drought_Soil_Dry_P Parameter: Timepoint (day) Value: 13
  misc_feature: MA Experiment 20001557 PARAMETER Experiment Name: At_Drought_Soil_Dry_P Parameter: Treatment Value: Drought vs. No Drought
  misc_feature: MA Experiment ID: 20001558 Result: Up-regulated in Transcription
  misc_feature: MA Experiment 20001558 PARAMETER Experiment Name: At_Drought_Soil_Dry_P Parameter: Age (day) Value: 27
  misc_feature: MA Experiment 20001558 PARAMETER Experiment Name: At_Drought_Soil_Dry_P Parameter: Organism Value: A. thaliana
  misc_feature: MA Experiment 20001558 PARAMETER Experiment Name: At_Drought_Soil_Dry_P Parameter: Plant Line Value: WS
  misc_feature: MA Experiment 20001558 PARAMETER Experiment Name: At_Drought_Soil_Dry_P Parameter: Post Timepoint (hr) Value: 6
  misc_feature: MA Experiment 20001558 PARAMETER Experiment Name: At_Drought_Soil_Dry_P Parameter: Post-Treatment Value: Re-Water vs. No Drought
  misc_feature: MA Experiment 20001558 PARAMETER Experiment Name: At_Drought_Soil_Dry_P Parameter: Timepoint (day) Value: 13
  misc_feature: MA Experiment 20001558 PARAMETER Experiment Name: At_Drought_Soil_Dry_P Parameter: Treatment Value: Drought vs. No Drought
  misc_feature: MA Experiment ID: 20001757 Result: Up-regulated in Transcription
  misc_feature: MA Experiment 20001757 PARAMETER Experiment Name: At_50mM_NH4NO3_L-to-H_P Parameter: Timepoint (hr) Value: 6
  misc_feature: MA Experiment 20001757 PARAMETER Experiment Name: At_50mM_NH4NO3_L-to-H_P Parameter: Tissue Value: Leaf
  misc_feature: MA Experiment 20001757 PARAMETER Experiment Name: At_50mM_NH4NO3_L-to-H_P Parameter: Treatment Value: 50mM NH4NO3 vs 100mM Mannitol
atggtgacggagctggaagagcttgtcgaatttttgtcatctccttcaccgcctgtgaagaaagctgcggtggaaattgttagtggtttaactggttccgaggaaggtttacaatctctatcaaagtattccgagattcttcttccatcattgtctcagcttctaaatgaaagcaaggaggtatcagagccagcagctcaagctcttgttaatctttctcagaagtgtgaattggcaaagaagatgattcaaatgggtttgattaaagtggccatggacatgttgtataagccagagtcttgtattaccagattacttgttatgcttctagtgaatcttactcagttggatgatggggtttcttctttgcttcagattgacgatgagaagatgcatggactacatatcatgaagcttgttaggtcattttgcaggtcttctggtgaaactgctgatgatcagtttgagcatgttggttcgatccttgtcaacatatcaaaaacagaagatgggaggaaattgttactggagccaaagagacgactattaaaacagatcattaggcagtttgattcaacaaatcaattgcgaaagaaaggggttgctgggactattcgtaactgttgttttgaagccaaaaaccaactccagaatatactcttgatatcagagtttctttggcccgctctgctcctaccagttgcaggcagcaagacatacagtgagcaagatgtcgcaaaaatgccacctgagcttggaagtgcactgtccattgagcgagaaccagttactgatcctgacattcgcgttcagacactcgaagctatatatttgatcatcttagaggaggcaggtcgaagggcattttggtcagtcaacggcccacggattctacaattgggatacgaatatgaagaagatccgaaagcaatgagagcctatgagcaagtcggttctttgcttgttgaggaagctggaggtccggaagagtcgttggagccaacaaaagcagagtcttga

SEQ ID NO: 98462 - protein, 339 aa, Arabidopsis thaliana; identical to SEQ ID NO: 47446
  peptide (1)..(339): Ceres Seq. ID no. 13593741
  misc_feature (92)..(271): Pfam Name: Domain of unknown function (DUF383) Pfam Description: Domain of unknown function (DUF383)
  misc_feature (1)..(339): Homolog of NCBI NO: 15223707 NR Description: expressed protein [Arabidopsis thaliana]
  misc_feature (1)..(339): Homolog of NCBI NO: 26449855 NR Description: unknown protein [Arabidopsis thaliana]
  misc_feature (124)..(321): Homolog of NCBI NO: 37534210 NR Description: unknown protein [Oryza sativa (japonica
  misc_feature (1)..(126): Homolog of NCBI NO: 37534210 NR Description: unknown protein [Oryza sativa (japonica
  misc_feature (4)..(333): Homolog of NCBI NO: 19569883 NR Description: SIMILAR TO HYPOTHETICAL PROTEIN [Dictyostelium >gi|28828120|gb|AAO50803.1| similar to Homo sapiens (Human).
  misc_feature (5)..(338): Homolog of NCBI NO: 21356909 NR Description: CG6073-PA [Drosophila melanogaster] GM06077p [Drosophila melanogaster] >gi|21711727|gb|AAM75054.1|
  misc_feature (2)..(330): Homolog of NCBI NO: 19115795 NR Description: hypothetical protein [Schizosaccharomyces pombe]
  misc_feature (51)..(307): Homolog of NCBI NO: 40745990 NR Description: hypothetical protein AN9409.2 [Aspergillus

SEQ ID NO: 98463 - protein, 258 aa, Arabidopsis thaliana; identical to SEQ ID NO: 47447
  peptide (1)..(258): Ceres Seq. ID no. 13593742
  misc_feature (11)..(190): Pfam Name: Domain of unknown function (DUF383) Pfam Description: Domain of unknown function (DUF383)
  misc_feature (1)..(258): Homolog of NCBI NO: 15223707 NR Description: expressed protein [Arabidopsis thaliana]
  misc_feature (1)..(258): Homolog of NCBI NO: 26449855 NR Description: unknown protein [Arabidopsis thaliana]
  misc_feature (43)..(240): Homolog of NCBI NO: 37534210 NR Description: unknown protein [Oryza sativa (japonica
  misc_feature (1)..(45): Homolog of NCBI NO: 37534210 NR Description: unknown protein [Oryza sativa (japonica
  misc_feature (1)..(252): Homolog of NCBI NO: 19569883 NR Description: SIMILAR TO HYPOTHETICAL PROTEIN [Dictyostelium >gi|28828120|gb|AAO50803.1| similar to Homo sapiens (Human).
  misc_feature (1)..(257): Homolog of NCBI NO: 21356909 NR Description: CG6073-PA [Drosophila melanogaster] GM06077p [Drosophila melanogaster] >gi|21711727|gb|AAM75054.1|
  misc_feature (1)..(249): Homolog of NCBI NO: 19115795 NR Description: hypothetical protein [Schizosaccharomyces pombe]
  misc_feature (1)..(226): Homolog of NCBI NO: 40745990 NR Description: hypothetical protein AN9409.2 [Aspergillus

SEQ ID NO: 98464 - protein, 255 aa, Arabidopsis thaliana; identical to SEQ ID NO: 47448
  peptide (1)..(255): Ceres Seq. ID no. 13593743
  misc_feature (8)..(187): Pfam Name: Domain of unknown function (DUF383) Pfam Description: Domain of unknown function (DUF383)
  misc_feature (1)..(255): Homolog of NCBI NO: 15223707 NR Description: expressed protein [Arabidopsis thaliana]
  misc_feature (1)..(255): Homolog of NCBI NO: 26449855 NR Description: unknown protein [Arabidopsis thaliana]
  misc_feature (40)..(237): Homolog of NCBI NO: 37534210 NR Description: unknown protein [Oryza sativa (japonica
  misc_feature (1)..(42): Homolog of NCBI NO: 37534210 NR Description: unknown protein [Oryza sativa (japonica
  misc_feature (1)..(249): Homolog of NCBI NO: 19569883 NR Description: SIMILAR TO HYPOTHETICAL PROTEIN [Dictyostelium >gi|28828120|gb|AAO50803.1| similar to Homo sapiens (Human).
  misc_feature (1)..(254): Homolog of NCBI NO: 21356909 NR Description: CG6073-PA [Drosophila melanogaster] GM06077p [Drosophila melanogaster] >gi|21711727|gb|AAM75054.1|
  misc_feature (1)..(246): Homolog of NCBI NO: 19115795 NR Description: hypothetical protein [Schizosaccharomyces pombe]
  misc_feature (1)..(223): Homolog of NCBI NO: 40745990 NR Description: hypothetical protein AN9409.2 [Aspergillus

SEQ ID NO: 98465 - DNA, 1111 bp, Arabidopsis thaliana
  misc_feature (1)..(1111): Ceres Seq. ID no. 13593748
  misc_feature: MA Experiment ID: 20000171 Result: Up-regulated in Transcription
  misc_feature: MA Experiment 20000171 PARAMETER Experiment Name: At_42deg_Heat_P Parameter: Age (day) Value: 14
  misc_feature: MA Experiment 20000171 PARAMETER Experiment Name: At_42deg_Heat_P Parameter: Organism Value: A. thaliana
  misc_feature: MA Experiment 20000171 PARAMETER Experiment Name: At_42deg_Heat_P Parameter: Plant Line Value: WS
  misc_feature: MA Experiment 20000171 PARAMETER Experiment Name: At_42deg_Heat_P Parameter: Temperature (deg C) Value: 42 vs. 22
  misc_feature: MA Experiment 20000171 PARAMETER Experiment Name: At_42deg_Heat_P Parameter: Timepoint (hr) Value: 1
  misc_feature: MA Experiment 20000171 PARAMETER Experiment Name: At_42deg_Heat_P Parameter: Tissue Value: Aerial
  misc_feature: MA Experiment ID: 20001451 Result: Up-regulated in Transcription
  misc_feature: MA Experiment 20001451 PARAMETER Experiment Name: At_Far-red-induction_P Parameter: Age (day) Value: 7
  misc_feature: MA Experiment 20001451 PARAMETER Experiment Name: At_Far-red-induction_P Parameter: Light Value: Far-red vs. White
  misc_feature: MA Experiment 20001451 PARAMETER Experiment Name: At_Far-red-induction_P Parameter: Organism Value: A. thaliana
  misc_feature: MA Experiment 20001451 PARAMETER Experiment Name: At_Far-red-induction_P Parameter: Plant Line Value: Columbia
  misc_feature: MA Experiment 20001451 PARAMETER Experiment Name: At_Far-red-induction_P Parameter: Timepoint (hr) Value: 24
  misc_feature: MA Experiment 20001451 PARAMETER Experiment Name: At_Far-red-induction_P Parameter: Tissue Value: Whole Plant
  misc_feature: MA Experiment ID: 20001773 Result: Up-regulated in Transcription
  misc_feature: MA Experiment 20001773 PARAMETER Experiment Name: At_Far-red-enriched-adult_P Parameter: Age (day) Value: 30
  misc_feature: MA Experiment 20001773 PARAMETER Experiment Name: At_Far-red-enriched-adult_P Parameter: Light Value: Far-red enriched vs. White
  misc_feature: MA Experiment 20001773 PARAMETER Experiment Name: At_Far-red-enriched-adult_P Parameter: Organism Value: A. thaliana
  misc_feature: MA Experiment 20001773 PARAMETER Experiment Name: At_Far-red-enriched-adult_P Parameter: Plant Line Value: Columbia
  misc_feature: MA Experiment 20001773 PARAMETER Experiment Name: At_Far-red-enriched-adult_P Parameter: Timepoint (hr) Value: 48
  misc_feature: MA Experiment 20001773 PARAMETER Experiment Name: At_Far-red-enriched-adult_P Parameter: Tissue Value: Aerial
gagaaagacaaacaaattgaagagaaataataacaattaactcaaccaaaaatatgaggaagccagaggtagccattgcagctagtactcaccaagtaaagaagatgaagaagggactttggtctcctgaggaagactcaaagctgatgcaatacatgttaagcaatggacaaggatgttggagtgatgttgcgaaaaacgcaggacttcaaagatgtggcaaaagctgccgtcttcgttggatcaactatcttcgtcctgacctcaagcgtggcgctttctctcctcaagaagaggatctcatcattcgctttcattccatcctcggcaacaggtggtctcagattgcagcacgattgcctggtcggaccgataacgagatcaagaatttctggaactcaacaataaagaaaaggctaaagaagatgtccgatacctccaacttaatcaacaactcatcctcatcacccaacacagcaagcgattcctcttctaattccgcatcttctttggatattaaagacattataggaagcttcatgtccttacaagaacaaggcttcgtcaacccttccttgacccacatacaaaccaacaatccatttccaacgggaaacatgatcagccacccgtgcaatgacgattttaccccttatgtagatggtatctatggagtaaacgcaggggtacaaggggaactctacttcccacctttggaatgtgaagaaggtgattggtacaatgcaaatataaacaaccacttagacgagttgaacactaatggatccggaaacgcacctgagggtatgagaccagtggaagaattttgggaccttgaccagttgatgaacactgaggttccttcgttttacttcaacttcaaacaaagcatatgaatatttttacgtcatcttattcttttttctattgcggtttatactcaagattcttagccacacacacataaatgcaaatatatatacattgttagagagtattttgtatttcgaataatcttttcgtactagggcttgagccttgaggtgccatgtaatgattagtcaatgtaaaacatatatcctataataaataaataaaagaaataataagc

SEQ ID NO: 98466 - protein, 280 aa, Arabidopsis thaliana; identical to SEQ ID NO: 49344
  peptide (1)..(280): Ceres Seq. ID no. 13593749
  misc_feature (20)..(67): Pfam Name: Myb-like DNA-binding domain Pfam Description: Myb-like DNA-binding domain
  misc_feature (1)..(280): Homolog of NCBI NO: 15239934 NR Description: myb family transcription factor [Arabidopsis
  misc_feature (75)..(280): Homolog of NCBI NO: 11358687 NR Description: probable transcription factor MYB46 [imported] - thaliana (fragment) >gi|3941460|gb|AAC83606.1| putative
  misc_feature (9)..(188): Homolog of NCBI NO: 39725413 NR Description: MYB transcription factor [Eucalyptus gunnii]
  misc_feature (1)..(191): Homolog of NCBI NO: 15231922 NR Description: myb family transcription factor (MYB83)
  misc_feature (17)..(148): Homolog of NCBI NO: 34147924 NR Description: R2R3-MYB transcription factor [Pinus taeda]
  misc_feature (16)..(186): Homolog of NCBI NO: 11994360 NR Description: transcription factor-like protein [Arabidopsis
  misc_feature (16)..(174): Homolog of NCBI NO: 22329445 NR Description: myb family transcription factor [Arabidopsis >gi|17380966|gb|AAL36295.1| putative transcription factor thaliana] >gi|20465975|gb|AAM20173.1| putative transcription
  misc_feature (16)..(174): Homolog of NCBI NO: 25294104 NR Description: hypothetical protein [imported] - Arabidopsis >gi|3482929|gb|AAC33214.1| Putative transcription factor
  misc_feature (16)..(154): Homolog of NCBI NO: 34902542 NR Description: putative transcription factor (myb) [Oryza sativa
  misc_feature (16)..(220): Homolog of NCBI NO: 15223612 NR Description: myb family transcription factor [Arabidopsis

SEQ ID NO: 98467 - protein, 263 aa, Arabidopsis thaliana; identical to SEQ ID NO: 49345
  peptide (1)..(263): Ceres Seq. ID no. 13593750
  misc_feature (3)..(50): Pfam Name: Myb-like DNA-binding domain Pfam Description: Myb-like DNA-binding domain
  misc_feature (1)..(263): Homolog of NCBI NO: 15239934 NR Description: myb family transcription factor [Arabidopsis
  misc_feature (58)..(263): Homolog of NCBI NO: 11358687 NR Description: probable transcription factor MYB46 [imported] - thaliana (fragment) >gi|3941460|gb|AAC83606.1| putative
  misc_feature (1)..(171): Homolog of NCBI NO: 39725413 NR Description: MYB transcription factor [Eucalyptus gunnii]
  misc_feature (1)..(174): Homolog of NCBI NO: 15231922 NR Description: myb family transcription factor (MYB83)
  misc_feature (1)..(131): Homolog of NCBI NO: 34147924 NR Description: R2R3-MYB transcription factor [Pinus taeda]
  misc_feature (1)..(169): Homolog of NCBI NO: 11994360 NR Description: transcription factor-like protein [Arabidopsis
  misc_feature (1)..(157): Homolog of NCBI NO: 22329445 NR Description: myb family transcription factor [Arabidopsis >gi|17380966|gb|AAL36295.1| putative transcription factor thaliana] >gi|20465975|gb|AAM20173.1| putative transcription
  misc_feature (1)..(157): Homolog of NCBI NO: 25294104 NR Description: hypothetical protein [imported] - Arabidopsis >gi|3482929|gb|AAC33214.1| Putative transcription factor
  misc_feature (1)..(137): Homolog of NCBI NO: 34902542 NR Description: putative transcription factor (myb) [Oryza sativa
  misc_feature (1)..(203): Homolog of NCBI NO: 15223612 NR Description: myb family transcription factor [Arabidopsis

SEQ ID NO: 98468 - protein, 249 aa, Arabidopsis thaliana; identical to SEQ ID NO: 49346
  peptide (1)..(249): Ceres Seq. ID no. 13593751
  misc_feature (1)..(36): Pfam Name: Myb-like DNA-binding domain Pfam Description: Myb-like DNA-binding domain
  misc_feature (1)..(249): Homolog of NCBI NO: 15239934 NR Description: myb family transcription factor [Arabidopsis
  misc_feature (44)..(249): Homolog of NCBI NO: 11358687 NR Description: probable transcription factor MYB46 [imported] - thaliana (fragment) >gi|3941460|gb|AAC83606.1| putative
  misc_feature (1)..(157): Homolog of NCBI NO: 39725413 NR Description: MYB transcription factor [Eucalyptus gunnii]
  misc_feature (1)..(160): Homolog of NCBI NO: 15231922 NR Description: myb family transcription factor (MYB83)
  misc_feature (1)..(117): Homolog of NCBI NO: 34147924 NR Description: R2R3-MYB transcription factor [Pinus taeda]
  misc_feature (1)..(155): Homolog of NCBI NO: 11994360 NR Description: transcription factor-like protein [Arabidopsis
  misc_feature (1)..(143): Homolog of NCBI NO: 22329445 NR Description: myb family transcription factor [Arabidopsis >gi|17380966|gb|AAL36295.1| putative transcription factor thaliana] >gi|20465975|gb|AAM20173.1| putative transcription
  misc_feature (1)..(143): Homolog of NCBI NO: 25294104 NR Description: hypothetical protein [imported] - Arabidopsis >gi|3482929|gb|AAC33214.1| Putative transcription factor
  misc_feature (1)..(123): Homolog of NCBI NO: 34902542 NR Description: putative transcription factor (myb) [Oryza sativa
  misc_feature (1)..(189): Homolog of NCBI NO: 15223612 NR Description: myb family transcription factor [Arabidopsis

SEQ ID NO: 98469 - DNA, 1275 bp, Arabidopsis thaliana
  misc_feature (1)..(1275): Ceres Seq. ID no. 13593756
  misc_feature: MA Experiment ID: 20000495 Result: Up-regulated in Transcription
  misc_feature: MA Experiment 20000495 PARAMETER Experiment Name: At_Guard_Cells_P Parameter: Harvest Date Value: 8/2/2002
  misc_feature: MA Experiment 20000495 PARAMETER Experiment Name: At_Guard_Cells_P Parameter: Organism Value: A. thaliana
  misc_feature: MA Experiment 20000495 PARAMETER Experiment Name: At_Guard_Cells_P Parameter: Tissue Value: Guard Cells vs. Leaves
atgggatgtttcggacgcactccgaaatcgaacaaacgatcagataccaaaaccacgaagaacaacgatttcaccccaaaaaaactcaccgtcaatgcaaatcgagataagctgacacaacccagctcagattgtttaaaagttagtatatgtggagatgtaagcaaggagatagttactaagaaggatcaattagctttggatgctaaagatactaatgttgaagatgaagttatagtgaagaaagcacagacttttacatttgaagaactctctgtttctactggaaactttaagtcggattgttttctaggagaaggaggttttggaaaagtttacaaaggtttcattgagaaaatcaatcaggttgttgcaattaagcaacttgatcggaatggtgctcaaggaatcagggagtttgttgttgaagtgttgacattaagtctcgctgatcatccaaatctcgtcaagcttataggattttgcgctgagggtgttcagagactgttggtttacgagtatatgcctctaggatctctggataatcaccttcatgatcttccttctggtaaaaacccgcttgcttggaacactcgaatgaaaatagcggctggtgcagcaagaggactagagtatctccacgatacaatgaaacctcctgtgatataccgtgatcttaagtgttcgaatatcttgatcgatgaaggatatcacgcaaaactctcagactttggattagctaaagtaggaccaagaggaagtgaaactcatgtttccacaagagttatgggaacatacggttactgtgctcctgattacgcattaactggacaactcacattcaaatcagatgtatacagtttcggagttgttcttttggagcttattactggaaggaaagcttacgataacacgagaacacgtaatcaccagagtcttgttgaatgggcaaatcccttgtttaaagataggaagaatttcaagaaaatggttgatccgttactcgaaggagattatccggttagaggattgtatcaagcacttgcaatagctgcaatgtgtgttcaagaacagcctagtatgagaccggtgatagctgatgtagtaatggctttggatcacttagcttcttctaaatatgatcgtagtcaccgtcaaaagcaggataatgtgaccgagactaaagtcgatgaagagaaaacacttaccacagaatctaatgtttgtgtggaggagaaacaagagatcaagatatgctcagatcaagcaacttaa

SEQ ID NO: 98470 - protein, 424 aa, Arabidopsis thaliana
  peptide (1)..(424): Ceres Seq. ID no. 13593757
  misc_feature (1)..(424): Homolog of NCBI NO: 15226901 NR Description: protein kinase family [Arabidopsis thaliana]
  misc_feature (1)..(400): Homolog of NCBI NO: 15223024 NR Description: protein kinase family [Arabidopsis thaliana]
  misc_feature (1)..(390): Homolog of NCBI NO: 7573596 NR Description: protein kinase 1 [Populus nigra]
  misc_feature (3)..(381): Homolog of NCBI NO: 7573598 NR Description: protein kinase 2 [Populus nigra]
  misc_feature (83)..(381): Homolog of NCBI NO: 34394036 NR Description: putative protein serine/threonine kinase BNK1
  misc_feature (34)..(381): Homolog of NCBI NO: 11259782 NR Description: protein kinase-like - Arabidopsis thaliana
  misc_feature (34)..(381): Homolog of NCBI NO: 30679773 NR Description: protein kinase family [Arabidopsis thaliana]
  misc_feature (83)..(381): Homolog of NCBI NO: 10445209 NR Description: protein serine/threonine kinase BNK1 [Brassica
  misc_feature (83)..(381): Homolog of NCBI NO: 15238886 NR Description: protein kinase family [Arabidopsis thaliana]
  misc_feature (83)..(381): Homolog of NCBI NO: 34907210 NR Description: putative serine/threonine kinase PBS1 protein
MGCFGRTPKSNKRSDTKTTKNNDFTPKKLTVNANRDKLTQPSSDCLKVSICGDVSKEIVTKKDQLALDAKDTNVEDEVIVKKAQTFTFEELSVSTGNFKSDCFLGEGGFGKVYKGFIEKINQVVAIKQLDRNGAQGIREFVVEVLTLSLADHPNLVKLIGFCAEGVQRLLVYEYMPLGSLDNHLHDLPSGKNPLAWNTRMKIAAGAARGLEYLHDTMKPPVIYRDLKCSNILIDEGYHAKLSDFGLAKVGPRGSETHVSTRVMGTYGYCAPDYALTGQLTFKSDVYSFGVVLLELITGRKAYDNTRTRNHQSLVEWANPLFKDRKNFKKMVDPLLEGDYPVRGLYQALAIAAMCVQEQPSMRPVIADVVMALDHLASSKYDRSHRQKQDNVTETKVDEEKTLTTESNVCVEEKQEIKICSDQAT

SEQ ID NO: 98471 - protein, 250 aa, Arabidopsis thaliana; identical to SEQ ID NO: 49411
  peptide (1)..(250): Ceres Seq. ID no. 13593758
  misc_feature (1)..(250): Homolog of NCBI NO: 15226901 NR Description: protein kinase family [Arabidopsis thaliana]
  misc_feature (1)..(226): Homolog of NCBI NO: 15223024 NR Description: protein kinase family [Arabidopsis thaliana]
  misc_feature (1)..(216): Homolog of NCBI NO: 7573596 NR Description: protein kinase 1 [Populus nigra]
  misc_feature (1)..(207): Homolog of NCBI NO: 7573598 NR Description: protein kinase 2 [Populus nigra]
  misc_feature (1)..(207): Homolog of NCBI NO: 34394036 NR Description: putative protein serine/threonine kinase BNK1
  misc_feature (1)..(207): Homolog of NCBI NO: 11259782 NR Description: protein kinase-like - Arabidopsis thaliana
  misc_feature (1)..(207): Homolog of NCBI NO: 30679773 NR Description: protein kinase family [Arabidopsis thaliana]
  misc_feature (1)..(207): Homolog of NCBI NO: 10445209 NR Description: protein serine/threonine kinase BNK1 [Brassica
  misc_feature (1)..(207): Homolog of NCBI NO: 15238886 NR Description: protein kinase family [Arabidopsis thaliana]
  misc_feature (1)..(207): Homolog of NCBI NO: 34907210 NR Description: putative serine/threonine kinase PBS1 protein

SEQ ID NO: 98472 - protein, 225 aa, Arabidopsis thaliana
  peptide (1)..(225): Ceres Seq. ID no. 13593759
  misc_feature (1)..(225): Homolog of NCBI NO: 15226901 NR Description: protein kinase family [Arabidopsis thaliana]
  misc_feature (1)..(201): Homolog of NCBI NO: 15223024 NR Description: protein kinase family [Arabidopsis thaliana]
  misc_feature (1)..(191): Homolog of NCBI NO: 7573596 NR Description: protein kinase 1 [Populus nigra]
  misc_feature (1)..(182): Homolog of NCBI NO: 7573598 NR Description: protein kinase 2 [Populus nigra]
  misc_feature (1)..(182): Homolog of NCBI NO: 34394036 NR Description: putative protein serine/threonine kinase BNK1
  misc_feature (1)..(182): Homolog of NCBI NO: 11259782 NR Description: protein kinase-like - Arabidopsis thaliana
  misc_feature (1)..(182): Homolog of NCBI NO: 30679773 NR Description: protein kinase family [Arabidopsis thaliana]
  misc_feature (1)..(182): Homolog of NCBI NO: 10445209 NR Description: protein serine/threonine kinase BNK1 [Brassica
  misc_feature (1)..(182): Homolog of NCBI NO: 15238886 NR Description: protein kinase family [Arabidopsis thaliana]
  misc_feature (1)..(182): Homolog of NCBI NO: 34907210 NR Description: putative serine/threonine kinase PBS1 protein
MKIAAGAARGLEYLHDTMKPPVIYRDLKCSNILIDEGYHAKLSDFGLAKVGPRGSETHVSTRVMGTYGYCAPDYALTGQLTFKSDVYSFGVVLLELITGRKAYDNTRTRNHQSLVEWANPLFKDRKNFKKMVDPLLEGDYPVRGLYQALAIAAMCVQEQPSMRPVIADVVMALDHLASSKYDRSHRQKQDNVTETKVDEEKTLTTESNVCVEEKQEIKICSDQAT

SEQ ID NO: 98473 - DNA, 498 bp, Arabidopsis thaliana
  misc_feature (1)..(498): Ceres Seq. ID no. 13593764
  misc_feature: MA Experiment ID: 20000264 Result: Up-regulated in Transcription
  misc_feature: MA Experiment 20000264 PARAMETER Experiment Name: At_Open_Flower_P Parameter: Age (day) Value: 21
  misc_feature: MA Experiment 20000264 PARAMETER Experiment Name: At_Open_Flower_P Parameter: Plant Line Value: WS
  misc_feature: MA Experiment 20000264 PARAMETER Experiment Name: At_Open_Flower_P Parameter: Tissue Value: Open Flower vs. Whole Plant
  misc_feature: MA Experiment ID: 20000286 Result: Up-regulated in Transcription
  misc_feature: MA Experiment 20000286 PARAMETER Experiment Name: At_Open_Flower_P Parameter: Age (day) Value: 21
  misc_feature: MA Experiment 20000286 PARAMETER Experiment Name: At_Open_Flower_P Parameter: Plant Line Value: WS
  misc_feature: MA Experiment 20000286 PARAMETER Experiment Name: At_Open_Flower_P Parameter: Tissue Value: Half Open vs. Whole Plant
  misc_feature: MA Experiment ID: 20000794 Result: Up-regulated in Transcription
  misc_feature: MA Experiment 20000794 PARAMETER Experiment Name: At_Petals_P Parameter: Age (day) Value: 23-25 days
  misc_feature: MA Experiment 20000794 PARAMETER Experiment Name: At_Petals_P Parameter: Plant Line Value: WS
  misc_feature: MA Experiment 20000794 PARAMETER Experiment Name: At_Petals_P Parameter: Tissue Value: Petals vs. Whole plant
  misc_feature: MA Experiment ID: 20001910 Result: Up-regulated in Transcription
  misc_feature: MA Experiment 20001910 PARAMETER Experiment Name: At_Drought_Reproduction_P Parameter: Age (day) Value: 37
  misc_feature: MA Experiment 20001910 PARAMETER Experiment Name: At_Drought_Reproduction_P Parameter: Organism Value: A. thaliana
  misc_feature: MA Experiment 20001910 PARAMETER Experiment Name: At_Drought_Reproduction_P Parameter: Plant Line Value: WS
  misc_feature: MA Experiment 20001910 PARAMETER Experiment Name: At_Drought_Reproduction_P Parameter: Timepoint (day) Value: 7
  misc_feature: MA Experiment 20001910 PARAMETER Experiment Name: At_Drought_Reproduction_P Parameter: Tissue Value: Flowers
  misc_feature: MA Experiment 20001910 PARAMETER Experiment Name: At_Drought_Reproduction_P Parameter: Treatment Value: Drought vs. No Drought
atggacgatctcttgggcctccttagaatccgtatcaaacgtggcgtcaatttagccgtccgtgacatcagtagcagcgatccttacgtcgtcgtcaagatgggcaaacagaaattgaagactcgtgtcattaacaaagatgttaatccagaatggaatgaagatttgactctctccgtcacagactccaatcttaccgtcctcttgacggtgtatgatcacgacatgtttagcaaagacgacaagatgggcgatgctgagttcgagataaagccctatattgaggctttgaggatgcaactcgatggacttcctagtggaaccattgtgaccacggttaagccaagtcgtcgtaactgtctagccgaggagtcacgtgtcacctgggtcgacggcaagctcgtccaggatctcgttctcagattgcgacatgtggaatgcggagaggtcgaggctcagcttcaatggattgacctccctggctccaagggtctatga

SEQ ID NO: 98474 - protein, 165 aa, Arabidopsis thaliana; identical to SEQ ID NO: 49479
  peptide (1)..(165): Ceres Seq. ID no. 13593765
  misc_feature (8)..(87): Pfam Name: C2 domain Pfam Description: C2 domain
  misc_feature (1)..(165): Homolog of NCBI NO: 30684739 NR Description: C2 domain-containing protein [Arabidopsis
  misc_feature (1)..(165): Homolog of NCBI NO: 15221907 NR Description: C2 domain-containing protein [Arabidopsis
  misc_feature (1)..(165): Homolog of NCBI NO: 25405940 NR Description: protein T1N15.21 [imported] - Arabidopsis >gi|8778695|gb|AAF79703.1|AC020889_11 T1N15.21 [Arabidopsis
  misc_feature (1)..(165): Homolog of NCBI NO: 15219500 NR Description: C2 domain-containing protein [Arabidopsis
  misc_feature (1)..(165): Homolog of NCBI NO: 15240322 NR Description: C2 domain-containing protein [Arabidopsis >gi|9757984|dbj|BAB08320.1| contains similarity to GTPase protein~gene_id:K12B20.22 [Arabidopsis thaliana]
  misc_feature (1)..(162): Homolog of NCBI NO: 18408493 NR Description: C2 domain-containing protein [Arabidopsis
  misc_feature (2)..(165): Homolog of NCBI NO: 18409675 NR Description: C2 domain-containing protein [Arabidopsis
  misc_feature (1)..(165): Homolog of NCBI NO: 18409682 NR Description: C2 domain-containing protein [Arabidopsis
  misc_feature (1)..(165): Homolog of NCBI NO: 13430460 NR Description: unknown protein [Arabidopsis thaliana]
  misc_feature (1)..(161): Homolog of NCBI NO: 33146442 NR Description: zinc finger and C2 domain protein-like [Oryza

SEQ ID NO: 98475 - protein, 132 aa, Arabidopsis thaliana; identical to SEQ ID NO: 49480
  peptide (1)..(132): Ceres Seq. ID no. 13593766
  misc_feature (1)..(54): Pfam Name: C2 domain Pfam Description: C2 domain
  misc_feature (1)..(132): Homolog of NCBI NO: 30684739 NR Description: C2 domain-containing protein [Arabidopsis
  misc_feature (1)..(132): Homolog of NCBI NO: 15221907 NR Description: C2 domain-containing protein [Arabidopsis
  misc_feature (1)..(132): Homolog of NCBI NO: 25405940 NR Description: protein T1N15.21 [imported] - Arabidopsis >gi|8778695|gb|AAF79703.1|AC020889_11 T1N15.21 [Arabidopsis
  misc_feature (1)..(132): Homolog of NCBI NO: 15219500 NR Description: C2 domain-containing protein [Arabidopsis
  misc_feature (1)..(132): Homolog of NCBI NO: 15240322 NR Description: C2 domain-containing protein [Arabidopsis >gi|9757984|dbj|BAB08320.1| contains similarity to GTPase protein~gene_id:K12B20.22 [Arabidopsis thaliana]
  misc_feature (1)..(129): Homolog of NCBI NO: 18408493 NR Description: C2 domain-containing protein [Arabidopsis
  misc_feature (1)..(132): Homolog of NCBI NO: 18409675 NR Description: C2 domain-containing protein [Arabidopsis
  misc_feature (1)..(132): Homolog of NCBI NO: 18409682 NR Description: C2 domain-containing protein [Arabidopsis
  misc_feature (1)..(132): Homolog of NCBI NO: 13430460 NR Description: unknown protein [Arabidopsis thaliana]
  misc_feature (1)..(128): Homolog of NCBI NO: 33146442 NR Description: zinc finger and C2 domain protein-like [Oryza

SEQ ID NO: 98476 - protein, 90 aa, Arabidopsis thaliana
  peptide (1)..(90): Ceres Seq. ID no. 13593767
  misc_feature (1)..(90): Homolog of NCBI NO: 30684739 NR Description: C2 domain-containing protein [Arabidopsis
  misc_feature (1)..(90): Homolog of NCBI NO: 15221907 NR Description: C2 domain-containing protein [Arabidopsis
  misc_feature (1)..(90): Homolog of NCBI NO: 25405940 NR Description: protein T1N15.21 [imported] - Arabidopsis >gi|8778695|gb|AAF79703.1|AC020889_11 T1N15.21 [Arabidopsis
  misc_feature (1)..(90): Homolog of NCBI NO: 15219500 NR Description: C2 domain-containing protein [Arabidopsis
  misc_feature (1)..(90): Homolog of NCBI NO: 15240322 NR Description: C2 domain-containing protein [Arabidopsis >gi|9757984|dbj|BAB08320.1| contains similarity to GTPase protein~gene_id:K12B20.22 [Arabidopsis thaliana]
  misc_feature (1)..(87): Homolog of NCBI NO: 18408493 NR Description: C2 domain-containing protein [Arabidopsis
  misc_feature (1)..(90): Homolog of NCBI NO: 18409675 NR Description: C2 domain-containing protein [Arabidopsis
  misc_feature (1)..(90): Homolog of NCBI NO: 18409682 NR Description: C2 domain-containing protein [Arabidopsis
  misc_feature (1)..(90): Homolog of NCBI NO: 13430460 NR Description: unknown protein [Arabidopsis thaliana]
  misc_feature (1)..(86): Homolog of NCBI NO: 33146442 NR Description: zinc finger and C2 domain protein-like [Oryza
MFSKDDKMGDAEFEIKPYIEALRMQLDGLPSGTIVTTVKPSRRNCLAEESRVTWVDGKLVQDLVLRLRHVECGEVEAQLQWIDLPGSKGL

SEQ ID NO: 98477 - DNA, 1725 bp, Arabidopsis thaliana
  misc_feature (1)..(1725): Ceres Seq. ID no. 13593768
  misc_feature: MA Experiment ID: 20000444 Result: Up-regulated in Transcription
  misc_feature: MA Experiment 20000444 PARAMETER Experiment Name: At_100uM_NAA__P Parameter: Age (day) Value: 14
  misc_feature: MA Experiment 20000444 PARAMETER Experiment Name: At_100uM_NAA__P Parameter: Organism Value: A. thaliana
  misc_feature: MA Experiment 20000444 PARAMETER Experiment Name: At_100uM_NAA__P Parameter: Plant Line Value: WS
  misc_feature: MA Experiment 20000444 PARAMETER Experiment Name: At_100uM_NAA__P Parameter: Timepoint (hr) Value: 1
  misc_feature: MA Experiment 20000444 PARAMETER Experiment Name: At_100uM_NAA__P Parameter: Tissue Value: Aerial
  misc_feature: MA Experiment 20000444 PARAMETER Experiment Name: At_100uM_NAA__P Parameter: Treatment Value: 100uM NAA vs. No Treatment
  misc_feature: MA Experiment ID: 20000495 Result: Up-regulated in Transcription
  misc_feature: MA Experiment 20000495 PARAMETER Experiment Name: At_Guard_Cells_P Parameter: Harvest Date Value: 8/2/2002
  misc_feature: MA Experiment 20000495 PARAMETER Experiment Name: At_Guard_Cells_P Parameter: Organism Value: A. thaliana
  misc_feature: MA Experiment 20000495 PARAMETER Experiment Name: At_Guard_Cells_P Parameter: Tissue Value: Guard Cells vs. Leaves
  misc_feature: MA Experiment ID: 20001911 Result: Down-regulated in Transcription
  misc_feature: MA Experiment 20001911 PARAMETER Experiment Name: At_Drought_Reproduction_P Parameter: Age (day) Value: 40
  misc_feature: MA Experiment 20001911 PARAMETER Experiment Name: At_Drought_Reproduction_P Parameter: Organism Value: A. thaliana
  misc_feature: MA Experiment 20001911 PARAMETER Experiment Name: At_Drought_Reproduction_P Parameter: Plant Line Value: WS
  misc_feature: MA Experiment 20001911 PARAMETER Experiment Name: At_Drought_Reproduction_P Parameter: Timepoint (day) Value: 10
  misc_feature: MA Experiment 20001911 PARAMETER Experiment Name: At_Drought_Reproduction_P Parameter: Tissue Value: Flowers
  misc_feature: MA Experiment 20001911 PARAMETER Experiment Name: At_Drought_Reproduction_P Parameter: Treatment Value: Drought vs. No Drought
acttcaaaattcatcacaaagagagataagagagatggagaacggtgagaaagcagctgagactgtcgttgttgggaactatgttgagatggagaaggatggtaaagctttagacatcaaatctaagctatctgacatgttttggcatggtggctctgcttatgatgcttggttcagctgtgcttccaatcaggtggcacaagtgctgttgacactgccatactcgttctcacagctggggatgctctcagggattctgtttcagctcttttatggcatcttaggtagttggactgcttacctcatcagtattctctatgttgaatacagaaccagaaaggaaagagagaaagttaacttcagaaaccatgtcattcagtggtttgaggttcttgatggattgcttgggaagcattggaggaatgttggtttagcctttaactgcaccttccttctctttggatctgtcattcaactcatagcttgtgccagcaacatatattacataaatgataatctggacaagaggacatggacatacatatttggagcatgttgtgcaaccacagtctttattccttccttccacaactacaggatctggtcttttcttggactcttgatgaccacttacactgcttggtacctcaccattgcctctatcctccatggacaggtagaaggagtgaagcattcaggaccaagcaagctggttttatacttcacaggggccacaaacattctttacacattcggtggacatgctgttactgtagagataatgcatgctatgtggaaacctcagaagttcaagtccatatacctgtttgcaacactctacgtgctgacgctaacgctgccttctgcgtctgcggtttattgggcgtttggtgatttgcttctaaaccattcaaacgcatttgctcttctcccaaagaatctttaccgtgactttgcagttgtgcttatgctcatccatcagttcatcacctttggttttgcttgcacgccactctactttgtgtgggagaagctaatagggatgcatgagtgcagaagcatgtgtaaacgagccgctgcgaggctccctgtcgttatacccatttggtttcttgctatcatattcccgttctttggtcccattaactcaaccgtaggatctcttctcgtcagcttcactgtctacatcatcccagcactagctcacatcttcaccttccgctcatccgccgcacgtgaaaacgctgtggagcagccaccaaggtttctaggacgatggactggggcattcacgatcaatgccttcatagttgtgtgggtgttcattgttggattcgggttcggtggttgggctagtatgatcaattttgtacaccagattgacacctttggcctcttcaccaaatgctaccaatgcccaccaccggttatggtctcacctcctccaatcagccatcctcacttcaatcacactcacggcctttgaattttaagcatcaaatctttagtaccggcccaaaagtgtccctagctgccacgaaagttggcgtttttccacggatcagaaaaagacgagatttgggtttttcttagatctaccaagcccgtagtgtgtttgggtgtttgtttagcatctaaagttggttggtctgtttttattgtatttcatgtttgggaattaaagaaaaaaaaaaaaaactttaggagttaatgccatatctttca

SEQ ID NO: 98478 - protein, 494 aa, Arabidopsis thaliana
  peptide (1)..(494): Ceres Seq. ID no. 13593769
  misc_feature (12)..(494): Homolog of NCBI NO: 15226450 NR Description: amino acid permease, putative [Arabidopsis
  misc_feature (11)..(490): Homolog of NCBI NO: 21586474 NR Description: auxin influx carrier protein [Medicago truncatula]
  misc_feature (16)..(492): Homolog of NCBI NO: 14279184 NR Description: putative AUX1-like permease [Populus tremula x
  misc_feature (20)..(474): Homolog of NCBI NO: 15217443 NR Description: amino acid permease, putative [Arabidopsis
  misc_feature (16)..(474): Homolog of NCBI NO: 10800922 NR Description: putative AUX1-like permease [Medicago truncatula]
  misc_feature (25)..(494): Homolog of NCBI NO: 37531048 NR Description: putative AUX1-like permease [Oryza sativa
  misc_feature (29)..(486): Homolog of NCBI NO: 6689614 NR Description: AUX1 protein [Zea mays]
  misc_feature (2)..(490): Homolog of NCBI NO: 37651177 NR Description: AUX1-like auxin influx carrier protein [Pisum
  misc_feature (16)..(490): Homolog of NCBI NO: 10800920 NR Description: putative AUX1-like permease [Medicago truncatula]
  misc_feature (16)..(482): Homolog of NCBI NO: 6650716 NR Description: AUX1-like protein [Populus tremula x Populus
LQNSSQREIREMENGEKAAETVVVGNYVEMEKDGKALDIKSKLSDMFWHGGSAYDAWFSCASNQVAQVLLTLPYSFSQLGMLSGILFQLFYGILGSWTAYLISILYVEYRTRKEREKVNFRNHVIQWFEVLDGLLGKHWRNVGLAFNCTFLLFGSVIQLIACASNIYYINDNLDKRTWTYIFGACCATTVFIPSFHNYRIWSFLGLLMTTYTAWYLTIASILHGQVEGVKHSGPSKLVLYFTGATNILYTFGGHAVTVEIMHAMWKPQKFKSIYLFATLYVLTLTLPSASAVYWAFGDLLLNHSNAFALLPKNLYRDFAVVLMLIHQFITFGFACTPLYFVWEKLIGMHECRSMCKRAAARLPVVIPIWFLAIIFPFFGPINSTVGSLLVSFTVYIIPALAHIFTFRSSAARENAVEQPPRFLGRWTGAFTINAFIVVWVFIVGFGFGGWASMINFVHQIDTFGLFTKCYQCPPPVMVSPPPISHPHFNHTHGL

SEQ ID NO: 98479 - protein, 483 aa, Arabidopsis thaliana; identical to SEQ ID NO: 49582
  peptide (1)..(483): Ceres Seq. ID no. 13593770
  misc_feature (1)..(483): Homolog of NCBI NO: 15226450 NR Description: amino acid permease, putative [Arabidopsis
  misc_feature (1)..(479): Homolog of NCBI NO: 21586474 NR Description: auxin influx carrier protein [Medicago truncatula]
  misc_feature (5)..(481): Homolog of NCBI NO: 14279184 NR Description: putative AUX1-like permease [Populus tremula x
  misc_feature (9)..(463): Homolog of NCBI NO: 15217443 NR Description: amino acid permease, putative [Arabidopsis
  misc_feature (5)..(463): Homolog of NCBI NO: 10800922 NR Description: putative AUX1-like permease [Medicago truncatula]
  misc_feature (14)..(483): Homolog of NCBI NO: 37531048 NR Description: putative AUX1-like permease [Oryza sativa
  misc_feature (18)..(475): Homolog of NCBI NO: 6689614 NR Description: AUX1 protein [Zea mays]
  misc_feature (1)..(479): Homolog of NCBI NO: 37651177 NR Description: AUX1-like auxin influx carrier protein [Pisum
  misc_feature (5)..(479): Homolog of NCBI NO: 10800920 NR Description: putative AUX1-like permease [Medicago truncatula]
  misc_feature (5)..(471): Homolog of NCBI NO: 6650716 NR Description: AUX1-like protein [Populus tremula x Populus

SEQ ID NO: 98480 - protein, 465 aa, Arabidopsis thaliana; identical to SEQ ID NO: 49583
  peptide (1)..(465): Ceres Seq. ID no. 13593771
  misc_feature (1)..(465): Homolog of NCBI NO: 15226450 NR Description: amino acid permease, putative [Arabidopsis
  misc_feature (1)..(461): Homolog of NCBI NO: 21586474 NR Description: auxin influx carrier protein [Medicago truncatula]
  misc_feature (1)..(463): Homolog of NCBI NO: 14279184 NR Description: putative AUX1-like permease [Populus tremula x
  misc_feature (1)..(445): Homolog of NCBI NO: 15217443 NR Description: amino acid permease, putative [Arabidopsis
  misc_feature (1)..(445): Homolog of NCBI NO: 10800922 NR Description: putative AUX1-like permease [Medicago truncatula]
  misc_feature (1)..(465): Homolog of NCBI NO: 37531048 NR Description: putative AUX1-like permease [Oryza sativa
  misc_feature (1)..(457): Homolog of NCBI NO: 6689614 NR Description: AUX1 protein [Zea mays]
  misc_feature (1)..(461): Homolog of NCBI NO: 37651177 NR Description: AUX1-like auxin influx carrier protein [Pisum
  misc_feature (1)..(461): Homolog of NCBI NO: 10800920 NR Description: putative AUX1-like permease [Medicago truncatula]
  misc_feature (1)..(453): Homolog of NCBI NO: 6650716 NR Description: AUX1-like protein [Populus tremula x Populus

SEQ ID NO: 98481 - DNA, 1767 bp, Arabidopsis thaliana
  misc_feature (1)..(1767): Ceres Seq. ID no. 13593792
  misc_feature: MA Experiment ID: 20000179 Result: Down-regulated in Transcription
  misc_feature: MA Experiment 20000179 PARAMETER Experiment Name: At_Germinating_Seeds_P Parameter: Age (hr) Value: 6 vs. 0
  misc_feature: MA Experiment 20000179 PARAMETER Experiment Name: At_Germinating_Seeds_P Parameter: Tissue Value: Germinating Seeds
  misc_feature: MA Experiment ID: 20000182 Result: Up-regulated in Transcription
  misc_feature: MA Experiment 20000182 PARAMETER Experiment Name: At_2mM_SA_P Parameter: Age (day) Value: 14
  misc_feature: MA Experiment 20000182 PARAMETER Experiment Name: At_2mM_SA_P Parameter: Organism Value: A. thaliana
  misc_feature: MA Experiment 20000182 PARAMETER Experiment Name: At_2mM_SA_P Parameter: Plant Line Value: WS
  misc_feature: MA Experiment 20000182 PARAMETER Experiment Name: At_2mM_SA_P Parameter: Timepoint (hr) Value: 6
  misc_feature: MA Experiment 20000182 PARAMETER Experiment Name: At_2mM_SA_P Parameter: Tissue Value: Aerial
  misc_feature: MA Experiment 20000182 PARAMETER Experiment Name: At_2mM_SA_P Parameter: Treatment Value: 2mM SA vs. No Treatment
  misc_feature: MA Experiment ID: 20000184 Result: Up-regulated in Transcription
  misc_feature: MA Experiment 20000184 PARAMETER Experiment Name: At_Shoots__P Parameter: Age (day) Value: 7
  misc_feature: MA Experiment 20000184 PARAMETER Experiment Name: At_Shoots__P Parameter: Tissue Value: Shoots vs. Whole Plant
  misc_feature: MA Experiment ID: 20000185 Result: Up-regulated in Transcription
  misc_feature: MA Experiment 20000185 PARAMETER Experiment Name: At_Roots__P Parameter: Age (day) Value: 7 vs. 21
  misc_feature: MA Experiment 20000185 PARAMETER Experiment Name: At_Roots__P Parameter: Organism Value: A. thaliana
  misc_feature: MA Experiment 20000185 PARAMETER Experiment Name: At_Roots__P Parameter: Tissue Value: Roots vs. Whole Plant
  misc_feature: MA Experiment ID: 20000213 Result: Down-regulated in Transcription
  misc_feature: MA Experiment 20000213 PARAMETER Experiment Name: At_4deg_Cold_P Parameter: Timepoint (hr) Value: 2
  misc_feature: MA Experiment ID: 20000227 Result: Down-regulated in Transcription
  misc_feature: MA Experiment 20000227 PARAMETER Experiment Name: At_Root-Tips-vs-Tops_P Parameter: Tissue Value: Root Tips vs. Root Tops
  misc_feature: MA Experiment ID: 20000234 Result: Down-regulated in Transcription
  misc_feature: MA Experiment 20000234 PARAMETER Experiment Name: At_Siliques_P Parameter: Age (day) Value: 21
  misc_feature: MA Experiment 20000234 PARAMETER Experiment Name: At_Siliques_P Parameter: Organism Value: A. thaliana
  misc_feature: MA Experiment 20000234 PARAMETER Experiment Name: At_Siliques_P Parameter: Plant Line Value: WS
  misc_feature: MA Experiment 20000234 PARAMETER Experiment Name: At_Siliques_P Parameter: Tissue Value: Less Than 5mm Siliques vs. Whole Plant
  misc_feature: MA Experiment ID: 20000235 Result: Down-regulated in Transcription
  misc_feature: MA Experiment 20000235 PARAMETER Experiment Name: At_Siliques_P Parameter: Age (day) Value: 21
  misc_feature: MA Experiment 20000235 PARAMETER Experiment Name: At_Siliques_P Parameter: Organism Value: A. thaliana
  misc_feature: MA Experiment 20000235 PARAMETER Experiment Name: At_Siliques_P Parameter: Plant Line Value: WS
  misc_feature: MA Experiment 20000235 PARAMETER Experiment Name: At_Siliques_P Parameter: Tissue Value: 5-10mm Siliques vs. Whole Plant
  misc_feature: MA Experiment ID: 20000438 Result: Up-regulated in Transcription
  misc_feature: MA Experiment 20000438 PARAMETER Experiment Name: At_Shoots__P Parameter: Age (day) Value: 14
  misc_feature: MA Experiment 20000438 PARAMETER Experiment Name: At_Shoots__P Parameter: Tissue Value: Shoots vs. Whole Plant
  misc_feature: MA Experiment ID: 20000439 Result: Up-regulated in Transcription
  misc_feature: MA Experiment 20000439 PARAMETER Experiment Name: At_Roots__P Parameter: Age (day) Value: 14 vs. 21
  misc_feature: MA Experiment 20000439 PARAMETER Experiment Name: At_Roots__P Parameter: Organism Value: A. thaliana
  misc_feature: MA Experiment 20000439 PARAMETER Experiment Name: At_Roots__P Parameter: Tissue Value: Roots vs. Whole Plant
  misc_feature: MA Experiment ID: 20000495 Result: Down-regulated in Transcription
  misc_feature: MA Experiment 20000495 PARAMETER Experiment Name: At_Guard_Cells_P Parameter: Harvest Date Value: 8/2/2002
  misc_feature: MA Experiment 20000495 PARAMETER Experiment Name: At_Guard_Cells_P Parameter: Organism Value: A. thaliana
  misc_feature: MA Experiment 20000495 PARAMETER Experiment Name: At_Guard_Cells_P Parameter: Tissue Value: Guard Cells vs. Leaves
  misc_feature: MA Experiment ID: 20000709 Result: Up-regulated in Transcription
  misc_feature: MA Experiment 20000709 PARAMETER Experiment Name: At_15mM_NH4NO3_L-to-H_P Parameter: Age (hr) Value: 14
  misc_feature: MA Experiment 20000709 PARAMETER Experiment Name: At_15mM_NH4NO3_L-to-H_P Parameter: Organism Value: A. thaliana
  misc_feature: MA Experiment 20000709 PARAMETER Experiment Name: At_15mM_NH4NO3_L-to-H_P Parameter: Plant Line Value: WS
  misc_feature: MA Experiment 20000709 PARAMETER Experiment Name: At_15mM_NH4NO3_L-to-H_P Parameter: Timepoint (hr) Value: 4
  misc_feature: MA Experiment 20000709 PARAMETER Experiment Name: At_15mM_NH4NO3_L-to-H_P Parameter: Tissue Value: Aerial
  misc_feature: MA Experiment 20000709 PARAMETER Experiment Name: At_15mM_NH4NO3_L-to-H_P Parameter: Treatment Value: 15mM NH4NO3 vs. 30mM Mannitol
  misc_feature: MA Experiment ID: 20000794 Result: Up-regulated in Transcription
  misc_feature: MA Experiment 20000794 PARAMETER Experiment Name: At_Petals_P Parameter: Age (day) Value: 23-25 days
  misc_feature: MA Experiment 20000794 PARAMETER Experiment Name: At_Petals_P Parameter: Plant Line Value: WS
  misc_feature: MA Experiment 20000794 PARAMETER Experiment Name: At_Petals_P Parameter: Tissue Value: Petals vs. Whole plant
  misc_feature: MA Experiment ID: 20001247 Result: Up-regulated in Transcription
  misc_feature: MA Experiment 20001247 PARAMETER Experiment Name: At_Far-red-induction_P Parameter: Age (day) Value: 7
  misc_feature: MA Experiment 20001247 PARAMETER Experiment Name: At_Far-red-induction_P Parameter: Light Value: Far-red vs. White
  misc_feature: MA Experiment 20001247 PARAMETER Experiment Name: At_Far-red-induction_P Parameter: Organism Value: A. thaliana
  misc_feature: MA Experiment 20001247 PARAMETER Experiment Name: At_Far-red-induction_P Parameter: Plant Line Value: Columbia
  misc_feature: MA Experiment 20001247 PARAMETER Experiment Name: At_Far-red-induction_P Parameter: Timepoint (hr) Value: 1
  misc_feature: MA Experiment 20001247 PARAMETER Experiment Name: At_Far-red-induction_P Parameter: Tissue Value: Whole Plant
  misc_feature: MA Experiment ID: 20001554 Result: Up-regulated in Transcription
  misc_feature: MA Experiment 20001554 PARAMETER Experiment Name: At_Drought_Soil_Dry_P Parameter: Age (day) Value: 21
  misc_feature: MA Experiment 20001554 PARAMETER Experiment Name: At_Drought_Soil_Dry_P Parameter: Organism Value: A. thaliana
  misc_feature: MA Experiment 20001554 PARAMETER Experiment Name: At_Drought_Soil_Dry_P Parameter: Plant Line Value: WS
  misc_feature: MA Experiment 20001554 PARAMETER Experiment Name: At_Drought_Soil_Dry_P Parameter: Post Timepoint (hr) Value: None
  misc_feature: MA Experiment 20001554 PARAMETER Experiment Name: At_Drought_Soil_Dry_P Parameter: Post-Treatment Value: None
  misc_feature: MA Experiment 20001554 PARAMETER Experiment Name: At_Drought_Soil_Dry_P Parameter: Timepoint (day) Value: 7
  misc_feature: MA Experiment 20001554 PARAMETER Experiment Name: At_Drought_Soil_Dry_P Parameter: Treatment Value: Drought vs. No Drought
  misc_feature: MA Experiment ID: 20001555 Result: Up-regulated in Transcription
  misc_feature: MA Experiment 20001555 PARAMETER Experiment Name: At_Drought_Soil_Dry_P Parameter: Age (day) Value: 24
  misc_feature: MA Experiment 20001555 PARAMETER Experiment Name: At_Drought_Soil_Dry_P Parameter: Organism Value: A. thaliana
  misc_feature: MA Experiment 20001555 PARAMETER Experiment Name: At_Drought_Soil_Dry_P Parameter: Plant Line Value: WS
  misc_feature: MA Experiment 20001555 PARAMETER Experiment Name: At_Drought_Soil_Dry_P Parameter: Post Timepoint (hr) Value: None
  misc_feature: MA Experiment 20001555 PARAMETER Experiment Name: At_Drought_Soil_Dry_P Parameter: Post-Treatment Value: None
  misc_feature: MA Experiment 20001555 PARAMETER Experiment Name: At_Drought_Soil_Dry_P Parameter: Timepoint (day) Value: 10
  misc_feature: MA Experiment 20001555 PARAMETER Experiment Name: At_Drought_Soil_Dry_P Parameter: Treatment Value: Drought vs. No Drought
  misc_feature: MA Experiment ID: 20001905 Result: Up-regulated in Transcription
  misc_feature: MA Experiment 20001905 PARAMETER Experiment Name: At_Drought_Reproduction_P Parameter: Age (day) Value: 40
  misc_feature: MA Experiment 20001905 PARAMETER Experiment Name: At_Drought_Reproduction_P Parameter: Organism Value: A. thaliana
  misc_feature: MA Experiment 20001905 PARAMETER Experiment Name: At_Drought_Reproduction_P Parameter: Plant Line Value: WS
  misc_feature: MA Experiment 20001905 PARAMETER Experiment Name: At_Drought_Reproduction_P Parameter: Timepoint (day) Value: 10
  misc_feature: MA Experiment 20001905 PARAMETER Experiment Name: At_Drought_Reproduction_P Parameter: Tissue Value: Rosettes
  misc_feature: MA Experiment 20001905 PARAMETER Experiment Name: At_Drought_Reproduction_P Parameter: Treatment Value: Drought vs. No Drought
  misc_feature: MA Experiment ID: 20001906 Result: Up-regulated in Transcription
  misc_feature: MA Experiment 20001906 PARAMETER Experiment Name: At_Drought_Reproduction_P Parameter: Age (day) Value: 35
  misc_feature: MA Experiment 20001906 PARAMETER Experiment Name: At_Drought_Reproduction_P Parameter: Organism Value: A. thaliana
  misc_feature: MA Experiment 20001906 PARAMETER Experiment Name: At_Drought_Reproduction_P Parameter: Plant Line Value: WS
  misc_feature: MA Experiment 20001906 PARAMETER Experiment Name: At_Drought_Reproduction_P Parameter: Timepoint (day) Value: 5
  misc_feature: MA Experiment 20001906 PARAMETER Experiment Name: At_Drought_Reproduction_P Parameter: Tissue Value: Siliques
  misc_feature: MA Experiment 20001906 PARAMETER Experiment Name: At_Drought_Reproduction_P Parameter: Treatment Value: Drought vs. No Drought
  misc_feature: MA Experiment ID: 20001908 Result: Up-regulated in Transcription
  misc_feature: MA Experiment 20001908 PARAMETER Experiment Name: At_Drought_Reproduction_P Parameter: Age (day) Value: 40
  misc_feature: MA Experiment 20001908 PARAMETER Experiment Name: At_Drought_Reproduction_P Parameter: Organism Value: A. thaliana
  misc_feature: MA Experiment 20001908 PARAMETER Experiment Name: At_Drought_Reproduction_P Parameter: Plant Line Value: WS
  misc_feature: MA Experiment 20001908 PARAMETER Experiment Name: At_Drought_Reproduction_P Parameter: Timepoint (day) Value: 10
  misc_feature: MA Experiment 20001908 PARAMETER Experiment Name: At_Drought_Reproduction_P Parameter: Tissue Value: Siliques
  misc_feature: MA Experiment 20001908 PARAMETER Experiment Name: At_Drought_Reproduction_P Parameter: Treatment Value: Drought vs. No Drought
  misc_feature: MA Experiment ID: 20001911 Result: Up-regulated in Transcription
  misc_feature: MA Experiment 20001911 PARAMETER Experiment Name: At_Drought_Reproduction_P Parameter: Age (day) Value: 40
  misc_feature: MA Experiment 20001911 PARAMETER Experiment Name: At_Drought_Reproduction_P Parameter: Organism Value: A. thaliana
  misc_feature: MA Experiment 20001911 PARAMETER Experiment Name: At_Drought_Reproduction_P Parameter: Plant Line Value: WS
  misc_feature: MA Experiment 20001911 PARAMETER Experiment Name: At_Drought_Reproduction_P Parameter: Timepoint (day) Value: 10
  misc_feature: MA Experiment 20001911 PARAMETER Experiment Name: At_Drought_Reproduction_P Parameter: Tissue Value: Flowers
  misc_feature: MA Experiment 20001911 PARAMETER Experiment Name: At_Drought_Reproduction_P Parameter: Treatment Value: Drought vs. No Drought
  misc_feature: Pfam Name: MatE Pfam Description: MatE
atctctcgtcttcaccattcttctcacttcttcttttctccttatatttcatttcttccacataactaaaaaaaaaaggaattagcgatgaggggaggtgatggagaagaaggatcggagtcaagagttgcactgttgaaaagtcctcacacggcggaggaagacggtgaaggattgaaggatagaattttggttgagacaaaaaagctatggcaaatagttggtccggccatattcagtcgagtaacgacatattcgatgcttgtaatcactcaagctttcgctggtcatctcggcgatcttgaactcgccgccatatccatcgttaataacgtcaccgttggcttcaactttggcctcttgcttggaatggcgagtgcgttggaaacgctgtgtggacaagcgtttggagcgaagaaatatcatatgttgggagtttatatgcagcgttcttggattgttctcttcttttgctgtgtcttgttattaccaacttatattttcactactccggttcttaaatttcttggtcaaccggacgatatcgctgagctgtccggtgttgtcgccatttgggtcataccgcttcatttcgccttcactttgtcttttccccttcaacgtttccttcagtgccagctcaaaaaccgagtgactgcgtatgcggcagcggttgcattggtggttcatattttagtgtgttggttgttcgtggacgggcttaaactaggagtcgtggggactgtagctacgattagtatctcgtggtgggtcaatgttcttattctgttagtttactctacttgtggtggttgtccgcttacttggaccggcttatcctctgaagccttaaccggactttgggaattccttaaactctctgcttcttcaggcgtcatgctctgtttggagaattggtattatcggattttgattataatgactgggaatcttcaaaatgctcgaatcgccgttgactccttgtccatatgcatggcgataaatggttgggagatgatgatacctctcgctttcttcgccggaaccggtgtccgtgtggcgaacgaattaggagctggtaatggtaaaggagcaagatttgcgacgattgtatcggtaacacaatcgttgataatcggattgtttttttgggtgctaataatgcttctccataaccaaatcgcatggatcttctcttcgagtgtagccgtcttagacgccgtcaataaactctcacttctgctagctttcaccgttcttcttaacagcgttcaaccggttctttccggtgtggcggttggatcgggttggcaatcgtacgtggcatatataaacttgggatgttactattgcattggtgttccacttgggtttctcatgggctggggttttaaactcggtgtcatgggaatttggggtggtatgatttttggaggaaccgctgttcaaaccatgatcttaagttttatcacaatgagatgtgactgggaaaaagaggcgcagaaagcaagtgctcgtattaacaaatggtccaacacaataaaatgattcaagattttgttgaatcaactattaaataattttgcagcataatatggttttggaaaactggtgtatgttttgtatccaaatgtgatacaacatatttagagccggttcatagattacataggatcgctgcaattactgcaaaatggcctttgtgattttctttttatagcatgccttgtaatattattagataaaactgctttattttaatttagt

SEQ ID NO: 98482 - protein, 486 aa, Arabidopsis thaliana; identical to SEQ ID NO: 50104
  peptide (1)..(486): Ceres Seq. ID no. 13593793
  misc_feature: Pfam Name: MatE Pfam Description: MatE
  misc_feature (1)..(486): Homolog of NCBI NO: 15238439 NR Description: ripening regulated protein, putative [Arabidopsis >gi|9759618|dbj|BAB11560.1| emb|CAB89401.1~gene_id:MNA5.11~strong to unknown protein [Arabidopsis thaliana]
  misc_feature (5)..(482): Homolog of NCBI NO: 15240080 NR Description: MATE efflux protein family [Arabidopsis thaliana] emb|CAB89401.1~gene_id:MRH10.16~similar to unknown protein
  misc_feature (2)..(347): Homolog of NCBI NO: 15238161 NR Description: ripening regulated protein, putative [Arabidopsis
  misc_feature (372)..(470): Homolog of NCBI NO: 15238161 NR Description: ripening regulated protein, putative [Arabidopsis
  misc_feature (23)..(454): Homolog of NCBI NO: 12231296 NR Description: ripening regulated protein DDTFR18 [Lycopersicon
  misc_feature (1)..(481): Homolog of NCBI NO: 15223402 NR Description: MATE efflux protein family [Arabidopsis thaliana] Unknown protein [Arabidopsis thaliana]
  misc_feature (115)..(482): Homolog of NCBI NO: 34902422 NR Description: Putative ripening regulated protein [Oryza sativa
  misc_feature (8)..(481): Homolog of NCBI NO: 22329916 NR Description: MATE efflux protein family [Arabidopsis thaliana] unknown protein [Arabidopsis thaliana]
  misc_feature (8)..(481): Homolog of NCBI NO: 15223391 NR Description: MATE efflux protein family [Arabidopsis thaliana]
  misc_feature (37)..(484): Homolog of NCBI NO: 15220246 NR Description: ripening regulated protein, putative [Arabidopsis

SEQ ID NO: 98483 - protein, 429 aa, Arabidopsis thaliana; identical to SEQ ID NO: 50105
  peptide (1)..(429): Ceres Seq. ID no. 13593794
  misc_feature: Pfam Name: MatE Pfam Description: MatE
  misc_feature (1)..(429): Homolog of NCBI NO: 15238439 NR Description: ripening regulated protein, putative [Arabidopsis >gi|9759618|dbj|BAB11560.1| emb|CAB89401.1~gene_id:MNA5.11~strong to unknown protein [Arabidopsis thaliana]
  misc_feature (1)..(425): Homolog of NCBI NO: 15240080 NR Description: MATE efflux protein family [Arabidopsis thaliana] emb|CAB89401.1~gene_id:MRH10.16~similar to unknown protein
  misc_feature (1)..(290): Homolog of NCBI NO: 15238161 NR Description: ripening regulated protein, putative [Arabidopsis
  misc_feature (315)..(413): Homolog of NCBI NO: 15238161 NR Description: ripening regulated protein, putative [Arabidopsis
  misc_feature (1)..(397): Homolog of NCBI NO: 12231296 NR Description: ripening regulated protein DDTFR18 [Lycopersicon
  misc_feature (1)..(424): Homolog of NCBI NO: 15223402 NR Description: MATE efflux protein family [Arabidopsis thaliana] Unknown protein [Arabidopsis thaliana]
  misc_feature (58)..(425): Homolog of NCBI NO: 34902422 NR Description: Putative ripening regulated protein [Oryza sativa
  misc_feature (1)..(424): Homolog of NCBI NO: 22329916 NR Description: MATE efflux protein family [Arabidopsis thaliana] unknown protein [Arabidopsis thaliana]
  misc_feature (1)..(424): Homolog of NCBI NO: 15223391 NR Description: MATE efflux protein family [Arabidopsis thaliana]
  misc_feature (1)..(427): Homolog of NCBI NO: 15220246 NR Description: ripening regulated protein, putative [Arabidopsis

SEQ ID NO: 98484 - protein, 392 aa, Arabidopsis thaliana; identical to SEQ ID NO: 50106
  peptide (1)..(392): Ceres Seq. ID no. 13593795
  misc_feature: Pfam Name: MatE Pfam Description: MatE
  misc_feature (1)..(392): Homolog of NCBI NO: 15238439 NR Description: ripening regulated protein, putative [Arabidopsis >gi|9759618|dbj|BAB11560.1| emb|CAB89401.1~gene_id:MNA5.11~strong to unknown protein [Arabidopsis thaliana]
  misc_feature (1)..(388): Homolog of NCBI NO: 15240080 NR Description: MATE efflux protein family [Arabidopsis thaliana] emb|CAB89401.1~gene_id:MRH10.16~similar to unknown protein
  misc_feature (1)..(253): Homolog of NCBI NO: 15238161 NR Description: ripening regulated protein, putative [Arabidopsis
  misc_feature (278)..(376): Homolog of NCBI NO: 15238161 NR Description: ripening regulated protein, putative [Arabidopsis
  misc_feature (1)..(360): Homolog of NCBI NO: 12231296 NR Description: ripening regulated protein DDTFR18 [Lycopersicon
  misc_feature (1)..(387): Homolog of NCBI NO: 15223402 NR Description: MATE efflux protein family [Arabidopsis thaliana] Unknown protein [Arabidopsis thaliana]
  misc_feature (21)..(388): Homolog of NCBI NO: 34902422 NR Description: Putative ripening regulated protein [Oryza sativa
  misc_feature (1)..(387): Homolog of NCBI NO: 22329916 NR Description: MATE efflux protein family [Arabidopsis thaliana] unknown protein [Arabidopsis thaliana]
  misc_feature (1)..(387): Homolog of NCBI NO: 15223391 NR Description: MATE efflux protein family [Arabidopsis thaliana]
  misc_feature (1)..(390): Homolog of NCBI NO: 15220246 NR Description: ripening regulated protein, putative [Arabidopsis

SEQ ID NO: 98485 - DNA, 849 bp, Arabidopsis thaliana
  misc_feature (1)..(849): Ceres Seq. ID no. 13593799
  misc_feature: MA Experiment ID: 20000171 Result: Down-regulated in Transcription
  misc_feature: MA Experiment 20000171 PARAMETER Experiment Name: At_42deg_Heat_P Parameter: Age (day) Value: 14
  misc_feature: MA Experiment 20000171 PARAMETER Experiment Name: At_42deg_Heat_P Parameter: Organism Value: A. thaliana
  misc_feature: MA Experiment 20000171 PARAMETER Experiment Name: At_42deg_Heat_P Parameter: Plant Line Value: WS
  misc_feature: MA Experiment 20000171 PARAMETER Experiment Name: At_42deg_Heat_P Parameter: Temperature (deg C) Value: 42 vs. 22
  misc_feature: MA Experiment 20000171 PARAMETER Experiment Name: At_42deg_Heat_P Parameter: Timepoint (hr) Value: 1
  misc_feature: MA Experiment 20000171 PARAMETER Experiment Name: At_42deg_Heat_P Parameter: Tissue Value: Aerial
  misc_feature: MA Experiment ID: 20000173 Result: Down-regulated in Transcription
  misc_feature: MA Experiment 20000173 PARAMETER Experiment Name: At_42deg_Heat_P Parameter: Age (day) Value: 14
  misc_feature: MA Experiment 20000173 PARAMETER Experiment Name: At_42deg_Heat_P Parameter: Organism Value: A. thaliana
  misc_feature: MA Experiment 20000173 PARAMETER Experiment Name: At_42deg_Heat_P Parameter: Plant Line Value: WS
  misc_feature: MA Experiment 20000173 PARAMETER Experiment Name: At_42deg_Heat_P Parameter: Temperature (deg C) Value: 42 vs. 22
  misc_feature: MA Experiment 20000173 PARAMETER Experiment Name: At_42deg_Heat_P Parameter: Timepoint (hr) Value: 6
  misc_feature: MA Experiment 20000173 PARAMETER Experiment Name: At_42deg_Heat_P Parameter: Tissue Value: Aerial
  misc_feature: MA Experiment ID: 20000182 Result: Up-regulated in Transcription
  misc_feature: MA Experiment 20000182 PARAMETER Experiment Name: At_2mM_SA_P Parameter: Age (day) Value: 14
  misc_feature: MA Experiment 20000182 PARAMETER Experiment Name: At_2mM_SA_P Parameter: Organism Value: A. thaliana
  misc_feature: MA Experiment 20000182 PARAMETER Experiment Name: At_2mM_SA_P Parameter: Plant Line Value: WS
  misc_feature: MA Experiment 20000182 PARAMETER Experiment Name: At_2mM_SA_P Parameter: Timepoint (hr) Value: 6
  misc_feature: MA Experiment 20000182 PARAMETER Experiment Name: At_2mM_SA_P Parameter: Tissue Value: Aerial
  misc_feature: MA Experiment 20000182 PARAMETER Experiment Name: At_2mM_SA_P Parameter: Treatment Value: 2mM SA vs. No Treatment
  misc_feature: MA Experiment ID: 20000184 Result: Down-regulated in Transcription
  misc_feature: MA Experiment 20000184 PARAMETER Experiment Name: At_Shoots__P Parameter: Age (day) Value: 7
  misc_feature: MA Experiment 20000184 PARAMETER Experiment Name: At_Shoots__P Parameter: Tissue Value: Shoots vs. Whole Plant
  misc_feature: MA Experiment ID: 20000227 Result: Down-regulated in Transcription
  misc_feature: MA Experiment 20000227 PARAMETER Experiment Name: At_Root-Tips-vs-Tops_P Parameter: Tissue Value: Root Tips vs. Root Tops
  misc_feature: MA Experiment ID: 20000234 Result: Down-regulated in Transcription
  misc_feature: MA Experiment 20000234 PARAMETER Experiment Name: At_Siliques_P Parameter: Age (day) Value: 21
  misc_feature: MA Experiment 20000234 PARAMETER Experiment Name: At_Siliques_P Parameter: Organism Value: A. thaliana
  misc_feature: MA Experiment 20000234 PARAMETER Experiment Name: At_Siliques_P Parameter: Plant Line Value: WS
  misc_feature: MA Experiment 20000234 PARAMETER Experiment Name: At_Siliques_P Parameter: Tissue Value: Less Than 5mm Siliques vs. Whole Plant
  misc_feature: MA Experiment ID: 20000235 Result: Down-regulated in Transcription
  misc_feature: MA Experiment 20000235 PARAMETER Experiment Name: At_Siliques_P Parameter: Age (day) Value: 21
  misc_feature: MA Experiment 20000235 PARAMETER Experiment Name: At_Siliques_P Parameter: Organism Value: A. thaliana
  misc_feature: MA Experiment 20000235 PARAMETER Experiment Name: At_Siliques_P Parameter: Plant Line Value: WS
  misc_feature: MA Experiment 20000235 PARAMETER Experiment Name: At_Siliques_P Parameter: Tissue Value: 5-10mm Siliques vs. Whole Plant
  misc_feature: MA Experiment ID: 20000264 Result: Down-regulated in Transcription
  misc_feature: MA Experiment 20000264 PARAMETER Experiment Name: At_Open_Flower_P Parameter: Age (day) Value: 21
  misc_feature: MA Experiment 20000264 PARAMETER Experiment Name: At_Open_Flower_P Parameter: Plant Line Value: WS
  misc_feature: MA Experiment 20000264 PARAMETER Experiment Name: At_Open_Flower_P Parameter: Tissue Value: Open Flower vs. Whole Plant
  misc_feature: MA Experiment ID: 20000265 Result: Down-regulated in Transcription
  misc_feature: MA Experiment 20000265 PARAMETER Experiment Name: At_Open_Flower_P Parameter: Age (day) Value: 21
  misc_feature: MA Experiment 20000265 PARAMETER Experiment Name: At_Open_Flower_P Parameter: Plant Line Value: WS
  misc_feature: MA Experiment 20000265 PARAMETER Experiment Name: At_Open_Flower_P Parameter: Tissue Value: Closed Flower vs. Whole Plant
  misc_feature: MA Experiment ID: 20000286 Result: Down-regulated in Transcription
  misc_feature: MA Experiment 20000286 PARAMETER Experiment Name: At_Open_Flower_P Parameter: Age (day) Value: 21
  misc_feature: MA Experiment 20000286 PARAMETER Experiment Name: At_Open_Flower_P Parameter: Plant Line Value: WS
  misc_feature: MA Experiment 20000286 PARAMETER Experiment Name: At_Open_Flower_P Parameter: Tissue Value: Half Open vs. Whole Plant
  misc_feature: MA Experiment ID: 20000438 Result: Down-regulated in Transcription
  misc_feature: MA Experiment 20000438 PARAMETER Experiment Name: At_Shoots__P Parameter: Age (day) Value: 14
  misc_feature: MA Experiment 20000438 PARAMETER Experiment Name: At_Shoots__P Parameter: Tissue Value: Shoots vs. Whole Plant
  misc_feature: MA Experiment ID: 20000496 Result: Down-regulated in Transcription
  misc_feature: MA Experiment 20000496 PARAMETER Experiment Name: At_Guard_Cells_P Parameter: Harvest Date Value: 7/19/2002
  misc_feature: MA Experiment 20000496 PARAMETER Experiment Name: At_Guard_Cells_P Parameter: Organism Value: Canola
  misc_feature: MA Experiment 20000496 PARAMETER Experiment Name: At_Guard_Cells_P Parameter: Tissue Value: Guard Cells vs. Leaves
  misc_feature: MA Experiment ID: 20000794 Result: Down-regulated in Transcription
  misc_feature: MA Experiment 20000794 PARAMETER Experiment Name: At_Petals_P Parameter: Age (day) Value: 23-25 days
  misc_feature: MA Experiment 20000794 PARAMETER Experiment Name: At_Petals_P Parameter: Plant Line Value: WS
  misc_feature: MA Experiment 20000794 PARAMETER Experiment Name: At_Petals_P Parameter: Tissue Value: Petals vs. Whole plant
  misc_feature: MA Experiment ID: 20001555 Result: Down-regulated in Transcription
  misc_feature: MA Experiment 20001555 PARAMETER Experiment Name: At_Drought_Soil_Dry_P Parameter: Age (day) Value: 24
  misc_feature: MA Experiment 20001555 PARAMETER Experiment Name: At_Drought_Soil_Dry_P Parameter: Organism Value: A. thaliana
  misc_feature: MA Experiment 20001555 PARAMETER Experiment Name: At_Drought_Soil_Dry_P Parameter: Plant Line Value: WS
  misc_feature: MA Experiment 20001555 PARAMETER Experiment Name: At_Drought_Soil_Dry_P Parameter: Post Timepoint (hr) Value: None
  misc_feature: MA Experiment 20001555 PARAMETER Experiment Name: At_Drought_Soil_Dry_P Parameter: Post-Treatment Value: None
  misc_feature: MA Experiment 20001555 PARAMETER Experiment Name: At_Drought_Soil_Dry_P Parameter: Timepoint (day) Value: 10
  misc_feature: MA Experiment 20001555 PARAMETER Experiment Name: At_Drought_Soil_Dry_P Parameter: Treatment Value: Drought vs. No Drought
  misc_feature: MA Experiment ID: 20001556 Result: Down-regulated in Transcription
  misc_feature: MA Experiment 20001556 PARAMETER Experiment Name: At_Drought_Soil_Dry_P Parameter: Age (day) Value: 26
  misc_feature: MA Experiment 20001556 PARAMETER Experiment Name: At_Drought_Soil_Dry_P Parameter: Organism Value: A. thaliana
  misc_feature: MA Experiment 20001556 PARAMETER Experiment Name: At_Drought_Soil_Dry_P Parameter: Plant Line Value: WS
  misc_feature: MA Experiment 20001556 PARAMETER Experiment Name: At_Drought_Soil_Dry_P Parameter: Post Timepoint (hr) Value: None
  misc_feature: MA Experiment 20001556 PARAMETER Experiment Name: At_Drought_Soil_Dry_P Parameter: Post-Treatment Value: None
  misc_feature: MA Experiment 20001556 PARAMETER Experiment Name: At_Drought_Soil_Dry_P Parameter: Timepoint (day) Value: 12
  misc_feature: MA Experiment 20001556 PARAMETER Experiment Name: At_Drought_Soil_Dry_P Parameter: Treatment Value: Drought vs. No Drought
  misc_feature: MA Experiment ID: 20001560 Result: Down-regulated in Transcription
  misc_feature: MA Experiment 20001560 PARAMETER Experiment Name: At_Drought_Soil_Dry_P Parameter: Age (day) Value: 28
  misc_feature: MA Experiment 20001560 PARAMETER Experiment Name: At_Drought_Soil_Dry_P Parameter: Organism Value: A. thaliana
  misc_feature: MA Experiment 20001560 PARAMETER Experiment Name: At_Drought_Soil_Dry_P Parameter: Plant Line Value: WS
  misc_feature: MA Experiment 20001560 PARAMETER Experiment Name: At_Drought_Soil_Dry_P Parameter: Post Timepoint (hr) Value: None
  misc_feature: MA Experiment 20001560 PARAMETER Experiment Name: At_Drought_Soil_Dry_P Parameter: Post-Treatment Value: None
  misc_feature: MA Experiment 20001560 PARAMETER Experiment Name: At_Drought_Soil_Dry_P Parameter: Timepoint (day) Value: 14
  misc_feature: MA Experiment 20001560 PARAMETER Experiment Name: At_Drought_Soil_Dry_P Parameter: Treatment Value: Drought vs. No Drought
atggcgaagttatgttgcttcggttcttcagactacgatcttgtggttgggagggcatcgactagttctggaaaagggagaaataacgacggcgagattaaattcggttacagcttagtgaaagggaaagctaatcatccaatggaggattatcatgtgtctaaattcgtgaaaatagacggtaacgagctcggtttgtttgcaatctacgatggtcatttgggtgaacgtgttcctgcttatctacagaagcatttgttctccaatatcctcaaagaggagcagtttaggtatgatcctcagagatcaataattgctgcctatgagaagacagaccaagccattctgtcacattcttctgacttaggccgtggtggctcaacggctgtaaccgctattctgatgaatggacggcgtttatgggtggcaaatgtgggtgattctcgggcggttctatctcaaggaggtcaggcaatacagatgactattgatcatgagccgcacactgaaaggttgagcatcgagggtaaaggaggctttgtatccaacatgccaggagatgtccctcgggttaacgggcagctagcggtttctcgtgcttttggagacaaaagcctcaaaacacatctacggtcagatcctgacgttaaagattcatcgatcgatgatcacacagatgttcttgttcttgctagtgacggtctatggaaggtgatggctaaccaagaggcgattgatattgcgagaagaatcaaagatccattgaaagcagcgaaagaactaacaaccgaagcgcttagaagagacagtaaagatgatatttcttgcattgtcgtcagattaaggtga

SEQ ID NO: 98486 - protein, 282 aa, Arabidopsis thaliana
  peptide (1)..(282): Ceres Seq. ID no. 13593800
  misc_feature (35)..(274): Pfam Name: Protein phosphatase 2C Pfam Description: Protein phosphatase 2C
  misc_feature (1)..(282): Homolog of NCBI NO: 15218759 NR Description: protein phosphatase 2C (PP2C), putative thaliana] >gi|5668780|gb|AAD46006.1|AC007894_4 Strong similarity gb|AF092432 protein phosphatase type 2C from Lotus japonicus. EST
  misc_feature (1)..(282): Homolog of NCBI NO: 18395099 NR Description: protein phosphatase 2C (PP2C), putative
  misc_feature (1)..(282): Homolog of NCBI NO: 21537096 NR Description: protein phosphatase type 2C, putative
  misc_feature (1)..(282): Homolog of NCBI NO: 18411863 NR Description: protein phosphatase 2C (PP2C), putative thaliana] >gi|22137096|gb|AAM91393.1| At1g78200/T11I11_14
  misc_feature (1)..(282): Homolog of NCBI NO: 15081703 NR Description: At1g78200/T11I11_14 [Arabidopsis thaliana]
  misc_feature (48)..(282): Homolog of NCBI NO: 25406547 NR Description: hypothetical protein T11I11.14 [imported] - thaliana >gi|12324254|gb|AAG52101.1|AC012680_12 putative protein
  misc_feature (12)..(282): Homolog of NCBI NO: 18399423 NR Description: protein phosphatase 2C (PP2C), putative thaliana] >gi|15724170|gb|AAL06477.1|AF411787_1 [Arabidopsis thaliana] >gi|18652945|dbj|BAB84701.1| protein
  misc_feature (15)..(282): Homolog of NCBI NO: 4336436 NR Description: protein phosphatase type 2C [Lotus japonicus]
  misc_feature (24)..(280): Homolog of NCBI NO: 18417190 NR Description: protein phosphatase 2C (PP2C), putative thaliana] >gi|16604585|gb|AAL24149.1| putative protein
  misc_feature (1)..(185): Homolog of NCBI NO: 32488329 NR Description: OSJNBa0086B14.22 [Oryza sativa (japonica
MAKLCCFGSSDYDLVVGRASTSSGKGRNNDGEIKFGYSLVKGKANHPMEDYHVSKFVKIDGNELGLFAIYDGHLGERVPAYLQKHLFSNILKEEQFRYDPQRSIIAAYEKTDQAILSHSSDLGRGGSTAVTAILMNGRRLWVANVGDSRAVLSQGGQAIQMTIDHEPHTERLSIEGKGGFVSNMPGDVPRVNGQLAVSRAFGDKSLKTHLRSDPDVKDSSIDDHTDVLVLASDGLWKVMANQEAIDIARRIKDPLKAAKELTTEALRRDSKDDISCIVVRLR

SEQ ID NO: 98487 - protein, 235 aa, Arabidopsis thaliana
  peptide (1)..(235): Ceres Seq. ID no. 13593801
  misc_feature (1)..(227): Pfam Name: Protein phosphatase 2C Pfam Description: Protein phosphatase 2C
  misc_feature (1)..(235): Homolog of NCBI NO: 15218759 NR Description: protein phosphatase 2C (PP2C), putative thaliana] >gi|5668780|gb|AAD46006.1|AC007894_4 Strong similarity gb|AF092432 protein phosphatase type 2C from Lotus japonicus. EST
  misc_feature (1)..(235): Homolog of NCBI NO: 18395099 NR Description: protein phosphatase 2C (PP2C), putative
  misc_feature (1)..(235): Homolog of NCBI NO: 21537096 NR Description: protein phosphatase type 2C, putative
  misc_feature (1)..(235): Homolog of NCBI NO: 18411863 NR Description: protein phosphatase 2C (PP2C), putative thaliana] >gi|22137096|gb|AAM91393.1| At1g78200/T11I11_14
  misc_feature (1)..(235): Homolog of NCBI NO: 15081703 NR Description: At1g78200/T11I11_14 [Arabidopsis thaliana]
  misc_feature (1)..(235): Homolog of NCBI NO: 25406547 NR Description: hypothetical protein T11I11.14 [imported] - thaliana >gi|12324254|gb|AAG52101.1|AC012680_12 putative protein
  misc_feature (1)..(235): Homolog of NCBI NO: 18399423 NR Description: protein phosphatase 2C (PP2C), putative thaliana] >gi|15724170|gb|AAL06477.1|AF411787_1 [Arabidopsis thaliana] >gi|18652945|dbj|BAB84701.1| protein
  misc_feature (1)..(235): Homolog of NCBI NO: 4336436 NR Description: protein phosphatase type 2C [Lotus japonicus]
  misc_feature (1)..(233): Homolog of NCBI NO: 18417190 NR Description: protein phosphatase 2C (PP2C), putative thaliana] >gi|16604585|gb|AAL24149.1| putative protein
  misc_feature (1)..(138): Homolog of NCBI NO: 32488329 NR Description: OSJNBa0086B14.22 [Oryza sativa (japonica
MEDYHVSKFVKIDGNELGLFAIYDGHLGERVPAYLQKHLFSNILKEEQFRYDPQRSIIAAYEKTDQAILSHSSDLGRGGSTAVTAILMNGRRLWVANVGDSRAVLSQGGQAIQMTIDHEPHTERLSIEGKGGFVSNMPGDVPRVNGQLAVSRAFGDKSLKTHLRSDPDVKDSSIDDHTDVLVLASDGLWKVMANQEAIDIARRIKDPLKAAKELTTEALRRDSKDDISCIVVRLR

SEQ ID NO: 98488 - protein, 148 aa, Arabidopsis thaliana
  peptide (1)..(148): Ceres Seq. ID no. 13593802
  misc_feature (1)..(140): Pfam Name: Protein phosphatase 2C Pfam Description: Protein phosphatase 2C
  misc_feature (1)..(148): Homolog of NCBI NO: 15218759 NR Description: protein phosphatase 2C (PP2C), putative thaliana] >gi|5668780|gb|AAD46006.1|AC007894_4 Strong similarity gb|AF092432 protein phosphatase type 2C from Lotus japonicus. EST
  misc_feature (1)..(148): Homolog of NCBI NO: 18395099 NR Description: protein phosphatase 2C (PP2C), putative
  misc_feature (1)..(148): Homolog of NCBI NO: 21537096 NR Description: protein phosphatase type 2C, putative
  misc_feature (1)..(148): Homolog of NCBI NO: 18411863 NR Description: protein phosphatase 2C (PP2C), putative thaliana] >gi|22137096|gb|AAM91393.1| At1g78200/T11I11_14
  misc_feature (1)..(148): Homolog of NCBI NO: 15081703 NR Description: At1g78200/T11I11_14 [Arabidopsis thaliana]
  misc_feature (1)..(148): Homolog of NCBI NO: 25406547 NR Description: hypothetical protein T11I11.14 [imported] - thaliana >gi|12324254|gb|AAG52101.1|AC012680_12 putative protein
  misc_feature (1)..(148): Homolog of NCBI NO: 18399423 NR Description: protein phosphatase 2C (PP2C), putative thaliana] >gi|15724170|gb|AAL06477.1|AF411787_1 [Arabidopsis thaliana] >gi|18652945|dbj|BAB84701.1| protein
  misc_feature (1)..(148): Homolog of NCBI NO: 4336436 NR Description: protein phosphatase type 2C [Lotus japonicus]
  misc_feature (1)..(146): Homolog of NCBI NO: 18417190 NR Description: protein phosphatase 2C (PP2C), putative thaliana] >gi|16604585|gb|AAL24149.1| putative protein
  misc_feature (1)..(51): Homolog of NCBI NO: 32488329 NR Description: OSJNBa0086B14.22 [Oryza sativa (japonica
MNGRRLWVANVGDSRAVLSQGGQAIQMTIDHEPHTERLSIEGKGGFVSNMPGDVPRVNGQLAVSRAFGDKSLKTHLRSDPDVKDSSIDDHTDVLVLASDGLWKVMANQEAIDIARRIKDPLKAAKELTTEALRRDSKDDISCIVVRLR

SEQ ID NO: 98489 - DNA, 1367 bp, Arabidopsis thaliana
  misc_feature (1)..(1367): Ceres Seq. ID no. 13593811
  misc_feature: MA Experiment ID: 20000173 Result: Down-regulated in Transcription
  misc_feature: MA Experiment 20000173 PARAMETER Experiment Name: At_42deg_Heat_P Parameter: Age (day) Value: 14
  misc_feature: MA Experiment 20000173 PARAMETER Experiment Name: At_42deg_Heat_P Parameter: Organism Value: A. thaliana
  misc_feature: MA Experiment 20000173 PARAMETER Experiment Name: At_42deg_Heat_P Parameter: Plant Line Value: WS
  misc_feature: MA Experiment 20000173 PARAMETER Experiment Name: At_42deg_Heat_P Parameter: Temperature (deg C) Value: 42 vs. 22
  misc_feature: MA Experiment 20000173 PARAMETER Experiment Name: At_42deg_Heat_P Parameter: Timepoint (hr) Value: 6
  misc_feature: MA Experiment 20000173 PARAMETER Experiment Name: At_42deg_Heat_P Parameter: Tissue Value: Aerial
  misc_feature: MA Experiment ID: 20000184 Result: Down-regulated in Transcription
  misc_feature: MA Experiment 20000184 PARAMETER Experiment Name: At_Shoots__P Parameter: Age (day) Value: 7
  misc_feature: MA Experiment 20000184 PARAMETER Experiment Name: At_Shoots__P Parameter: Tissue Value: Shoots vs. Whole Plant
  misc_feature: MA Experiment ID: 20000213 Result: Down-regulated in Transcription
  misc_feature: MA Experiment 20000213 PARAMETER Experiment Name: At_4deg_Cold_P Parameter: Timepoint (hr) Value: 2
  misc_feature: MA Experiment ID: 20000214 Result: Down-regulated in Transcription
  misc_feature: MA Experiment 20000214 PARAMETER Experiment Name: At_4deg_Cold_P Parameter: Timepoint (hr) Value: 6
  misc_feature: MA Experiment ID: 20000235 Result: Down-regulated in Transcription
  misc_feature: MA Experiment 20000235 PARAMETER Experiment Name: At_Siliques_P Parameter: Age (day) Value: 21
  misc_feature: MA Experiment 20000235 PARAMETER Experiment Name: At_Siliques_P Parameter: Organism Value: A. thaliana
  misc_feature: MA Experiment 20000235 PARAMETER Experiment Name: At_Siliques_P Parameter: Plant Line Value: WS
  misc_feature: MA Experiment 20000235 PARAMETER Experiment Name: At_Siliques_P Parameter: Tissue Value: 5-10mm Siliques vs. Whole Plant
  misc_feature: MA Experiment ID: 20000264 Result: Down-regulated in Transcription
  misc_feature: MA Experiment 20000264 PARAMETER Experiment Name: At_Open_Flower_P Parameter: Age (day) Value: 21
  misc_feature: MA Experiment 20000264 PARAMETER Experiment Name: At_Open_Flower_P Parameter: Plant Line Value: WS
  misc_feature: MA Experiment 20000264 PARAMETER Experiment Name: At_Open_Flower_P Parameter: Tissue Value: Open Flower vs. Whole Plant
  misc_feature: MA Experiment ID: 20001248 Result: Up-regulated in Transcription
  misc_feature: MA Experiment 20001248 PARAMETER Experiment Name: At_Far-red-induction_P Parameter: Age (day) Value: 7
  misc_feature: MA Experiment 20001248 PARAMETER Experiment Name: At_Far-red-induction_P Parameter: Light Value: Far-red vs. White
  misc_feature: MA Experiment 20001248 PARAMETER Experiment Name: At_Far-red-induction_P Parameter: Organism Value: A. thaliana
  misc_feature: MA Experiment 20001248 PARAMETER Experiment Name: At_Far-red-induction_P Parameter: Plant Line Value: Columbia
  misc_feature: MA Experiment 20001248 PARAMETER Experiment Name: At_Far-red-induction_P Parameter: Timepoint (hr) Value: 4
  misc_feature: MA Experiment 20001248 PARAMETER Experiment Name: At_Far-red-induction_P Parameter: Tissue Value: Whole Plant
  misc_feature: MA Experiment ID: 20001450 Result: Up-regulated in Transcription
  misc_feature: MA Experiment 20001450 PARAMETER Experiment Name: At_Far-red-induction_P Parameter: Age (day) Value: 7
  misc_feature: MA Experiment 20001450 PARAMETER Experiment Name: At_Far-red-induction_P Parameter: Light Value: Far-red vs. White
  misc_feature: MA Experiment 20001450 PARAMETER Experiment Name: At_Far-red-induction_P Parameter: Organism Value: A. thaliana
  misc_feature: MA Experiment 20001450 PARAMETER Experiment Name: At_Far-red-induction_P Parameter: Plant Line Value: Columbia
  misc_feature: MA Experiment 20001450 PARAMETER Experiment Name: At_Far-red-induction_P Parameter: Timepoint (hr) Value: 8
  misc_feature: MA Experiment 20001450 PARAMETER Experiment Name: At_Far-red-induction_P Parameter: Tissue Value: Whole Plant
  misc_feature: MA Experiment ID: 20001451 Result: Up-regulated in Transcription
  misc_feature: MA Experiment 20001451 PARAMETER Experiment Name: At_Far-red-induction_P Parameter: Age (day) Value: 7
  misc_feature: MA Experiment 20001451 PARAMETER Experiment Name: At_Far-red-induction_P Parameter: Light Value: Far-red vs. White
  misc_feature: MA Experiment 20001451 PARAMETER Experiment Name: At_Far-red-induction_P Parameter: Organism Value: A. thaliana
  misc_feature: MA Experiment 20001451 PARAMETER Experiment Name: At_Far-red-induction_P Parameter: Plant Line Value: Columbia
  misc_feature: MA Experiment 20001451 PARAMETER Experiment Name: At_Far-red-induction_P Parameter: Timepoint (hr) Value: 24
  misc_feature: MA Experiment 20001451 PARAMETER Experiment Name: At_Far-red-induction_P Parameter: Tissue Value: Whole Plant
  misc_feature: MA Experiment ID: 20001905 Result: Down-regulated in Transcription
  misc_feature: MA Experiment 20001905 PARAMETER Experiment Name: At_Drought_Reproduction_P Parameter: Age (day) Value: 40
  misc_feature: MA Experiment 20001905 PARAMETER Experiment Name: At_Drought_Reproduction_P Parameter: Organism Value: A. thaliana
  misc_feature: MA Experiment 20001905 PARAMETER Experiment Name: At_Drought_Reproduction_P Parameter: Plant Line Value: WS
  misc_feature: MA Experiment 20001905 PARAMETER Experiment Name: At_Drought_Reproduction_P Parameter: Timepoint (day) Value: 10
  misc_feature: MA Experiment 20001905 PARAMETER Experiment Name: At_Drought_Reproduction_P Parameter: Tissue Value: Rosettes
  misc_feature: MA Experiment 20001905 PARAMETER Experiment Name: At_Drought_Reproduction_P Parameter: Treatment Value: Drought vs. No Drought
cccacgcgtccggaagccacggggggagcgctagcacttaaagatttgcaccgttttctctctggctttgtgttgtgctagatgcgatgcaatagcaatattttcctggagtttcaagtaactagtggcttaggttcataatagtgtttctttgtaggacgaaagctgtgttagtattctctccactgtaaaggacaagatgtctcagaagcgaaatcttccttcttggatgagttctagggatcccgagattactccgagtaagtctcattgtaagaagcctaaggatgaaggaccaaccgaagagcacaacagtagaaatgccccttccaacaagtcagaacacgccgagccaagttcaaataccactgaattctctaaacttatggaaggcgttgtttttgtactttcgggctttgttaatcctgagaggagtacactgaggtcacaagccttgacaatgggagccacctatcaacctgactggaacgctggctctaccttgttgatttgtgcttttcctaacactccaaagttccgtcaagttgaaacaaatggtggaacaattatctcaaaggagtggataactgagtgttatgcgcagaagaagttggtagatatcgagcaataccttatgcatgctggaaaaccatggaggaaaagcagtagtccccaagatgctaatcgagaaaagagagaacacctgtctaaaaaaccagagaagcaagtagagaaaaaaacagaaacaaggggaacaccatctacctcatccaagaatagatcagcttgcaatcttgtgaaagagccattttttgttacagaggtgaagaaatgggccagggatgacctaagtcaaaccatctcatggcttgagagtcaggaggaaaaaccagaaccaggcgaaatcaagcgaatagctgcggaaggagtcttaacctgcttacaagacgccatagattctcttgaacagaagcaggacattggatcagttacagagctatggagctttgtccctcgtgtagtgaaggagcttggaaagatggaatcgtcttctaaaaaggaaaattcaacagcatcaaaggaagaagtttgcaaacaagcaaagtcgtggaaaaagatctacgaagctgagctagcaaaaccgggcgaagatgaatcgacctctcgggttgcttgtggctatgacagtgatatgaccgttgagatgactgaagaagagatcgaacttgcttataggaacgtttctttagagtgtctttagatcaaacttgtttcattttgcatatgatctcttaaggaattccaagaattcttgttatactcggtttgttcggtttgagtaggatgttattactgataaaaatttg

SEQ ID NO: 98490 - protein, 353 aa, Arabidopsis thaliana
  peptide (1)..(353): Ceres Seq. ID no. 13593812
  misc_feature (1)..(353): Homolog of NCBI NO: 22330772 NR Description: DNA repair protein -related [Arabidopsis thaliana]
  misc_feature (1)..(353): Homolog of NCBI NO: 11181954 NR Description: putative DNA repair protein XRCC1 [Arabidopsis >gi|19919074|gb|AAM08130.1|AF324348_1 putative DNA repair protein
  misc_feature (1)..(200): Homolog of NCBI NO: 25406663 NR Description: probable DNA repair protein, 81467-82519 - Arabidopsis thaliana >gi|6730735|gb|AAF27125.1|AC018849_13
  misc_feature (26)..(196): Homolog of NCBI NO: 27924221 NR Description: Similar to x-ray repair cross-complementing group
  misc_feature (4)..(192): Homolog of NCBI NO: 2906008 NR Description: DNA repair protein XRCC1 [Cricetulus griseus]
  misc_feature (4)..(189): Homolog of NCBI NO: 16758176 NR Description: x-ray repair cross-complementing group 1 protein
  misc_feature (13)..(216): Homolog of NCBI NO: 9954649 NR Description: XRCC1 DNA repair protein [Homo sapiens]
  misc_feature (4)..(189): Homolog of NCBI NO: 6678613 NR Description: X-ray repair complementing defective repair in
  misc_feature (4)..(189): Homolog of NCBI NO: 33416536 NR Description: X-ray repair complementing defective repair in
  misc_feature (13)..(216): Homolog of NCBI NO: 40226177 NR Description: X-ray repair cross complementing protein 1 [Homo
MSQKRNLPSWMSSRDPEITPSKSHCKKPKDEGPTEEHNSRNAPSNKSEHAEPSSNTTEFSKLMEGVVFVLSGFVNPERSTLRSQALTMGATYQPDWNAGSTLLICAFPNTPKFRQVETNGGTIISKEWITECYAQKKLVDIEQYLMHAGKPWRKSSSPQDANREKREHLSKKPEKQVEKKTETRGTPSTSSKNRSACNLVKEPFFVTEVKKWARDDLSQTISWLESQEEKPEPGEIKRIAAEGVLTCLQDAIDSLEQKQDIGSVTELWSFVPRVVKELGKMESSSKKENSTASKEEVCKQAKSWKKIYEAELAKPGEDESTSRVACGYDSDMTVEMTEEEIELAYRNVSLECL

SEQ ID NO: 98491 - protein, 343 aa, Arabidopsis thaliana
  peptide (1)..(343): Ceres Seq. ID no. 13593813
  misc_feature (1)..(343): Homolog of NCBI NO: 22330772 NR Description: DNA repair protein -related [Arabidopsis thaliana]
  misc_feature (1)..(343): Homolog of NCBI NO: 11181954 NR Description: putative DNA repair protein XRCC1 [Arabidopsis >gi|19919074|gb|AAM08130.1|AF324348_1 putative DNA repair protein
  misc_feature (1)..(190): Homolog of NCBI NO: 25406663 NR Description: probable DNA repair protein, 81467-82519 - Arabidopsis thaliana >gi|6730735|gb|AAF27125.1|AC018849_13
  misc_feature (16)..(186): Homolog of NCBI NO: 27924221 NR Description: Similar to x-ray repair cross-complementing group
  misc_feature (1)..(182): Homolog of NCBI NO: 2906008 NR Description: DNA repair protein XRCC1 [Cricetulus griseus]
  misc_feature (1)..(179): Homolog of NCBI NO: 16758176 NR Description: x-ray repair cross-complementing group 1 protein
  misc_feature (3)..(206): Homolog of NCBI NO: 9954649 NR Description: XRCC1 DNA repair protein [Homo sapiens]
  misc_feature (1)..(179): Homolog of NCBI NO: 6678613 NR Description: X-ray repair complementing defective repair in
  misc_feature (1)..(179): Homolog of NCBI NO: 33416536 NR Description: X-ray repair complementing defective repair in
  misc_feature (3)..(206): Homolog of NCBI NO: 40226177 NR Description: X-ray repair cross complementing protein 1 [Homo
MSSRDPEITPSKSHCKKPKDEGPTEEHNSRNAPSNKSEHAEPSSNTTEFSKLMEGVVFVLSGFVNPERSTLRSQALTMGATYQPDWNAGSTLLICAFPNTPKFRQVETNGGTIISKEWITECYAQKKLVDIEQYLMHAGKPWRKSSSPQDANREKREHLSKKPEKQVEKKTETRGTPSTSSKNRSACNLVKEPFFVTEVKKWARDDLSQTISWLESQEEKPEPGEIKRIAAEGVLTCLQDAIDSLEQKQDIGSVTELWSFVPRVVKELGKMESSSKKENSTASKEEVCKQAKSWKKIYEAELAKPGEDESTSRVACGYDSDMTVEMTEEEIELAYRNVSLECL

SEQ ID NO: 98492 - protein, 291 aa, Arabidopsis thaliana
  peptide (1)..(291): Ceres Seq. ID no. 13593814
  misc_feature (1)..(291): Homolog of NCBI NO: 22330772 NR Description: DNA repair protein -related [Arabidopsis thaliana]
  misc_feature (1)..(291): Homolog of NCBI NO: 11181954 NR Description: putative DNA repair protein XRCC1 [Arabidopsis >gi|19919074|gb|AAM08130.1|AF324348_1 putative DNA repair protein
  misc_feature (1)..(138): Homolog of NCBI NO: 25406663 NR Description: probable DNA repair protein, 81467-82519 - Arabidopsis thaliana >gi|6730735|gb|AAF27125.1|AC018849_13
  misc_feature (1)..(134): Homolog of NCBI NO: 27924221 NR Description: Similar to x-ray repair cross-complementing group
  misc_feature (1)..(130): Homolog of NCBI NO: 2906008 NR Description: DNA repair protein XRCC1 [Cricetulus griseus]
  misc_feature (1)..(127): Homolog of NCBI NO: 16758176 NR Description: x-ray repair cross-complementing group 1 protein
  misc_feature (1)..(154): Homolog of NCBI NO: 9954649 NR Description: XRCC1 DNA repair protein [Homo sapiens]
  misc_feature (1)..(127): Homolog of NCBI NO: 6678613 NR Description: X-ray repair complementing defective repair in
  misc_feature (1)..(127): Homolog of NCBI NO: 33416536 NR Description: X-ray repair complementing defective repair in
  misc_feature (1)..(154): Homolog of NCBI NO: 40226177 NR Description: X-ray repair cross complementing protein 1 [Homo
MEGVVFVLSGFVNPERSTLRSQALTMGATYQPDWNAGSTLLICAFPNTPKFRQVETNGGTIISKEWITECYAQKKLVDIEQYLMHAGKPWRKSSSPQDANREKREHLSKKPEKQVEKKTETRGTPSTSSKNRSACNLVKEPFFVTEVKKWARDDLSQTISWLESQEEKPEPGEIKRIAAEGVLTCLQDAIDSLEQKQDIGSVTELWSFVPRVVKELGKMESSSKKENSTASKEEVCKQAKSWKKIYEAELAKPGEDESTSRVACGYDSDMTVEMTEEEIELAYRNVSLECL

SEQ ID NO: 98493 - DNA, 862 bp, Arabidopsis thaliana
  misc_feature (1)..(862): Ceres Seq. ID no. 13593826
  misc_feature: MA Experiment ID: 108434 Result: Down-regulated in Transcription
  misc_feature: MA Experiment 108434 PARAMETER Experiment Name: At_Root_Tips_cDNA_P Parameter: Tissue Value: Root Tips
  misc_feature: MA Experiment ID: 108464 Result: Up-regulated in Transcription
  misc_feature: MA Experiment 108464 PARAMETER Experiment Name: At_Germinating_Seeds_cDNA_P Parameter: Age (day) Value: 4 vs. 0
  misc_feature: MA Experiment 108464 PARAMETER Experiment Name: At_Germinating_Seeds_cDNA_P Parameter: Tissue Value: Germinating Seeds
  misc_feature: MA Experiment ID: 108488 Result: Down-regulated in Transcription
  misc_feature: MA Experiment ID: 108573 Result: Up-regulated in Transcription
  misc_feature: MA Experiment 108573 PARAMETER Experiment Name: At_Drought_cDNA_P Parameter: Timepoint (hr) Value: 6
  misc_feature: MA Experiment 108573 PARAMETER Experiment Name: At_Drought_cDNA_P Parameter: Tissue Value: Aerial
  misc_feature: MA Experiment 108573 PARAMETER Experiment Name: At_Drought_cDNA_P Parameter: Treatment Value: Drought vs. No Drought
  misc_feature: MA Experiment ID: 108579 Result: Up-regulated in Transcription
  misc_feature: MA Experiment 108579 PARAMETER Experiment Name: At_4deg_Cold_cDNA_P Parameter: Temperature (deg C) Value: 4 vs. 22
  misc_feature: MA Experiment 108579 PARAMETER Experiment Name: At_4deg_Cold_cDNA_P Parameter: Timepoint (hr) Value: 6
  misc_feature: MA Experiment 108579 PARAMETER Experiment Name: At_4deg_Cold_cDNA_P Parameter: Tissue Value: Aerial
  misc_feature: MA Experiment ID: 108585 Result: Up-regulated in Transcription
  misc_feature: MA Experiment 108585 PARAMETER Experiment Name: At_5mM_NaNP_cDNA_P Parameter: Timepoint (hr) Value: 6
  misc_feature: MA Experiment 108585 PARAMETER Experiment Name: At_5mM_NaNP_cDNA_P Parameter: Tissue Value: Aerial
  misc_feature: MA Experiment 108585 PARAMETER Experiment Name: At_5mM_NaNP_cDNA_P Parameter: Treatment Value: null
  misc_feature: MA Experiment ID: 108594 Result: Up-regulated in Transcription
  misc_feature: MA Experiment 108594 PARAMETER Experiment Name: At_Ler-rhl_Root_cDNA_P Parameter: Plant Line Value: null
  misc_feature: MA Experiment ID: 108595 Result: Up-regulated in Transcription
  misc_feature: MA Experiment 108595 PARAMETER Experiment Name: At_Ler-pi_Ovule_cDNA_P Parameter: Plant Line Value: null
  misc_feature: MA Experiment ID: 20000068 Result: Up-regulated in Transcription
  misc_feature: MA Experiment ID: 20000111 Result: Up-regulated in Transcription
  misc_feature: MA Experiment 20000111 PARAMETER Experiment Name: At_42deg_Heat_cDNA_P Parameter: Temperature (deg C) Value: 42 vs. 22
  misc_feature: MA Experiment 20000111 PARAMETER Experiment Name: At_42deg_Heat_cDNA_P Parameter: Timepoint (hr) Value: 6
  misc_feature: MA Experiment 20000111 PARAMETER Experiment Name: At_42deg_Heat_cDNA_P Parameter: Tissue Value: Aerial
  misc_feature: MA Experiment ID: 20000113 Result: Up-regulated in Transcription
  misc_feature: MA Experiment 20000113 PARAMETER Experiment Name: At_42deg_Heat_cDNA_P Parameter: Temperature (deg C) Value: 42 vs. 22
  misc_feature: MA Experiment 20000113 PARAMETER Experiment Name: At_42deg_Heat_cDNA_P Parameter: Timepoint (hr) Value: 8
  misc_feature: MA Experiment 20000113 PARAMETER Experiment Name: At_42deg_Heat_cDNA_P Parameter: Tissue Value: Aerial
  misc_feature: MA Experiment ID: 20000173 Result: Up-regulated in Transcription
  misc_feature: MA Experiment 20000173 PARAMETER Experiment Name: At_42deg_Heat_P Parameter: Age (day) Value: 14
  misc_feature: MA Experiment 20000173 PARAMETER Experiment Name: At_42deg_Heat_P Parameter: Organism Value: A. thaliana
  misc_feature: MA Experiment 20000173 PARAMETER Experiment Name: At_42deg_Heat_P Parameter: Plant Line Value: WS
  misc_feature: MA Experiment 20000173 PARAMETER Experiment Name: At_42deg_Heat_P Parameter: Temperature (deg C) Value: 42 vs. 22
  misc_feature: MA Experiment 20000173 PARAMETER Experiment Name: At_42deg_Heat_P Parameter: Timepoint (hr) Value: 6
  misc_feature: MA Experiment 20000173 PARAMETER Experiment Name: At_42deg_Heat_P Parameter: Tissue Value: Aerial
  misc_feature: MA Experiment ID: 20000185 Result: Down-regulated in Transcription
  misc_feature: MA Experiment 20000185 PARAMETER Experiment Name: At_Roots__P Parameter: Age (day) Value: 7 vs. 21
  misc_feature: MA Experiment 20000185 PARAMETER Experiment Name: At_Roots__P Parameter: Organism Value: A. thaliana
  misc_feature: MA Experiment 20000185 PARAMETER Experiment Name: At_Roots__P Parameter: Tissue Value: Roots vs. Whole Plant
  misc_feature: MA Experiment ID: 20000439 Result: Down-regulated in Transcription
  misc_feature: MA Experiment 20000439 PARAMETER Experiment Name: At_Roots__P Parameter: Age (day) Value: 14 vs. 21
  misc_feature: MA Experiment 20000439 PARAMETER Experiment Name: At_Roots__P Parameter: Organism Value: A. thaliana
  misc_feature: MA Experiment 20000439 PARAMETER Experiment Name: At_Roots__P Parameter: Tissue Value: Roots vs. Whole Plant
  misc_feature: MA Experiment ID: 20000496 Result: Up-regulated in Transcription
  misc_feature: MA Experiment 20000496 PARAMETER Experiment Name: At_Guard_Cells_P Parameter: Harvest Date Value: 7/19/2002
  misc_feature: MA Experiment 20000496 PARAMETER Experiment Name: At_Guard_Cells_P Parameter: Organism Value: Canola
  misc_feature: MA Experiment 20000496 PARAMETER Experiment Name: At_Guard_Cells_P Parameter: Tissue Value: Guard Cells vs. Leaves
  misc_feature: MA Experiment ID: 20000794 Result: Up-regulated in Transcription
  misc_feature: MA Experiment 20000794 PARAMETER Experiment Name: At_Petals_P Parameter: Age (day) Value: 23-25 days
  misc_feature: MA Experiment 20000794 PARAMETER Experiment Name: At_Petals_P Parameter: Plant Line Value: WS
  misc_feature: MA Experiment 20000794 PARAMETER Experiment Name: At_Petals_P Parameter: Tissue Value: Petals vs. Whole plant
ctcttccaatttcgtttcgacatatttcgcgattcgtctaaggttttgttactgattgagaaaacatgggaggtgacaatgataatgacaaagacaaagggtttcatgggtatcctcccgctggatacccaccccctggggcttatccacccgctggatacccacaacaaggttaccctccaccacccggtgcttacccgcctgcaggttatcctccgggtgcctacccacctgctcctggtggttatcctcccgcccctggttatggtggttatcctccagctcctggttatggaggttatcctcctgcacctggtcatggtggttaccctcctgctggctatcctgctcatcactcaggacacgcaggaggaattgggggtatgattgcaggtgctgcagctgcctatggagctcaccacgtagctcatagctctcacggtccttacggacatgctgcatatggtcacggttttggccatggtcatggctatggctatggtcatggtcatggtaagttcaagcatgggaagcacgggaagttcaagcatgggaagcatggaatgtttggaggaggcaagttcaagaagtggaagtgatctagttaataccttttgtgaatctgtctggactgaccaatgtttcaaataagccctaaacattatataagttgactttcgtcggttagattgctggttcgagttggaataattgaaacttaattagtatcaaatcttattgtgtactttaaagctatcgttggctttataatgacagattctggtttcggtgtgttgttttaagatttttgtatatactgttttttacattgcttaagcttatagaagtcatgattatgact

SEQ ID NO: 98494 - protein, 177 aa, Arabidopsis thaliana
  peptide (1)..(177): Ceres Seq. ID no. 13593827
  misc_feature (47)..(105): Pfam Name: Collagen triple helix repeat (20 copies) Pfam Description: Collagen triple helix repeat (20 copies)
  misc_feature (1)..(177): Homolog of NCBI NO: 18422542 NR Description: proline-rich protein family [Arabidopsis thaliana]
  misc_feature (1)..(177): Homolog of NCBI NO: 15234178 NR Description: glycine/proline-rich protein [Arabidopsis
  misc_feature (1)..(177): Homolog of NCBI NO: 33668156 NR Description: GPRP [Oryza sativa (indica cultivar-group)]
  misc_feature (1)..(177): Homolog of NCBI NO: 6478148 NR Description: putative glycine and proline-rich protein
  misc_feature (12)..(177): Homolog of NCBI NO: 13543234 NR Description: Unknown (protein for MGC:12025) [Mus musculus]
  misc_feature (1)..(156): Homolog of NCBI NO: 7487135 NR Description: hypothetical protein T18B16.170 - Arabidopsis >gi|2828295|emb|CAA16709.1| putative protein [Arabidopsis
  misc_feature (1)..(177): Homolog of NCBI NO: 15238005 NR Description: glycine/proline-rich protein [Arabidopsis
  misc_feature (2)..(144): Homolog of NCBI NO: 585217 NR Description: GLYCINE RICH PROTEIN A3 >gi|322728|pir||S32123
  misc_feature (1)..(177): Homolog of NCBI NO: 18398103 NR Description: proline-rich protein family [Arabidopsis thaliana]
  misc_feature (1)..(177): Homolog of NCBI NO: 21553447 NR Description: putative glycine and proline-rich protein
MGGDNDNDKDKGFHGYPPAGYPPPGAYPPAGYPQQGYPPPPGAYPPAGYPPGAYPPAPGGYPPAPGYGGYPPAPGYGGYPPAPGHGGYPPAGYPAHHSGHAGGIGGMIAGAAAAYGAHHVAHSSHGPYGHAAYGHGFGHGHGYGYGHGHGKFKHGKHGKFKHGKHGMFGGGKFKKWK

SEQ ID NO: 98495 - protein, 128 aa, Arabidopsis thaliana
  peptide (1)..(128): Ceres Seq. ID no. 13593828
LFQFRFDIFRDSSKVLLLIEKTWEVTMIMTKTKGFMGILPLDTHPLGLIHPLDTHNKVTLHHPVLTRLQVILRVPTHLLLVVILPPLVMVVILQLLVMEVILLHLVMVVTLLLAILLITQDTQEELGV

SEQ ID NO: 98496 - protein, 102 aa, Arabidopsis thaliana
  peptide (1)..(102): Ceres Seq. ID no. 13593829
MIMTKTKGFMGILPLDTHPLGLIHPLDTHNKVTLHHPVLTRLQVILRVPTHLLLVVILPPLVMVVILQLLVMEVILLHLVMVVTLLLAILLITQDTQEELGV

SEQ ID NO: 98497 - DNA, 1815 bp, Arabidopsis thaliana
  misc_feature (1)..(1815): Ceres Seq. ID no. 13600807
  misc_feature: MA Experiment ID: 20000179 Result: Up-regulated in Transcription
  misc_feature: MA Experiment 20000179 PARAMETER Experiment Name: At_Germinating_Seeds_P Parameter: Age (hr) Value: 6 vs. 0
  misc_feature: MA Experiment 20000179 PARAMETER Experiment Name: At_Germinating_Seeds_P Parameter: Tissue Value: Germinating Seeds
  misc_feature: MA Experiment ID: 20001451 Result: Down-regulated in Transcription
  misc_feature: MA Experiment 20001451 PARAMETER Experiment Name: At_Far-red-induction_P Parameter: Age (day) Value: 7
  misc_feature: MA Experiment 20001451 PARAMETER Experiment Name: At_Far-red-induction_P Parameter: Light Value: Far-red vs. White
  misc_feature: MA Experiment 20001451 PARAMETER Experiment Name: At_Far-red-induction_P Parameter: Organism Value: A. thaliana
  misc_feature: MA Experiment 20001451 PARAMETER Experiment Name: At_Far-red-induction_P Parameter: Plant Line Value: Columbia
  misc_feature: MA Experiment 20001451 PARAMETER Experiment Name: At_Far-red-induction_P Parameter: Timepoint (hr) Value: 24
  misc_feature: MA Experiment 20001451 PARAMETER Experiment Name: At_Far-red-induction_P Parameter: Tissue Value: Whole Plant
aaccacgttttcacagagagccacaccaccttcatcaaacttcttcataacaaatcacatttctctctcttctctgcttgaatccattacagagggattgtggagtggtttggtttgatttgatttcgatctgtgacaatggtggagactagtatcgacatggaggaaggaactctcgagatcggaatggagtatagaactgtctccggagttgctggacctttggtcatccttgacaaagtgaagggtccaaagtaccaggagattgttaatattcgcttaggagatggatcaacgagacgtggtcaggtcttggaggttgatggggagaaagctgttgtccaggtttttgaaggaacatctgggattgacaacaagtttaccaccgtgcaattcacaggagaggtactgaaaacgcctgtgtcattggacatgcttggccgcatatttaacggctcgggaaagccaattgataatggccctcctattttgccagaggcataccttgatatttctggaagttcaatcaaccccagtgaaagaacctaccctgaagagatgatacaaacggggatttctaccattgatgtcatgaactccattgctcgtggacagaagattcctcttttctctgctgctggtctacctcataatgagattgctgctcaaatttgtcgtcaggctggacttgtgaagcggttggaaaagactgagaacttaattcaggaggatcatggagaggacaattttgcaattgtttttgcagctatgggtgtaaacatggagacagctcagtttttcaagcgtgattttgaagaaaatggatcgatggaaagggttacccttttcctgaacttggccaatgatccaaccattgagagaattatcactcctcgaattgccctaacaaccgctgaatatttggcttatgaatgtggaaagcatgtgcttgttatattgacagacatgagttcttatgcagatgctcttcgtgaggtttctgctgctcgagaagaagttcctggaagacgtggatatccggggtatattatacagatcttgcaactatttatgaacgcgcgggacgtattgaaggaagaaagggttccattacccaaatccctatcctgactatgcccaatgacgatatcactcaccctactccggatcttactggttacattactgagggtcagatatatattgataggcaacttcacaacagacagatatacccacccattaacgtgcttccatcactttctcggctgatgaagagtgctattggtgaaggaatgactcgcaaagaccattctgatgtgtccaaccagctatacgcaaattatgcaatcggaaaagatgttcaagccatgaaagctgttgttggagaagaagctctgtcttccgaggatctgctgtatttagagtttctggataaatttgaaaggaagtttgtgatgcaaggcgcatacgatacaaggaacatcttccagtcgcttgacttggcatggacactgctccgtatcttcccacgtgagcttcttcaccgtattcctgccaaaacacttgatcaattctacagccgcgactccacaagctaaaccttttaaaacaagctctatgttgctccattcttatcttatttggaacttaaatcataccgagagaagacaaacaggattggttgcgtgaaaacaaaactcagagaattgtgaagttgggaattttcttttgtttttccatttgtataataaaggtttgtgtagagaaacttcgtacaaaatctatttataaaccacttcagctcctgtcttc

SEQ ID NO: 98498 - protein, 330 aa, Arabidopsis thaliana
  peptide (1)..(330): Ceres Seq. ID no. 13600808
  misc_feature (203)..(285): Pfam Name: ATP synthase alpha/beta family, Pfam Description: ATP synthase alpha/beta family,
  misc_feature (1)..(285): Homolog of NCBI NO: 25290450 NR Description: hypothetical protein F14O10.13 - Arabidopsis >gi|9558599|gb|AAF88162.1|AC026234_13 Nearly identical to
  misc_feature (1)..(304): Homolog of NCBI NO: 17065080 NR Description: Unknown protein [Arabidopsis thaliana]
  misc_feature (1)..(304): Homolog of NCBI NO: 81637 NR Description: H+-exporting ATPase (EC 3.6.3.6) 57K chain -
  misc_feature (1)..(304): Homolog of NCBI NO: 15222929 NR Description: vacuolar ATP synthase subunit B [Arabidopsis
  misc_feature (1)..(242): Homolog of NCBI NO: 25290419 NR Description: protein T4O12.24 [imported] - Arabidopsis >gi|6721109|gb|AAF26763.1|AC007396_12 T4O12.24 [Arabidopsis
  misc_feature (241)..(304): Homolog of NCBI NO: 25290419 NR Description: protein T4O12.24 [imported] - Arabidopsis >gi|6721109|gb|AAF26763.1|AC007396_12 T4O12.24 [Arabidopsis
  misc_feature (3)..(304): Homolog of NCBI NO: 15233891 NR Description: probable H+-transporting ATPase [Arabidopsis
  misc_feature (1)..(304): Homolog of NCBI NO: 2493129 NR Description: Vacuolar ATP synthase subunit B isoform 1 B subunit 1) (Vacuolar proton pump B subunit 1)
  misc_feature (7)..(304): Homolog of NCBI NO: 2493132 NR Description: Vacuolar ATP synthase subunit B isoform 2 B subunit 2) (Vacuolar proton pump B subunit 2)
  misc_feature (1)..(314): Homolog of NCBI NO: 11266665 NR Description: H+-transporting two-sector ATPase (EC 3.6.3.14)
MVETSIDMEEGTLEIGMEYRTVSGVAGPLVILDKVKGPKYQEIVNIRLGDGSTRRGQVLEVDGEKAVVQVFEGTSGIDNKFTTVQFTGEVLKTPVSLDMLGRIFNGSGKPIDNGPPILPEAYLDISGSSINPSERTYPEEMIQTGISTIDVMNSIARGQKIPLFSAAGLPHNEIAAQICRQAGLVKRLEKTENLIQEDHGEDNFAIVFAAMGVNMETAQFFKRDFEENGSMERVTLFLNLANDPTIERIITPRIALTTAEYLAYECGKHVLVILTDMSSYADALREVSAAREEVPGRRGYPGYIIQILQLFMNARDVLKEERVPLPKSLS

SEQ ID NO: 98499 - protein, 323 aa, Arabidopsis thaliana
  peptide (1)..(323): Ceres Seq. ID no. 13600809
  misc_feature (196)..(278): Pfam Name: ATP synthase alpha/beta family, Pfam Description: ATP synthase alpha/beta family,
  misc_feature (1)..(278): Homolog of NCBI NO: 25290450 NR Description: hypothetical protein F14O10.13 - Arabidopsis >gi|9558599|gb|AAF88162.1|AC026234_13 Nearly identical to
  misc_feature (1)..(297): Homolog of NCBI NO: 17065080 NR Description: Unknown protein [Arabidopsis thaliana]
  misc_feature (1)..(297): Homolog of NCBI NO: 81637 NR Description: H+-exporting ATPase (EC 3.6.3.6) 57K chain -
  misc_feature (1)..(297): Homolog of NCBI NO: 15222929 NR Description: vacuolar ATP synthase subunit B [Arabidopsis
  misc_feature (1)..(235): Homolog of NCBI NO: 25290419 NR Description: protein T4O12.24 [imported] - Arabidopsis >gi|6721109|gb|AAF26763.1|AC007396_12 T4O12.24 [Arabidopsis
  misc_feature (234)..(297): Homolog of NCBI NO: 25290419 NR Description: protein T4O12.24 [imported] - Arabidopsis >gi|6721109|gb|AAF26763.1|AC007396_12 T4O12.24 [Arabidopsis
  misc_feature (1)..(297): Homolog of NCBI NO: 15233891 NR Description: probable H+-transporting ATPase [Arabidopsis
  misc_feature (1)..(297): Homolog of NCBI NO: 2493129 NR Description: Vacuolar ATP synthase subunit B isoform 1 B subunit 1) (Vacuolar proton pump B subunit 1)
  misc_feature (1)..(297): Homolog of NCBI NO: 2493132 NR Description: Vacuolar ATP synthase subunit B isoform 2 B subunit 2) (Vacuolar proton pump B subunit 2)
  misc_feature (1)..(307): Homolog of NCBI NO: 11266665 NR Description: H+-transporting two-sector ATPase (EC 3.6.3.14)
MEEGTLEIGMEYRTVSGVAGPLVILDKVKGPKYQEIVNIRLGDGSTRRGQVLEVDGEKAVVQVFEGTSGIDNKFTTVQFTGEVLKTPVSLDMLGRIFNGSGKPIDNGPPILPEAYLDISGSSINPSERTYPEEMIQTGISTIDVMNSIARGQKIPLFSAAGLPHNEIAAQICRQAGLVKRLEKTENLIQEDHGEDNFAIVFAAMGVNMETAQFFKRDFEENGSMERVTLFLNLANDPTIERIITPRIALTTAEYLAYECGKHVLVILTDMSSYADALREVSAAREEVPGRRGYPGYIIQILQLFMNARDVLKEERVPLPKSLS

SEQ ID NO: 98500 - protein, 314 aa, Arabidopsis thaliana
  peptide (1)..(314): Ceres Seq. ID no. 13600810
  misc_feature (187)..(269): Pfam Name: ATP synthase alpha/beta family, Pfam Description: ATP synthase alpha/beta family,
  misc_feature (1)..(269): Homolog of NCBI NO: 25290450 NR Description: hypothetical protein F14O10.13 - Arabidopsis >gi|9558599|gb|AAF88162.1|AC026234_13 Nearly identical to
  misc_feature (1)..(288): Homolog of NCBI NO: 17065080 NR Description: Unknown protein [Arabidopsis thaliana]
  misc_feature (1)..(288): Homolog of NCBI NO: 81637 NR Description: H+-exporting ATPase (EC 3.6.3.6) 57K chain -
  misc_feature (1)..(288): Homolog of NCBI NO: 15222929 NR Description: vacuolar ATP synthase subunit B [Arabidopsis
  misc_feature (1)..(226): Homolog of NCBI NO: 25290419 NR Description: protein T4O12.24 [imported] - Arabidopsis >gi|6721109|gb|AAF26763.1|AC007396_12 T4O12.24 [Arabidopsis
  misc_feature (225)..(288): Homolog of NCBI NO: 25290419 NR Description: protein T4O12.24 [imported] - Arabidopsis >gi|6721109|gb|AAF26763.1|AC007396_12 T4O12.24 [Arabidopsis
  misc_feature (1)..(288): Homolog of NCBI NO: 15233891 NR Description: probable H+-transporting ATPase [Arabidopsis
  misc_feature (1)..(288): Homolog of NCBI NO: 2493129 NR Description: Vacuolar ATP synthase subunit B isoform 1 B subunit 1) (Vacuolar proton pump B subunit 1)
  misc_feature (1)..(288): Homolog of NCBI NO: 2493132 NR Description: Vacuolar ATP synthase subunit B isoform 2 B subunit 2) (Vacuolar proton pump B subunit 2)
  misc_feature (1)..(298): Homolog of NCBI NO: 11266665 NR Description: H+-transporting two-sector ATPase (EC 3.6.3.14)
MEYRTVSGVAGPLVILDKVKGPKYQEIVNIRLGDGSTRRGQVLEVDGEKAVVQVFEGTSGIDNKFTTVQFTGEVLKTPVSLDMLGRIFNGSGKPIDNGPPILPEAYLDISGSSINPSERTYPEEMIQTGISTIDVMNSIARGQKIPLFSAAGLPHNEIAAQICRQAGLVKRLEKTENLIQEDHGEDNFAIVFAAMGVNMETAQFFKRDFEENGSMERVTLFLNLANDPTIERIITPRIALTTAEYLAYECGKHVLVILTDMSSYADALREVSAAREEVPGRRGYPGYIIQILQLFMNARDVLKEERVPLPKSLS

SEQ ID NO: 98501 - DNA, 1449 bp, Arabidopsis thaliana
  misc_feature (1)..(1449): Ceres Seq. ID no. 13600892
  misc_feature: MA Experiment ID: 108434 Result: Up-regulated in Transcription
  misc_feature: MA Experiment 108434 PARAMETER Experiment Name: At_Root_Tips_cDNA_P Parameter: Tissue Value: Root Tips
  misc_feature: MA Experiment ID: 108461 Result: Down-regulated in Transcription
  misc_feature: MA Experiment 108461 PARAMETER Experiment Name: At_Germinating_Seeds_cDNA_P Parameter: Age (day) Value: 1 vs. 0
  misc_feature: MA Experiment 108461 PARAMETER Experiment Name: At_Germinating_Seeds_cDNA_P Parameter: Tissue Value: Germinating Seeds
  misc_feature: MA Experiment ID: 108462 Result: Down-regulated in Transcription
  misc_feature: MA Experiment 108462 PARAMETER Experiment Name: At_Germinating_Seeds_cDNA_P Parameter: Age (day) Value: 2 vs. 0
  misc_feature: MA Experiment 108462 PARAMETER Experiment Name: At_Germinating_Seeds_cDNA_P Parameter: Tissue Value: Germinating Seeds
  misc_feature: MA Experiment ID: 108463 Result: Down-regulated in Transcription
  misc_feature: MA Experiment 108463 PARAMETER Experiment Name: At_Germinating_Seeds_cDNA_P Parameter: Age (day) Value: 3 vs. 0
  misc_feature: MA Experiment 108463 PARAMETER Experiment Name: At_Germinating_Seeds_cDNA_P Parameter: Tissue Value: Germinating Seeds
  misc_feature: MA Experiment ID: 108464 Result: Down-regulated in Transcription
  misc_feature: MA Experiment 108464 PARAMETER Experiment Name: At_Germinating_Seeds_cDNA_P Parameter: Age (day) Value: 4 vs. 0
  misc_feature: MA Experiment 108464 PARAMETER Experiment Name: At_Germinating_Seeds_cDNA_P Parameter: Tissue Value: Germinating Seeds
  misc_feature: MA Experiment ID: 20001557 Result: Up-regulated in Transcription
  misc_feature: MA Experiment 20001557 PARAMETER Experiment Name: At_Drought_Soil_Dry_P Parameter: Age (day) Value: 27
  misc_feature: MA Experiment 20001557 PARAMETER Experiment Name: At_Drought_Soil_Dry_P Parameter: Organism Value: A. thaliana
  misc_feature: MA Experiment 20001557 PARAMETER Experiment Name: At_Drought_Soil_Dry_P Parameter: Plant Line Value: WS
  misc_feature: MA Experiment 20001557 PARAMETER Experiment Name: At_Drought_Soil_Dry_P Parameter: Post Timepoint (hr) Value: 3
  misc_feature: MA Experiment 20001557 PARAMETER Experiment Name: At_Drought_Soil_Dry_P Parameter: Post-Treatment Value: Re-Water vs. No Drought
  misc_feature: MA Experiment 20001557 PARAMETER Experiment Name: At_Drought_Soil_Dry_P Parameter: Timepoint (day) Value: 13
  misc_feature: MA Experiment 20001557 PARAMETER Experiment Name: At_Drought_Soil_Dry_P Parameter: Treatment Value: Drought vs. No Drought
  misc_feature: MA Experiment ID: 20001757 Result: Up-regulated in Transcription
  misc_feature: MA Experiment 20001757 PARAMETER Experiment Name: At_50mM_NH4NO3_L-to-H_P Parameter: Timepoint (hr) Value: 6
  misc_feature: MA Experiment 20001757 PARAMETER Experiment Name: At_50mM_NH4NO3_L-to-H_P Parameter: Tissue Value: Leaf
  misc_feature: MA Experiment 20001757 PARAMETER Experiment Name: At_50mM_NH4NO3_L-to-H_P Parameter: Treatment Value: 50mM NH4NO3 vs 100mM Mannitol
  misc_feature: MA Experiment ID: 20001911 Result: Down-regulated in Transcription
  misc_feature: MA Experiment 20001911 PARAMETER Experiment Name: At_Drought_Reproduction_P Parameter: Age (day) Value: 40
  misc_feature: MA Experiment 20001911 PARAMETER Experiment Name: At_Drought_Reproduction_P Parameter: Organism Value: A. thaliana
  misc_feature: MA Experiment 20001911 PARAMETER Experiment Name: At_Drought_Reproduction_P Parameter: Plant Line Value: WS
  misc_feature: MA Experiment 20001911 PARAMETER Experiment Name: At_Drought_Reproduction_P Parameter: Timepoint (day) Value: 10
  misc_feature: MA Experiment 20001911 PARAMETER Experiment Name: At_Drought_Reproduction_P Parameter: Tissue Value: Flowers
  misc_feature: MA Experiment 20001911 PARAMETER Experiment Name: At_Drought_Reproduction_P Parameter: Treatment Value: Drought vs. No Drought
atttcgctgaatagggttcagtacaaaattcggaatcgtaggtttaagaattttagatcattgaaacagccatgtctaggcaggtcacgagacttctcggatctcttcgccattccggcggcggctgcagcggcagctcaaaggtctgctctctcacttcattggtacagtctcgctccttcgggacaactcctccgcctcctgcggcggtctttgtcgacaaaaatacacgtgtcatctgccaaggtattaccggaaagaacgggaccttccacactgaacaagccattgaatacggcaccaaaatggtagcaggagtgacaccaaagaagggtggaacagaacatttggggctacctgttttcaacactgttgctgaagctaaggctgagactaaagccaatgcctctgtgatctacgtacctgcgcctttcgctgctgctgctatcatggaaggtttagctgctgagttagatcttattgtttgtatcactgaaggaattcctcaacatgacatggttcgtgtaaaggctgctcttaacagtcaatcaaaaactaggctgattggccctaattgtcctggtattatcaaacctggtgaatgcaagattgggatcatgccaggatacatacacaagccggggaagatagggattgtttctcgatctggaacattgacatatgaagctgttttccaaactactgcagtaggtttggggcaatctacttgtgtaggaattggtggggatccgtttaatgggacaaattttgttgactgcttggagaagttctttgttgacccccaaacagaaggtatcgttctcattggagaaatcggtgggactgcagaagaagatgccgctgctttgataaaggaaaatggtacagacaagcctgtagttgctttcatagccggacttactgcaccaccagggcgtcgtatgggtcatgcgggagccattgtttccggtggtaagggcacggctcaagacaagataaagagcctaagagacgcaggagttaaggtggttgagtcaccagctaagattggtgcggcgatgtttgagcttttccaagaaagaggtcttttgaagtgaaactgaagtaatatcataatacaatgagttgtttcaggaatcaacctctctaataacaacagtttgccaaaatagaagagtgaaacggaattcctaaaattccttaccatggagataattgcagagaaaaaaaaatagtcacttttttttttgtctatgccattctatttttcaatttattgagccgttctattttttttttgtctttgttttggttaagttacaaaaaatgagaacgaatcaattgcacaaatttcttcttttaagaatcaaaatcaactaatttagctatgttgattccaacttttgtctgctatgctatgagtattgttgtaaaacaaaccttttcttt

SEQ ID NO: 98502 - protein, 341 aa, Arabidopsis thaliana; identical to SEQ ID NO: 24951
  peptide (1)..(341): Ceres Seq. ID no. 13600893
  misc_feature (48)..(159): Pfam Name: CoA binding domain Pfam Description: CoA binding domain
  misc_feature (1)..(341): Homolog of NCBI NO: 15237260 NR Description: succinyl-CoA synthetase, alpha subunit
  misc_feature (1)..(341): Homolog of NCBI NO: 21593483 NR Description: succinyl-CoA synthetase, alpha subunit
  misc_feature (47)..(341): Homolog of NCBI NO: 1076415 NR Description: succinate-CoA ligase (GDP-forming) (EC 6.2.1.4)
  misc_feature (1)..(341): Homolog of NCBI NO: 15241592 NR Description: succinyl-CoA-ligase alpha subunit [Arabidopsis
  misc_feature (1)..(340): Homolog of NCBI NO: 27357175 NR Description: succinyl-CoA ligase alpha subunit [Lycopersicon
  misc_feature (31)..(341): Homolog of NCBI NO: 34393512 NR Description: putative succinyl-CoA ligase alpha subunit [Oryza
  misc_feature (35)..(327): Homolog of NCBI NO: 1711574 NR Description: SUCCINYL-COA LIGASE [GDP-FORMING] ALPHA-CHAIN,
  misc_feature (15)..(340): Homolog of NCBI NO: 38181885 NR Description: Suclg1 protein [Rattus norvegicus]
  misc_feature (15)..(340): Homolog of NCBI NO: 16758586 NR Description: succinate-CoA ligase, GDP-forming, alpha subunit
  misc_feature (15)..(340): Homolog of NCBI NO: 20141810 NR Description: Succinyl-CoA ligase [GDP-forming] alpha-chain,

SEQ ID NO: 98503 - protein, 263 aa, Arabidopsis thaliana; identical to SEQ ID NO: 24952
  peptide (1)..(263): Ceres Seq. ID no. 13600894
  misc_feature (1)..(81): Pfam Name: CoA binding domain Pfam Description: CoA binding domain
  misc_feature (1)..(263): Homolog of NCBI NO: 15237260 NR Description: succinyl-CoA synthetase, alpha subunit
  misc_feature (1)..(263): Homolog of NCBI NO: 21593483 NR Description: succinyl-CoA synthetase, alpha subunit
  misc_feature (1)..(263): Homolog of NCBI NO: 1076415 NR Description: succinate-CoA ligase (GDP-forming) (EC 6.2.1.4)
  misc_feature (1)..(263): Homolog of NCBI NO: 15241592 NR Description: succinyl-CoA-ligase alpha subunit [Arabidopsis
  misc_feature (1)..(262): Homolog of NCBI NO: 27357175 NR Description: succinyl-CoA ligase alpha subunit [Lycopersicon
  misc_feature (1)..(263): Homolog of NCBI NO: 34393512 NR Description: putative succinyl-CoA ligase alpha subunit [Oryza
  misc_feature (1)..(249): Homolog of NCBI NO: 1711574 NR Description: SUCCINYL-COA LIGASE [GDP-FORMING] ALPHA-CHAIN,
  misc_feature (1)..(262): Homolog of NCBI NO: 38181885 NR Description: Suclg1 protein [Rattus norvegicus]
  misc_feature (1)..(262): Homolog of NCBI NO: 16758586 NR Description: succinate-CoA ligase, GDP-forming, alpha subunit
  misc_feature (1)..(262): Homolog of NCBI NO: 20141810 NR Description: Succinyl-CoA ligase [GDP-forming] alpha-chain,

SEQ ID NO: 98504 - protein, 215 aa, Arabidopsis thaliana; identical to SEQ ID NO: 24953
  peptide (1)..(215): Ceres Seq. ID no. 13600895
  misc_feature (1)..(215): Homolog of NCBI NO: 15237260 NR Description: succinyl-CoA synthetase, alpha subunit
  misc_feature (1)..(215): Homolog of NCBI NO: 21593483 NR Description: succinyl-CoA synthetase, alpha subunit
  misc_feature (1)..(215): Homolog of NCBI NO: 1076415 NR Description: succinate-CoA ligase (GDP-forming) (EC 6.2.1.4)
  misc_feature (1)..(215): Homolog of NCBI NO: 15241592 NR Description: succinyl-CoA-ligase alpha subunit [Arabidopsis
  misc_feature (1)..(214): Homolog of NCBI NO: 27357175 NR Description: succinyl-CoA ligase alpha subunit [Lycopersicon
  misc_feature (1)..(215): Homolog of NCBI NO: 34393512 NR Description: putative succinyl-CoA ligase alpha subunit [Oryza
  misc_feature (1)..(201): Homolog of NCBI NO: 1711574 NR Description: SUCCINYL-COA LIGASE [GDP-FORMING] ALPHA-CHAIN,
  misc_feature (1)..(214): Homolog of NCBI NO: 38181885 NR Description: Suclg1 protein [Rattus norvegicus]
  misc_feature (1)..(214): Homolog of NCBI NO: 16758586 NR Description: succinate-CoA ligase, GDP-forming, alpha subunit
  misc_feature (1)..(214): Homolog of NCBI NO: 20141810 NR Description: Succinyl-CoA ligase [GDP-forming] alpha-chain,

SEQ ID NO: 98505 - DNA, 973 bp, Arabidopsis thaliana
  misc_feature (1)..(973): Ceres Seq. ID no. 13600903
  misc_feature: MA Experiment ID: 108434 Result: Up-regulated in Transcription
  misc_feature: MA Experiment 108434 PARAMETER Experiment Name: At_Root_Tips_cDNA_P Parameter: Tissue Value: Root Tips
  misc_feature: MA Experiment ID: 108461 Result: Up-regulated in Transcription
  misc_feature: MA Experiment 108461 PARAMETER Experiment Name: At_Germinating_Seeds_cDNA_P Parameter: Age (day) Value: 1 vs. 0
  misc_feature: MA Experiment 108461 PARAMETER Experiment Name: At_Germinating_Seeds_cDNA_P Parameter: Tissue Value: Germinating Seeds
  misc_feature: MA Experiment ID: 108569 Result: Down-regulated in Transcription
  misc_feature: MA Experiment 108569 PARAMETER Experiment Name: At_0.001%_MeJA__cDNA_P Parameter: Timepoint (hr) Value: 6
  misc_feature: MA Experiment 108569 PARAMETER Experiment Name: At_0.001%_MeJA__cDNA_P Parameter: Tissue Value: Aerial
  misc_feature: MA Experiment 108569 PARAMETER Experiment Name: At_0.001%_MeJA__cDNA_P Parameter: Treatment Value: 0.001% MeJA vs. No Treatment
  misc_feature: MA Experiment ID: 108573 Result: Down-regulated in Transcription
  misc_feature: MA Experiment 108573 PARAMETER Experiment Name: At_Drought_cDNA_P Parameter: Timepoint (hr) Value: 6
  misc_feature: MA Experiment 108573 PARAMETER Experiment Name: At_Drought_cDNA_P Parameter: Tissue Value: Aerial
  misc_feature: MA Experiment 108573 PARAMETER Experiment Name: At_Drought_cDNA_P Parameter: Treatment Value: Drought vs. No Drought
  misc_feature: MA Experiment ID: 108577 Result: Down-regulated in Transcription
  misc_feature: MA Experiment 108577 PARAMETER Experiment Name: At_42deg_Heat_cDNA_P Parameter: Temperature (deg C) Value: 42 vs. 22
  misc_feature: MA Experiment 108577 PARAMETER Experiment Name: At_42deg_Heat_cDNA_P Parameter: Timepoint (hr) Value: 6
  misc_feature: MA Experiment 108577 PARAMETER Experiment Name: At_42deg_Heat_cDNA_P Parameter: Tissue Value: Aerial
  misc_feature: MA Experiment ID: 108585 Result: Down-regulated in Transcription
  misc_feature: MA Experiment 108585 PARAMETER Experiment Name: At_5mM_NaNP_cDNA_P Parameter: Timepoint (hr) Value: 6
  misc_feature: MA Experiment 108585 PARAMETER Experiment Name: At_5mM_NaNP_cDNA_P Parameter: Tissue Value: Aerial
  misc_feature: MA Experiment 108585 PARAMETER Experiment Name: At_5mM_NaNP_cDNA_P Parameter: Treatment Value: null
  misc_feature: MA Experiment ID: 108594 Result: Up-regulated in Transcription
  misc_feature: MA Experiment 108594 PARAMETER Experiment Name: At_Ler-rhl_Root_cDNA_P Parameter: Plant Line Value: null
  misc_feature: MA Experiment ID: 20000090 Result: Up-regulated in Transcription
  misc_feature: MA Experiment ID: 20000111 Result: Down-regulated in Transcription
  misc_feature: MA Experiment 20000111 PARAMETER Experiment Name: At_42deg_Heat_cDNA_P Parameter: Temperature (deg C) Value: 42 vs. 22
  misc_feature: MA Experiment 20000111 PARAMETER Experiment Name: At_42deg_Heat_cDNA_P Parameter: Timepoint (hr) Value: 6
  misc_feature: MA Experiment 20000111 PARAMETER Experiment Name: At_42deg_Heat_cDNA_P Parameter: Tissue Value: Aerial
  misc_feature: MA Experiment ID: 20000113 Result: Down-regulated in Transcription
  misc_feature: MA Experiment 20000113 PARAMETER Experiment Name: At_42deg_Heat_cDNA_P Parameter: Temperature (deg C) Value: 42 vs. 22
  misc_feature: MA Experiment 20000113 PARAMETER Experiment Name: At_42deg_Heat_cDNA_P Parameter: Timepoint (hr) Value: 8
  misc_feature: MA Experiment 20000113 PARAMETER Experiment Name: At_42deg_Heat_cDNA_P Parameter: Tissue Value: Aerial
  misc_feature: MA Experiment ID: 20000117 Result: Down-regulated in Transcription
  misc_feature: MA Experiment 20000117 PARAMETER Experiment Name: At_100uM_ABA_Mutants_cDNA_P Parameter: Plant Line Value: Columbia
  misc_feature: MA Experiment 20000117 PARAMETER Experiment Name: At_100uM_ABA_Mutants_cDNA_P Parameter: Timepoint (hr) Value: 6
  misc_feature: MA Experiment 20000117 PARAMETER Experiment Name: At_100uM_ABA_Mutants_cDNA_P Parameter: Tissue Value: Aerial
  misc_feature: MA Experiment 20000117 PARAMETER Experiment Name: At_100uM_ABA_Mutants_cDNA_P Parameter: Treatment Value: 100uM ABA vs. No Treatment
  misc_feature: MA Experiment ID: 20000173 Result: Down-regulated in Transcription
  misc_feature: MA Experiment 20000173 PARAMETER Experiment Name: At_42deg_Heat_P Parameter: Age (day) Value: 14
  misc_feature: MA Experiment 20000173 PARAMETER Experiment Name: At_42deg_Heat_P Parameter: Organism Value: A. thaliana
  misc_feature: MA Experiment 20000173 PARAMETER Experiment Name: At_42deg_Heat_P Parameter: Plant Line Value: WS
  misc_feature: MA Experiment 20000173 PARAMETER Experiment Name: At_42deg_Heat_P Parameter: Temperature (deg C) Value: 42 vs. 22
  misc_feature: MA Experiment 20000173 PARAMETER Experiment Name: At_42deg_Heat_P Parameter: Timepoint (hr) Value: 6
  misc_feature: MA Experiment 20000173 PARAMETER Experiment Name: At_42deg_Heat_P Parameter: Tissue Value: Aerial
  misc_feature: MA Experiment ID: 20000179 Result: Up-regulated in Transcription
  misc_feature: MA Experiment 20000179 PARAMETER Experiment Name: At_Germinating_Seeds_P Parameter: Age (hr) Value: 6 vs. 0
  misc_feature: MA Experiment 20000179 PARAMETER Experiment Name: At_Germinating_Seeds_P Parameter: Tissue Value: Germinating Seeds
  misc_feature: MA Experiment ID: 20000180 Result: Up-regulated in Transcription
  misc_feature: MA Experiment 20000180 PARAMETER Experiment Name: At_Germinating_Seeds_P Parameter: Age (hr) Value: 24 vs. 0
  misc_feature: MA Experiment 20000180 PARAMETER Experiment Name: At_Germinating_Seeds_P Parameter: Tissue Value: Germinating Seeds
  misc_feature: MA Experiment ID: 20000224 Result: Up-regulated in Transcription
  misc_feature: MA Experiment ID: 20000234 Result: Up-regulated in Transcription
  misc_feature: MA Experiment 20000234 PARAMETER Experiment Name: At_Siliques_P Parameter: Age (day) Value: 21
  misc_feature: MA Experiment 20000234 PARAMETER Experiment Name: At_Siliques_P Parameter: Organism Value: A. thaliana
  misc_feature: MA Experiment 20000234 PARAMETER Experiment Name: At_Siliques_P Parameter: Plant Line Value: WS
  misc_feature: MA Experiment 20000234 PARAMETER Experiment Name: At_Siliques_P Parameter: Tissue Value: Less Than 5mm Siliques vs. Whole Plant
  misc_feature: MA Experiment ID: 20000264 Result: Up-regulated in Transcription
  misc_feature: MA Experiment 20000264 PARAMETER Experiment Name: At_Open_Flower_P Parameter: Age (day) Value: 21
  misc_feature: MA Experiment 20000264 PARAMETER Experiment Name: At_Open_Flower_P Parameter: Plant Line Value: WS
  misc_feature: MA Experiment 20000264 PARAMETER Experiment Name: At_Open_Flower_P Parameter: Tissue Value: Open Flower vs. Whole Plant
  misc_feature: MA Experiment ID: 20000265 Result: Up-regulated in Transcription
  misc_feature: MA Experiment 20000265 PARAMETER Experiment Name: At_Open_Flower_P Parameter: Age (day) Value: 21
  misc_feature: MA Experiment 20000265 PARAMETER Experiment Name: At_Open_Flower_P Parameter: Plant Line Value: WS
  misc_feature: MA Experiment 20000265 PARAMETER Experiment Name: At_Open_Flower_P Parameter: Tissue Value: Closed Flower vs. Whole Plant
  misc_feature: MA Experiment ID: 20000437 Result: Down-regulated in Transcription
  misc_feature: MA Experiment 20000437 PARAMETER Experiment Name: At_Drought_P Parameter: Age (day) Value: 8
  misc_feature: MA Experiment 20000437 PARAMETER Experiment Name: At_Drought_P Parameter: Organism Value: A. thaliana
  misc_feature: MA Experiment 20000437 PARAMETER Experiment Name: At_Drought_P Parameter: Plant Line Value: WS
  misc_feature: MA Experiment 20000437 PARAMETER Experiment Name: At_Drought_P Parameter: Timepoint (hr) Value: 24
  misc_feature: MA Experiment 20000437 PARAMETER Experiment Name: At_Drought_P Parameter: Tissue Value: Whole Plant
  misc_feature: MA Experiment 20000437 PARAMETER Experiment Name: At_Drought_P Parameter: Treatment Value: Drought vs. No Drought
  misc_feature: MA Experiment ID: 20001247 Result: Down-regulated in Transcription
  misc_feature: MA Experiment 20001247 PARAMETER Experiment Name: At_Far-red-induction_P Parameter: Age (day) Value: 7
  misc_feature: MA Experiment 20001247 PARAMETER Experiment Name: At_Far-red-induction_P Parameter: Light Value: Far-red vs. White
  misc_feature: MA Experiment 20001247 PARAMETER Experiment Name: At_Far-red-induction_P Parameter: Organism Value: A. thaliana
  misc_feature: MA Experiment 20001247 PARAMETER Experiment Name: At_Far-red-induction_P Parameter: Plant Line Value: Columbia
  misc_feature: MA Experiment 20001247 PARAMETER Experiment Name: At_Far-red-induction_P Parameter: Timepoint (hr) Value: 1
  misc_feature: MA Experiment 20001247 PARAMETER Experiment Name: At_Far-red-induction_P Parameter: Tissue Value: Whole Plant
  misc_feature: MA Experiment ID: 20001451 Result: Down-regulated in Transcription
  misc_feature: MA Experiment 20001451 PARAMETER Experiment Name: At_Far-red-induction_P Parameter: Age (day) Value: 7
  misc_feature: MA Experiment 20001451 PARAMETER Experiment Name: At_Far-red-induction_P Parameter: Light Value: Far-red vs. White
  misc_feature: MA Experiment 20001451 PARAMETER Experiment Name: At_Far-red-induction_P Parameter: Organism Value: A. thaliana
  misc_feature: MA Experiment 20001451 PARAMETER Experiment Name: At_Far-red-induction_P Parameter: Plant Line Value: Columbia
  misc_feature: MA Experiment 20001451 PARAMETER Experiment Name: At_Far-red-induction_P Parameter: Timepoint (hr) Value: 24
  misc_feature: MA Experiment 20001451 PARAMETER Experiment Name: At_Far-red-induction_P Parameter: Tissue Value: Whole Plant
  misc_feature: MA Experiment ID: 20001555 Result: Down-regulated in Transcription
  misc_feature: MA Experiment 20001555 PARAMETER Experiment Name: At_Drought_Soil_Dry_P Parameter: Age (day) Value: 24
  misc_feature: MA Experiment 20001555 PARAMETER Experiment Name: At_Drought_Soil_Dry_P Parameter: Organism Value: A. thaliana
  misc_feature: MA Experiment 20001555 PARAMETER Experiment Name: At_Drought_Soil_Dry_P Parameter: Plant Line Value: WS
  misc_feature: MA Experiment 20001555 PARAMETER Experiment Name: At_Drought_Soil_Dry_P Parameter: Post Timepoint (hr) Value: None
  misc_feature: MA Experiment 20001555 PARAMETER Experiment Name: At_Drought_Soil_Dry_P Parameter: Post-Treatment Value: None
  misc_feature: MA Experiment 20001555 PARAMETER Experiment Name: At_Drought_Soil_Dry_P Parameter: Timepoint (day) Value: 10
  misc_feature: MA Experiment 20001555 PARAMETER Experiment Name: At_Drought_Soil_Dry_P Parameter: Treatment Value: Drought vs. No Drought
  misc_feature: MA Experiment ID: 20001556 Result: Down-regulated in Transcription
  misc_feature: MA Experiment 20001556 PARAMETER Experiment Name: At_Drought_Soil_Dry_P Parameter: Age (day) Value: 26
  misc_feature: MA Experiment 20001556 PARAMETER Experiment Name: At_Drought_Soil_Dry_P Parameter: Organism Value: A. thaliana
  misc_feature: MA Experiment 20001556 PARAMETER Experiment Name: At_Drought_Soil_Dry_P Parameter: Plant Line Value: WS
  misc_feature: MA Experiment 20001556 PARAMETER Experiment Name: At_Drought_Soil_Dry_P Parameter: Post Timepoint (hr) Value: None
  misc_feature: MA Experiment 20001556 PARAMETER Experiment Name: At_Drought_Soil_Dry_P Parameter: Post-Treatment Value: None
  misc_feature: MA Experiment 20001556 PARAMETER Experiment Name: At_Drought_Soil_Dry_P Parameter: Timepoint (day) Value: 12
  misc_feature: MA Experiment 20001556 PARAMETER Experiment Name: At_Drought_Soil_Dry_P Parameter: Treatment Value: Drought vs. No Drought
  misc_feature: MA Experiment ID: 20001557 Result: Down-regulated in Transcription
  misc_feature: MA Experiment 20001557 PARAMETER Experiment Name: At_Drought_Soil_Dry_P Parameter: Age (day) Value: 27
  misc_feature: MA Experiment 20001557 PARAMETER Experiment Name: At_Drought_Soil_Dry_P Parameter: Organism Value: A. thaliana
  misc_feature: MA Experiment 20001557 PARAMETER Experiment Name: At_Drought_Soil_Dry_P Parameter: Plant Line Value: WS
  misc_feature: MA Experiment 20001557 PARAMETER Experiment Name: At_Drought_Soil_Dry_P Parameter: Post Timepoint (hr) Value: 3
  misc_feature: MA Experiment 20001557 PARAMETER Experiment Name: At_Drought_Soil_Dry_P Parameter: Post-Treatment Value: Re-Water vs. No Drought
  misc_feature: MA Experiment 20001557 PARAMETER Experiment Name: At_Drought_Soil_Dry_P Parameter: Timepoint (day) Value: 13
  misc_feature: MA Experiment 20001557 PARAMETER Experiment Name: At_Drought_Soil_Dry_P Parameter: Treatment Value: Drought vs. No Drought
  misc_feature: MA Experiment ID: 20001905 Result: Down-regulated in Transcription
  misc_feature: MA Experiment 20001905 PARAMETER Experiment Name: At_Drought_Reproduction_P Parameter: Age (day) Value: 40
  misc_feature: MA Experiment 20001905 PARAMETER Experiment Name: At_Drought_Reproduction_P Parameter: Organism Value: A. thaliana
  misc_feature: MA Experiment 20001905 PARAMETER Experiment Name: At_Drought_Reproduction_P Parameter: Plant Line Value: WS
  misc_feature: MA Experiment 20001905 PARAMETER Experiment Name: At_Drought_Reproduction_P Parameter: Timepoint (day) Value: 10
  misc_feature: MA Experiment 20001905 PARAMETER Experiment Name: At_Drought_Reproduction_P Parameter: Tissue Value: Rosettes
  misc_feature: MA Experiment 20001905 PARAMETER Experiment Name: At_Drought_Reproduction_P Parameter: Treatment Value: Drought vs. No Drought
gaaaaatattcacagatattttcgatcttaaccgagaaaaaggaagaaatggctggaccatcgacaacttcaaacgcaccaaagcagaggaagagagtcgaagccgagactagcagcaacacttctactaccttacgtcgcgctaaagacggaagcgctttcgctctctgtgaaggatgtaacaagagtgtagctgtagcgcttataagcatgcacaattgcagtctcgatgctaagatcagagtgaatctcgaagcacaagttgtggagacacaagcagaggctaagaagaagcctgcagagaagaagaagacaacatctgatggacctaagccaaagagacttaagaaaaccaatgatgagaagaagagctcgtctacttcaaacaagcccaagcgacctcttaccgctttctttatcttcatgagtgacttccgtaaaacgtttaagtcagagcataatggttcgttagctaaggatgctgcaaagatcggtggtgagaagtggaagtctttgactgaggaagagaagaaagtttatctggataaagctgctgaacttaaggcagagtataacaagtcactggaaagtaatgatgctgatgaggaagaggaagatgaggagaagcaatctgatgatgttgatgatgctgaggagaaacaagttgacgatgatgatgaagttgaggagaaagaagttgagaacacagatgatgacaagaaagaagctgagggtaaagaagaggaggaagaagagattttggatgactactagaaatgatatgctcgtttttgtggttctagtcttactgaaatcggtttatctctaatcgttgcgatgcattgtaaatgaagcctttattagtgaaagtagtttatttgaagttaagttgtgagcaagtgggttttttgtagttcactgaaatggtaatgccttttgtttaaacaagtaatgaagctatgtttttcgtttt

SEQ ID NO: 98506 - protein, 257 aa, Arabidopsis thaliana
  peptide (1)..(257): Ceres Seq. ID no. 13600904
  misc_feature (131)..(199): Pfam Name: HMG (high mobility group) box Pfam Description: HMG (high mobility group) box
  misc_feature (17)..(257): Homolog of NCBI NO: 18420676 NR Description: expressed protein [Arabidopsis thaliana] unknown [Arabidopsis thaliana] >gi|26452394|dbj|BAC43282.1|
  misc_feature (17)..(257): Homolog of NCBI NO: 9759080 NR Description: gene_id:K19M13.4~unknown protein [Arabidopsis
  misc_feature (17)..(238): Homolog of NCBI NO: 38637289 NR Description: putative HMG type nucleosome/chromatin assembly
  misc_feature (122)..(227): Homolog of NCBI NO: 30688969 NR Description: expressed protein [Arabidopsis thaliana]
  misc_feature (48)..(107): Homolog of NCBI NO: 30688969 NR Description: expressed protein [Arabidopsis thaliana]
  misc_feature (89)..(252): Homolog of NCBI NO: 15231065 NR Description: high mobility group protein 2-related
  misc_feature (102)..(239): Homolog of NCBI NO: 1052956 NR Description: high mobility group protein 2 HMG2 [Ipomoea nil]
  misc_feature (85)..(239): Homolog of NCBI NO: 729737 NR Description: HMG1/2-LIKE PROTEIN >gi|541981|pir||S39556 high
  misc_feature (102)..(225): Homolog of NCBI NO: 7446212 NR Description: high mobility group protein - potato
  misc_feature (98)..(239): Homolog of NCBI NO: 18394900 NR Description: expressed protein [Arabidopsis thaliana]
EKYSQIFSILTEKKEEMAGPSTTSNAPKQRKRVEAETSSNTSTTLRRAKDGSAFALCEGCNKSVAVALISMHNCSLDAKIRVNLEAQVVETQAEAKKKPAEKKKTTSDGPKPKRLKKTNDEKKSSSTSNKPKRPLTAFFIFMSDFRKTFKSEHNGSLAKDAAKIGGEKWKSLTEEEKKVYLDKAAELKAEYNKSLESNDADEEEEDEEKQSDDVDDAEEKQVDDDDEVEEKEVENTDDDKKEAEGKEEEEEEILDDY

SEQ ID NO: 98507 - protein, 241 aa, Arabidopsis thaliana; identical to SEQ ID NO: 43590
  peptide (1)..(241): Ceres Seq. ID no. 13600905
  misc_feature (115)..(183): Pfam Name: HMG (high mobility group) box Pfam Description: HMG (high mobility group) box
  misc_feature (1)..(241): Homolog of NCBI NO: 18420676 NR Description: expressed protein [Arabidopsis thaliana] unknown [Arabidopsis thaliana] >gi|26452394|dbj|BAC43282.1|
  misc_feature (1)..(241): Homolog of NCBI NO: 9759080 NR Description: gene_id:K19M13.4~unknown protein [Arabidopsis
  misc_feature (1)..(222): Homolog of NCBI NO: 38637289 NR Description: putative HMG type nucleosome/chromatin assembly
  misc_feature (106)..(211): Homolog of NCBI NO: 30688969 NR Description: expressed protein [Arabidopsis thaliana]
  misc_feature (32)..(91): Homolog of NCBI NO: 30688969 NR Description: expressed protein [Arabidopsis thaliana]
  misc_feature (73)..(236): Homolog of NCBI NO: 15231065 NR Description: high mobility group protein 2-related
  misc_feature (86)..(223): Homolog of NCBI NO: 1052956 NR Description: high mobility group protein 2 HMG2 [Ipomoea nil]
  misc_feature (69)..(223): Homolog of NCBI NO: 729737 NR Description: HMG1/2-LIKE PROTEIN >gi|541981|pir||S39556 high
  misc_feature (86)..(209): Homolog of NCBI NO: 7446212 NR Description: high mobility group protein - potato
  misc_feature (82)..(223): Homolog of NCBI NO: 18394900 NR Description: expressed protein [Arabidopsis thaliana]

SEQ ID NO: 98508 - protein, 187 aa, Arabidopsis thaliana; identical to SEQ ID NO: 43591
  peptide (1)..(187): Ceres Seq. ID no. 13600906
  misc_feature (61)..(129): Pfam Name: HMG (high mobility group) box Pfam Description: HMG (high mobility group) box
  misc_feature (1)..(187): Homolog of NCBI NO: 18420676 NR Description: expressed protein [Arabidopsis thaliana] unknown [Arabidopsis thaliana] >gi|26452394|dbj|BAC43282.1|
  misc_feature (1)..(187): Homolog of NCBI NO: 9759080 NR Description: gene_id:K19M13.4~unknown protein [Arabidopsis
  misc_feature (1)..(168): Homolog of NCBI NO: 38637289 NR Description: putative HMG type nucleosome/chromatin assembly
  misc_feature (52)..(157): Homolog of NCBI NO: 30688969 NR Description: expressed protein [Arabidopsis thaliana]
  misc_feature (1)..(37): Homolog of NCBI NO: 30688969 NR Description: expressed protein [Arabidopsis thaliana]
  misc_feature (19)..(182): Homolog of NCBI NO: 15231065 NR Description: high mobility group protein 2-related
  misc_feature (32)..(169): Homolog of NCBI NO: 1052956 NR Description: high mobility group protein 2 HMG2 [Ipomoea nil]
  misc_feature (15)..(169): Homolog of NCBI NO: 729737 NR Description: HMG1/2-LIKE PROTEIN >gi|541981|pir||S39556 high
  misc_feature (32)..(155): Homolog of NCBI NO: 7446212 NR Description: high mobility group protein - potato
  misc_feature (28)..(169): Homolog of NCBI NO: 18394900 NR Description: expressed protein [Arabidopsis thaliana]

SEQ ID NO: 98509 - DNA, 1212 bp, Arabidopsis thaliana
  misc_feature (1)..(1212): Ceres Seq. ID no. 13600910
  misc_feature: MA Experiment ID: 108434 Result: Down-regulated in Transcription
  misc_feature: MA Experiment 108434 PARAMETER Experiment Name: At_Root_Tips_cDNA_P Parameter: Tissue Value: Root Tips
  misc_feature: MA Experiment ID: 108435 Result: Up-regulated in Transcription
  misc_feature: MA Experiment 108435 PARAMETER Experiment Name: At_stm_Mutants_cDNA_P Parameter: Plant Line Value: wt Landsburg vs stm
  misc_feature: MA Experiment 108435 PARAMETER Experiment Name: At_stm_Mutants_cDNA_P Parameter: Tissue Value: Shoot Apical Meristem Region
  misc_feature: MA Experiment ID: 108462 Result: Down-regulated in Transcription
  misc_feature: MA Experiment 108462 PARAMETER Experiment Name: At_Germinating_Seeds_cDNA_P Parameter: Age (day) Value: 2 vs. 0
  misc_feature: MA Experiment 108462 PARAMETER Experiment Name: At_Germinating_Seeds_cDNA_P Parameter: Tissue Value: Germinating Seeds
  misc_feature: MA Experiment ID: 108463 Result: Down-regulated in Transcription
  misc_feature: MA Experiment 108463 PARAMETER Experiment Name: At_Germinating_Seeds_cDNA_P Parameter: Age (day) Value: 3 vs. 0
  misc_feature: MA Experiment 108463 PARAMETER Experiment Name: At_Germinating_Seeds_cDNA_P Parameter: Tissue Value: Germinating Seeds
  misc_feature: MA Experiment ID: 108464 Result: Down-regulated in Transcription
  misc_feature: MA Experiment 108464 PARAMETER Experiment Name: At_Germinating_Seeds_cDNA_P Parameter: Age (day) Value: 4 vs. 0
  misc_feature: MA Experiment 108464 PARAMETER Experiment Name: At_Germinating_Seeds_cDNA_P Parameter: Tissue Value: Germinating Seeds
  misc_feature: MA Experiment ID: 108473 Result: Down-regulated in Transcription
  misc_feature: MA Experiment 108473 PARAMETER Experiment Name: At_Drought_Flowers_cDNA_P Parameter: Timepoint (hr) Value: 7 d
  misc_feature: MA Experiment 108473 PARAMETER Experiment Name: At_Drought_Flowers_cDNA_P Parameter: Tissue Value: Flower
  misc_feature: MA Experiment 108473 PARAMETER Experiment Name: At_Drought_Flowers_cDNA_P Parameter: Treatment Value: Drought vs. No Drought
  misc_feature: MA Experiment ID: 108594 Result: Down-regulated in Transcription
  misc_feature: MA Experiment 108594 PARAMETER Experiment Name: At_Ler-rhl_Root_cDNA_P Parameter: Plant Line Value: null
  misc_feature: MA Experiment ID: 20000144 Result: Down-regulated in Transcription
  misc_feature: MA Experiment 20000144 PARAMETER Experiment Name: At_42deg_Heat_cDNA_P Parameter: Temperature (deg C) Value: 42 vs. 22
  misc_feature: MA Experiment 20000144 PARAMETER Experiment Name: At_42deg_Heat_cDNA_P Parameter: Timepoint (hr) Value: 1
  misc_feature: MA Experiment 20000144 PARAMETER Experiment Name: At_42deg_Heat_cDNA_P Parameter: Tissue Value: Aerial
  misc_feature: MA Experiment ID: 20000171 Result: Down-regulated in Transcription
  misc_feature: MA Experiment 20000171 PARAMETER Experiment Name: At_42deg_Heat_P Parameter: Age (day) Value: 14
  misc_feature: MA Experiment 20000171 PARAMETER Experiment Name: At_42deg_Heat_P Parameter: Organism Value: A. thaliana
  misc_feature: MA Experiment 20000171 PARAMETER Experiment Name: At_42deg_Heat_P Parameter: Plant Line Value: WS
  misc_feature: MA Experiment 20000171 PARAMETER Experiment Name: At_42deg_Heat_P Parameter: Temperature (deg C) Value: 42 vs. 22
  misc_feature: MA Experiment 20000171 PARAMETER Experiment Name: At_42deg_Heat_P Parameter: Timepoint (hr) Value: 1
  misc_feature: MA Experiment 20000171 PARAMETER Experiment Name: At_42deg_Heat_P Parameter: Tissue Value: Aerial
  misc_feature: MA Experiment ID: 20000173 Result: Down-regulated in Transcription
  misc_feature: MA Experiment 20000173 PARAMETER Experiment Name: At_42deg_Heat_P Parameter: Age (day) Value: 14
  misc_feature: MA Experiment 20000173 PARAMETER Experiment Name: At_42deg_Heat_P Parameter: Organism Value: A. thaliana
  misc_feature: MA Experiment 20000173 PARAMETER Experiment Name: At_42deg_Heat_P Parameter: Plant Line Value: WS
  misc_feature: MA Experiment 20000173 PARAMETER Experiment Name: At_42deg_Heat_P Parameter: Temperature (deg C) Value: 42 vs. 22
  misc_feature: MA Experiment 20000173 PARAMETER Experiment Name: At_42deg_Heat_P Parameter: Timepoint (hr) Value: 6
  misc_feature: MA Experiment 20000173 PARAMETER Experiment Name: At_42deg_Heat_P Parameter: Tissue Value: Aerial
  misc_feature: MA Experiment ID: 20000184 Result: Up-regulated in Transcription
  misc_feature: MA Experiment 20000184 PARAMETER Experiment Name: At_Shoots__P Parameter: Age (day) Value: 7
  misc_feature: MA Experiment 20000184 PARAMETER Experiment Name: At_Shoots__P Parameter: Tissue Value: Shoots vs. Whole Plant
  misc_feature: MA Experiment ID: 20000185 Result: Up-regulated in Transcription
  misc_feature: MA Experiment 20000185 PARAMETER Experiment Name: At_Roots__P Parameter: Age (day) Value: 7 vs. 21
  misc_feature: MA Experiment 20000185 PARAMETER Experiment Name: At_Roots__P Parameter: Organism Value: A. thaliana
  misc_feature: MA Experiment 20000185 PARAMETER Experiment Name: At_Roots__P Parameter: Tissue Value: Roots vs. Whole Plant
  misc_feature: MA Experiment ID: 20000224 Result: Up-regulated in Transcription
  misc_feature: MA Experiment ID: 20000227 Result: Down-regulated in Transcription
  misc_feature: MA Experiment 20000227 PARAMETER Experiment Name: At_Root-Tips-vs-Tops_P Parameter: Tissue Value: Root Tips vs. Root Tops
  misc_feature: MA Experiment ID: 20000234 Result: Up-regulated in Transcription
  misc_feature: MA Experiment 20000234 PARAMETER Experiment Name: At_Siliques_P Parameter: Age (day) Value: 21
  misc_feature: MA Experiment 20000234 PARAMETER Experiment Name: At_Siliques_P Parameter: Organism Value: A. thaliana
  misc_feature: MA Experiment 20000234 PARAMETER Experiment Name: At_Siliques_P Parameter: Plant Line Value: WS
  misc_feature: MA Experiment 20000234 PARAMETER Experiment Name: At_Siliques_P Parameter: Tissue Value: Less Than 5mm Siliques vs. Whole Plant
  misc_feature: MA Experiment ID: 20000265 Result: Up-regulated in Transcription
  misc_feature: MA Experiment 20000265 PARAMETER Experiment Name: At_Open_Flower_P Parameter: Age (day) Value: 21
  misc_feature: MA Experiment 20000265 PARAMETER Experiment Name: At_Open_Flower_P Parameter: Plant Line Value: WS
  misc_feature: MA Experiment 20000265 PARAMETER Experiment Name: At_Open_Flower_P Parameter: Tissue Value: Closed Flower vs. Whole Plant
  misc_feature: MA Experiment ID: 20000286 Result: Up-regulated in Transcription
  misc_feature: MA Experiment 20000286 PARAMETER Experiment Name: At_Open_Flower_P Parameter: Age (day) Value: 21
  misc_feature: MA Experiment 20000286 PARAMETER Experiment Name: At_Open_Flower_P Parameter: Plant Line Value: WS
  misc_feature: MA Experiment 20000286 PARAMETER Experiment Name: At_Open_Flower_P Parameter: Tissue Value: Half Open vs. Whole Plant
  misc_feature: MA Experiment ID: 20000439 Result: Up-regulated in Transcription
  misc_feature: MA Experiment 20000439 PARAMETER Experiment Name: At_Roots__P Parameter: Age (day) Value: 14 vs. 21
  misc_feature: MA Experiment 20000439 PARAMETER Experiment Name: At_Roots__P Parameter: Organism Value: A. thaliana
  misc_feature: MA Experiment 20000439 PARAMETER Experiment Name: At_Roots__P Parameter: Tissue Value: Roots vs. Whole Plant
  misc_feature: MA Experiment ID: 20000794 Result: Down-regulated in Transcription
  misc_feature: MA Experiment 20000794 PARAMETER Experiment Name: At_Petals_P Parameter: Age (day) Value: 23-25 days
  misc_feature: MA Experiment 20000794 PARAMETER Experiment Name: At_Petals_P Parameter: Plant Line Value: WS
  misc_feature: MA Experiment 20000794 PARAMETER Experiment Name: At_Petals_P Parameter: Tissue Value: Petals vs. Whole plant
  misc_feature: MA Experiment ID: 20001557 Result: Up-regulated in Transcription
  misc_feature: MA Experiment 20001557 PARAMETER Experiment Name: At_Drought_Soil_Dry_P Parameter: Age (day) Value: 27
  misc_feature: MA Experiment 20001557 PARAMETER Experiment Name: At_Drought_Soil_Dry_P Parameter: Organism Value: A. thaliana
  misc_feature: MA Experiment 20001557 PARAMETER Experiment Name: At_Drought_Soil_Dry_P Parameter: Plant Line Value: WS
  misc_feature: MA Experiment 20001557 PARAMETER Experiment Name: At_Drought_Soil_Dry_P Parameter: Post Timepoint (hr) Value: 3
  misc_feature: MA Experiment 20001557 PARAMETER Experiment Name: At_Drought_Soil_Dry_P Parameter: Post-Treatment Value: Re-Water vs. No Drought
  misc_feature: MA Experiment 20001557 PARAMETER Experiment Name: At_Drought_Soil_Dry_P Parameter: Timepoint (day) Value: 13
  misc_feature: MA Experiment 20001557 PARAMETER Experiment Name: At_Drought_Soil_Dry_P Parameter: Treatment Value: Drought vs. No Drought
  misc_feature: MA Experiment ID: 20001558 Result: Up-regulated in Transcription
  misc_feature: MA Experiment 20001558 PARAMETER Experiment Name: At_Drought_Soil_Dry_P Parameter: Age (day) Value: 27
  misc_feature: MA Experiment 20001558 PARAMETER Experiment Name: At_Drought_Soil_Dry_P Parameter: Organism Value: A. thaliana
  misc_feature: MA Experiment 20001558 PARAMETER Experiment Name: At_Drought_Soil_Dry_P Parameter: Plant Line Value: WS
  misc_feature: MA Experiment 20001558 PARAMETER Experiment Name: At_Drought_Soil_Dry_P Parameter: Post Timepoint (hr) Value: 6
  misc_feature: MA Experiment 20001558 PARAMETER Experiment Name: At_Drought_Soil_Dry_P Parameter: Post-Treatment Value: Re-Water vs. No Drought
  misc_feature: MA Experiment 20001558 PARAMETER Experiment Name: At_Drought_Soil_Dry_P Parameter: Timepoint (day) Value: 13
  misc_feature: MA Experiment 20001558 PARAMETER Experiment Name: At_Drought_Soil_Dry_P Parameter: Treatment Value: Drought vs. No Drought
  misc_feature: MA Experiment ID: 20001560 Result: Up-regulated in Transcription
  misc_feature: MA Experiment 20001560 PARAMETER Experiment Name: At_Drought_Soil_Dry_P Parameter: Age (day) Value: 28
  misc_feature: MA Experiment 20001560 PARAMETER Experiment Name: At_Drought_Soil_Dry_P Parameter: Organism Value: A. thaliana
  misc_feature: MA Experiment 20001560 PARAMETER Experiment Name: At_Drought_Soil_Dry_P Parameter: Plant Line Value: WS
  misc_feature: MA Experiment 20001560 PARAMETER Experiment Name: At_Drought_Soil_Dry_P Parameter: Post Timepoint (hr) Value: None
  misc_feature: MA Experiment 20001560 PARAMETER Experiment Name: At_Drought_Soil_Dry_P Parameter: Post-Treatment Value: None
  misc_feature: MA Experiment 20001560 PARAMETER Experiment Name: At_Drought_Soil_Dry_P Parameter: Timepoint (day) Value: 14
  misc_feature: MA Experiment 20001560 PARAMETER Experiment Name: At_Drought_Soil_Dry_P Parameter: Treatment Value: Drought vs. No Drought
  misc_feature: MA Experiment ID: 20001904 Result: Up-regulated in Transcription
  misc_feature: MA Experiment 20001904 PARAMETER Experiment Name: At_Drought_Reproduction_P Parameter: Age (day) Value: 37
  misc_feature: MA Experiment 20001904 PARAMETER Experiment Name: At_Drought_Reproduction_P Parameter: Organism Value: A. thaliana
  misc_feature: MA Experiment 20001904 PARAMETER Experiment Name: At_Drought_Reproduction_P Parameter: Plant Line Value: WS
  misc_feature: MA Experiment 20001904 PARAMETER Experiment Name: At_Drought_Reproduction_P Parameter: Timepoint (day) Value: 7
  misc_feature: MA Experiment 20001904 PARAMETER Experiment Name: At_Drought_Reproduction_P Parameter: Tissue Value: Rosettes
  misc_feature: MA Experiment 20001904 PARAMETER Experiment Name: At_Drought_Reproduction_P Parameter: Treatment Value: Drought vs. No Drought
  misc_feature: MA Experiment ID: 20001911 Result: Down-regulated in Transcription
  misc_feature: MA Experiment 20001911 PARAMETER Experiment Name: At_Drought_Reproduction_P Parameter: Age (day) Value: 40
  misc_feature: MA Experiment 20001911 PARAMETER Experiment Name: At_Drought_Reproduction_P Parameter: Organism Value: A. thaliana
  misc_feature: MA Experiment 20001911 PARAMETER Experiment Name: At_Drought_Reproduction_P Parameter: Plant Line Value: WS
  misc_feature: MA Experiment 20001911 PARAMETER Experiment Name: At_Drought_Reproduction_P Parameter: Timepoint (day) Value: 10
  misc_feature: MA Experiment 20001911 PARAMETER Experiment Name: At_Drought_Reproduction_P Parameter: Tissue Value: Flowers
  misc_feature: MA Experiment 20001911 PARAMETER Experiment Name: At_Drought_Reproduction_P Parameter: Treatment Value: Drought vs. No Drought
actgtactcttccaccaaatccattaatcatcatcttttcttcacagagaggaaaaaaaaaaaatggcgacagattctcaaccaaaccaaaagctaacgcttccgttaaaaacaagaatcgctctcaccgttatctccaccatgaccgataacgctcaacgtcctgacggaactatcaaccgccgtttcctccgcctcttcgatttccgtgctcctcccaatcctaaacccgtcaacatcgtctccacctccgatttcgtcgtggatcaatcccgtgatctctggttccgattgtacactccacatgtctccggcgataaaatccccgtcgttgttttcttccacggcggtggtttcgctttcctcagtcctaatgcgtatccttacgataatgtatgccggagattcgctaggaaattacctgcttatgtcatctccgttaactaccgtctcgctccggagcatcgttatcctgctcaatacgacgacggtttcgatgctttgaagtacatcgaggagaatcacggttcgattcttccggcgaacgctgatctctcgagatgcttcttcgccggagacagtgcaggtggaaacatcgcgcacaacgtcgcgattcgaatttgtcgcgagccgcggtcatctttcaccgccgtgaaactcatcggacttatctcgattcaacctttcttcggcggagaagagagaacggaagcggagaaacaactcgtcggagctcctttggtttcaccggaccgaacagattggtgctggaaagcgatgggattaaaccgggatcatgaagcggttaacgtcggcggaccaaacgcggttgatatatcgggtctggattatccggagacgatggtggtagtagctgggtttgatccgttaaaagattggcagagaagttactacgagtggttaaagttatgcggtaaaaaagcaacgttaatcgaatatccaaacatgtttcatgcgttttacattttccctgaattgcctgaggcgggtcagttaattatgcggattaaggattttgttgatgagcgcgtggcttcgctctccgcttaatcaccttcgctaatgatggatatttaaattagctcaatgaataataatgtattaagctctatgcttgtgtcttgtttagtgttttaaaaatggtgtaggtcgatctattttcattattaatcaagtgttcaactttaagtg

SEQ ID NO: 98510 - protein, 335 aa, Arabidopsis thaliana
  peptide (1)..(335): Ceres Seq. ID no. 13600911
  misc_feature (78)..(109): Pfam Name: Carboxylesterase Pfam Description: Carboxylesterase
  misc_feature (1)..(335): Homolog of NCBI NO: 15237783 NR Description: expressed protein [Arabidopsis thaliana] contains similarity to unknown
  misc_feature (1)..(335): Homolog of NCBI NO: 21618039 NR Description: unknown [Arabidopsis thaliana]
  misc_feature (1)..(327): Homolog of NCBI NO: 34904770 NR Description: similar to carboxylesterase [Oryza sativa
  misc_feature (3)..(335): Homolog of NCBI NO: 34393714 NR Description: putative esterase [Oryza sativa (japonica
  misc_feature (3)..(335): Homolog of NCBI NO: 34904774 NR Description: similar to carboxylesterase [Oryza sativa
  misc_feature (1)..(335): Homolog of NCBI NO: 34904760 NR Description: similar to carboxylesterase [Oryza sativa
  misc_feature (9)..(332): Homolog of NCBI NO: 34904772 NR Description: similar to carboxylesterase [Oryza sativa
  misc_feature (33)..(328): Homolog of NCBI NO: 34904758 NR Description: hypothetical protein~predicted by GeneMark.hmm
  misc_feature (10)..(327): Homolog of NCBI NO: 15240483 NR Description: expressed protein [Arabidopsis thaliana] Unknown protein [Arabidopsis thaliana]
  misc_feature (10)..(327): Homolog of NCBI NO: 15229905 NR Description: expressed protein [Arabidopsis thaliana] unknown protein [Arabidopsis thaliana] unknown protein [Arabidopsis thaliana]
MATDSQPNQKLTLPLKTRIALTVISTMTDNAQRPDGTINRRFLRLFDFRAPPNPKPVNIVSTSDFVVDQSRDLWFRLYTPHVSGDKIPVVVFFHGGGFAFLSPNAYPYDNVCRRFARKLPAYVISVNYRLAPEHRYPAQYDDGFDALKYIEENHGSILPANADLSRCFFAGDSAGGNIAHNVAIRICREPRSSFTAVKLIGLISIQPFFGGEERTEAEKQLVGAPLVSPDRTDWCWKAMGLNRDHEAVNVGGPNAVDISGLDYPETMVVVAGFDPLKDWQRSYYEWLKLCGKKATLIEYPNMFHAFYIFPELPEAGQLIMRIKDFVDERVASLSA

SEQ ID NO: 98511 - protein, 309 aa, Arabidopsis thaliana
  peptide (1)..(309): Ceres Seq. ID no. 13600912
  misc_feature (52)..(83): Pfam Name: Carboxylesterase Pfam Description: Carboxylesterase
  misc_feature (1)..(309): Homolog of NCBI NO: 15237783 NR Description: expressed protein [Arabidopsis thaliana] contains similarity to unknown
  misc_feature (1)..(309): Homolog of NCBI NO: 21618039 NR Description: unknown [Arabidopsis thaliana]
  misc_feature (1)..(301): Homolog of NCBI NO: 34904770 NR Description: similar to carboxylesterase [Oryza sativa
  misc_feature (1)..(309): Homolog of NCBI NO: 34393714 NR Description: putative esterase [Oryza sativa (japonica
  misc_feature (1)..(309): Homolog of NCBI NO: 34904774 NR Description: similar to carboxylesterase [Oryza sativa
  misc_feature (1)..(309): Homolog of NCBI NO: 34904760 NR Description: similar to carboxylesterase [Oryza sativa
  misc_feature (1)..(306): Homolog of NCBI NO: 34904772 NR Description: similar to carboxylesterase [Oryza sativa
  misc_feature (7)..(302): Homolog of NCBI NO: 34904758 NR Description: hypothetical protein~predicted by GeneMark.hmm
  misc_feature (1)..(301): Homolog of NCBI NO: 15240483 NR Description: expressed protein [Arabidopsis thaliana] Unknown protein [Arabidopsis thaliana]
  misc_feature (1)..(301): Homolog of NCBI NO: 15229905 NR Description: expressed protein [Arabidopsis thaliana] unknown protein [Arabidopsis thaliana] unknown protein [Arabidopsis thaliana]
MTDNAQRPDGTINRRFLRLFDFRAPPNPKPVNIVSTSDFVVDQSRDLWFRLYTPHVSGDKIPVVVFFHGGGFAFLSPNAYPYDNVCRRFARKLPAYVISVNYRLAPEHRYPAQYDDGFDALKYIEENHGSILPANADLSRCFFAGDSAGGNIAHNVAIRICREPRSSFTAVKLIGLISIQPFFGGEERTEAEKQLVGAPLVSPDRTDWCWKAMGLNRDHEAVNVGGPNAVDISGLDYPETMVVVAGFDPLKDWQRSYYEWLKLCGKKATLIEYPNMFHAFYIFPELPEAGQLIMRIKDFVDERVASLSA

SEQ ID NO: 98512 - DNA, 738 bp, Arabidopsis thaliana
  misc_feature (1)..(738): Ceres Seq. ID no. 13600931
  misc_feature: MA Experiment ID: 108434 Result: Down-regulated in Transcription
  misc_feature: MA Experiment 108434 PARAMETER Experiment Name: At_Root_Tips_cDNA_P Parameter: Tissue Value: Root Tips
  misc_feature: MA Experiment ID: 108594 Result: Down-regulated in Transcription
  misc_feature: MA Experiment 108594 PARAMETER Experiment Name: At_Ler-rhl_Root_cDNA_P Parameter: Plant Line Value: null
  misc_feature: MA Experiment ID: 20000171 Result: Up-regulated in Transcription
  misc_feature: MA Experiment 20000171 PARAMETER Experiment Name: At_42deg_Heat_P Parameter: Age (day) Value: 14
  misc_feature: MA Experiment 20000171 PARAMETER Experiment Name: At_42deg_Heat_P Parameter: Organism Value: A. thaliana
  misc_feature: MA Experiment 20000171 PARAMETER Experiment Name: At_42deg_Heat_P Parameter: Plant Line Value: WS
  misc_feature: MA Experiment 20000171 PARAMETER Experiment Name: At_42deg_Heat_P Parameter: Temperature (deg C) Value: 42 vs. 22
  misc_feature: MA Experiment 20000171 PARAMETER Experiment Name: At_42deg_Heat_P Parameter: Timepoint (hr) Value: 1
  misc_feature: MA Experiment 20000171 PARAMETER Experiment Name: At_42deg_Heat_P Parameter: Tissue Value: Aerial
  misc_feature: MA Experiment ID: 20000180 Result: Up-regulated in Transcription
  misc_feature: MA Experiment 20000180 PARAMETER Experiment Name: At_Germinating_Seeds_P Parameter: Age (hr) Value: 24 vs. 0
  misc_feature: MA Experiment 20000180 PARAMETER Experiment Name: At_Germinating_Seeds_P Parameter: Tissue Value: Germinating Seeds
  misc_feature: MA Experiment ID: 20000495 Result: Up-regulated in Transcription
  misc_feature: MA Experiment 20000495 PARAMETER Experiment Name: At_Guard_Cells_P Parameter: Harvest Date Value: 8/2/2002
  misc_feature: MA Experiment 20000495 PARAMETER Experiment Name: At_Guard_Cells_P Parameter: Organism Value: A. thaliana
  misc_feature: MA Experiment 20000495 PARAMETER Experiment Name: At_Guard_Cells_P Parameter: Tissue Value: Guard Cells vs. Leaves
  misc_feature: MA Experiment ID: 20001558 Result: Down-regulated in Transcription
  misc_feature: MA Experiment 20001558 PARAMETER Experiment Name: At_Drought_Soil_Dry_P Parameter: Age (day) Value: 27
  misc_feature: MA Experiment 20001558 PARAMETER Experiment Name: At_Drought_Soil_Dry_P Parameter: Organism Value: A. thaliana
  misc_feature: MA Experiment 20001558 PARAMETER Experiment Name: At_Drought_Soil_Dry_P Parameter: Plant Line Value: WS
  misc_feature: MA Experiment 20001558 PARAMETER Experiment Name: At_Drought_Soil_Dry_P Parameter: Post Timepoint (hr) Value: 6
  misc_feature: MA Experiment 20001558 PARAMETER Experiment Name: At_Drought_Soil_Dry_P Parameter: Post-Treatment Value: Re-Water vs. No Drought
  misc_feature: MA Experiment 20001558 PARAMETER Experiment Name: At_Drought_Soil_Dry_P Parameter: Timepoint (day) Value: 13
  misc_feature: MA Experiment 20001558 PARAMETER Experiment Name: At_Drought_Soil_Dry_P Parameter: Treatment Value: Drought vs. No Drought
  misc_feature: MA Experiment ID: 20001906 Result: Down-regulated in Transcription
  misc_feature: MA Experiment 20001906 PARAMETER Experiment Name: At_Drought_Reproduction_P Parameter: Age (day) Value: 35
  misc_feature: MA Experiment 20001906 PARAMETER Experiment Name: At_Drought_Reproduction_P Parameter: Organism Value: A. thaliana
  misc_feature: MA Experiment 20001906 PARAMETER Experiment Name: At_Drought_Reproduction_P Parameter: Plant Line Value: WS
  misc_feature: MA Experiment 20001906 PARAMETER Experiment Name: At_Drought_Reproduction_P Parameter: Timepoint (day) Value: 5
  misc_feature: MA Experiment 20001906 PARAMETER Experiment Name: At_Drought_Reproduction_P Parameter: Tissue Value: Siliques
  misc_feature: MA Experiment 20001906 PARAMETER Experiment Name: At_Drought_Reproduction_P Parameter: Treatment Value: Drought vs. No Drought
  misc_feature: MA Experiment ID: 20001908 Result: Down-regulated in Transcription
  misc_feature: MA Experiment 20001908 PARAMETER Experiment Name: At_Drought_Reproduction_P Parameter: Age (day) Value: 40
  misc_feature: MA Experiment 20001908 PARAMETER Experiment Name: At_Drought_Reproduction_P Parameter: Organism Value: A. thaliana
  misc_feature: MA Experiment 20001908 PARAMETER Experiment Name: At_Drought_Reproduction_P Parameter: Plant Line Value: WS
  misc_feature: MA Experiment 20001908 PARAMETER Experiment Name: At_Drought_Reproduction_P Parameter: Timepoint (day) Value: 10
  misc_feature: MA Experiment 20001908 PARAMETER Experiment Name: At_Drought_Reproduction_P Parameter: Tissue Value: Siliques
  misc_feature: MA Experiment 20001908 PARAMETER Experiment Name: At_Drought_Reproduction_P Parameter: Treatment Value: Drought vs. No Drought
atcttgtgatcatcccaagacaaaaccagagaaaaagacctgtctgtttttttaagaagtctttatattattttttttgtcggagaatcttataagcatggcttcaggaggatcaaagtcggcagctttcatgcttctgatgctgaatcttggtctctatttcgtcatcaccatcatcgcttcttgggctgttaatcacggcatcgagagaactcgcgagtctgcgtcgacactgtcacttccggcgaagatattcccgatatacttcccggtggggaacatggcgaccggttttttcgtaatattcacgttaatcgccggcgtcgtcggaatggccacatcactcaccggaatcatcaacgttcttcaatgggactctccgaatctccactccgccgcggcttcctctctaatctcctggtctctcactctcctcgccatgggattggcctgcaaggagatcaacataggctggaccgaagccaatctaagaactcttgaagttctgactataattgtgagtgctactcagttgttgtgcaccggagctattcatgctggagtcggagaaacagtcgcctccggagaaaggcctcatcttgggagagtttgagtttcatgattcttcttaaaagcggttttacatttgcttcagatcgtgtaatttgtgtgttgtgtcttgtgtgtgtttattcttttgttttgtttgattattatgatcatgtaaaatgattagtt

SEQ ID NO: 98513 - protein, 171 aa, Arabidopsis thaliana; identical to SEQ ID NO: 39539
  peptide (1)..(171): Ceres Seq. ID no. 13600932
  misc_feature (15)..(156): Pfam Name: AWPM-19-like family Pfam Description: AWPM-19-like family
  misc_feature (1)..(171): Homolog of NCBI NO: 15239619 NR Description: plasma membrane associated protein -related
  misc_feature (1)..(155): Homolog of NCBI NO: 34911480 NR Description: putative plasma membrane associated protein
  misc_feature (1)..(156): Homolog of NCBI NO: 15218953 NR Description: plasma membrane associated protein -related thaliana] >gi|25354594|pir||B86418 probable plasma membrane
  misc_feature (7)..(131): Homolog of NCBI NO: 34904644 NR Description: putative ABA-induced plasma membrane protein
  misc_feature (47)..(156): Homolog of NCBI NO: 15237455 NR Description: hypothetical protein [Arabidopsis thaliana] contains similarity to ABA induced plasma membrane
  misc_feature (1)..(156): Homolog of NCBI NO: 4097340 NR Description: hydrophobic LEA-like protein [Oryza sativa]
  misc_feature (1)..(156): Homolog of NCBI NO: 7488688 NR Description: maturation protein PM3 - soybean a Lea protein with hydrophobic domain, high pI value (11.6); 15kD
  misc_feature (60)..(156): Homolog of NCBI NO: 6851373 NR Description: plasma membrane associated protein [Hordeum
  misc_feature (60)..(155): Homolog of NCBI NO: 18390408 NR Description: expressed protein [Arabidopsis thaliana]
  misc_feature (60)..(156): Homolog of NCBI NO: 7489659 NR Description: ABA-induced plasma membrane protein PM 19 - wheat

SEQ ID NO: 98514 - protein, 160 aa, Arabidopsis thaliana; identical to SEQ ID NO: 39540
  peptide (1)..(160): Ceres Seq. ID no. 13600933
  misc_feature (4)..(145): Pfam Name: AWPM-19-like family Pfam Description: AWPM-19-like family
  misc_feature (1)..(160): Homolog of NCBI NO: 15239619 NR Description: plasma membrane associated protein -related
  misc_feature (1)..(144): Homolog of NCBI NO: 34911480 NR Description: putative plasma membrane associated protein
  misc_feature (1)..(145): Homolog of NCBI NO: 15218953 NR Description: plasma membrane associated protein -related thaliana] >gi|25354594|pir||B86418 probable plasma membrane
  misc_feature (1)..(120): Homolog of NCBI NO: 34904644 NR Description: putative ABA-induced plasma membrane protein
  misc_feature (36)..(145): Homolog of NCBI NO: 15237455 NR Description: hypothetical protein [Arabidopsis thaliana] contains similarity to ABA induced plasma membrane
  misc_feature (1)..(145): Homolog of NCBI NO: 4097340 NR Description: hydrophobic LEA-like protein [Oryza sativa]
  misc_feature (1)..(145): Homolog of NCBI NO: 7488688 NR Description: maturation protein PM3 - soybean a Lea protein with hydrophobic domain, high pI value (11.6); 15kD
  misc_feature (49)..(145): Homolog of NCBI NO: 6851373 NR Description: plasma membrane associated protein [Hordeum
  misc_feature (49)..(144): Homolog of NCBI NO: 18390408 NR Description: expressed protein [Arabidopsis thaliana]
  misc_feature (49)..(145): Homolog of NCBI NO: 7489659 NR Description: ABA-induced plasma membrane protein PM 19 - wheat

SEQ ID NO: 98515 - protein, 157 aa, Arabidopsis thaliana; identical to SEQ ID NO: 39541
  peptide (1)..(157): Ceres Seq. ID no. 13600934
  misc_feature (1)..(142): Pfam Name: AWPM-19-like family Pfam Description: AWPM-19-like family
  misc_feature (1)..(157): Homolog of NCBI NO: 15239619 NR Description: plasma membrane associated protein -related
  misc_feature (1)..(141): Homolog of NCBI NO: 34911480 NR Description: putative plasma membrane associated protein
  misc_feature (1)..(142): Homolog of NCBI NO: 15218953 NR Description: plasma membrane associated protein -related thaliana] >gi|25354594|pir||B86418 probable plasma membrane
  misc_feature (1)..(117): Homolog of NCBI NO: 34904644 NR Description: putative ABA-induced plasma membrane protein
  misc_feature (33)..(142): Homolog of NCBI NO: 15237455 NR Description: hypothetical protein [Arabidopsis thaliana] contains similarity to ABA induced plasma membrane
  misc_feature (1)..(142): Homolog of NCBI NO: 4097340 NR Description: hydrophobic LEA-like protein [Oryza sativa]
  misc_feature (1)..(142): Homolog of NCBI NO: 7488688 NR Description: maturation protein PM3 - soybean a Lea protein with hydrophobic domain, high pI value (11.6); 15kD
  misc_feature (46)..(142): Homolog of NCBI NO: 6851373 NR Description: plasma membrane associated protein [Hordeum
  misc_feature (46)..(141): Homolog of NCBI NO: 18390408 NR Description: expressed protein [Arabidopsis thaliana]
  misc_feature (46)..(142): Homolog of NCBI NO: 7489659 NR Description: ABA-induced plasma membrane protein PM 19 - wheat

SEQ ID NO: 98516 - DNA, 1297 bp, Arabidopsis thaliana
  misc_feature (1)..(1297): Ceres Seq. ID no. 13600935
  misc_feature: MA Experiment ID: 108573 Result: Up-regulated in Transcription
  misc_feature: MA Experiment 108573 PARAMETER Experiment Name: At_Drought_cDNA_P Parameter: Timepoint (hr) Value: 6
  misc_feature: MA Experiment 108573 PARAMETER Experiment Name: At_Drought_cDNA_P Parameter: Tissue Value: Aerial
  misc_feature: MA Experiment 108573 PARAMETER Experiment Name: At_Drought_cDNA_P Parameter: Treatment Value: Drought vs. No Drought
  misc_feature: MA Experiment ID: 108595 Result: Down-regulated in Transcription
  misc_feature: MA Experiment 108595 PARAMETER Experiment Name: At_Ler-pi_Ovule_cDNA_P Parameter: Plant Line Value: null
  misc_feature: MA Experiment ID: 20000185 Result: Up-regulated in Transcription
  misc_feature: MA Experiment 20000185 PARAMETER Experiment Name: At_Roots__P Parameter: Age (day) Value: 7 vs. 21
  misc_feature: MA Experiment 20000185 PARAMETER Experiment Name: At_Roots__P Parameter: Organism Value: A. thaliana
  misc_feature: MA Experiment 20000185 PARAMETER Experiment Name: At_Roots__P Parameter: Tissue Value: Roots vs. Whole Plant
  misc_feature: MA Experiment ID: 20000439 Result: Up-regulated in Transcription
  misc_feature: MA Experiment 20000439 PARAMETER Experiment Name: At_Roots__P Parameter: Age (day) Value: 14 vs. 21
  misc_feature: MA Experiment 20000439 PARAMETER Experiment Name: At_Roots__P Parameter: Organism Value: A. thaliana
  misc_feature: MA Experiment 20000439 PARAMETER Experiment Name: At_Roots__P Parameter: Tissue Value: Roots vs. Whole Plant
  misc_feature: MA Experiment ID: 20000794 Result: Up-regulated in Transcription
  misc_feature: MA Experiment 20000794 PARAMETER Experiment Name: At_Petals_P Parameter: Age (day) Value: 23-25 days
  misc_feature: MA Experiment 20000794 PARAMETER Experiment Name: At_Petals_P Parameter: Plant Line Value: WS
  misc_feature: MA Experiment 20000794 PARAMETER Experiment Name: At_Petals_P Parameter: Tissue Value: Petals vs. Whole plant
cgaaaacgaaatctgaaacggtcacacacagtcgctagatatgtctctctcgcttccatcttcttccgccgccgctgctgcggcgtcaacatcgggatcatcatcttctccggcggctgcttcgtcttcctcaacaaccacgtcatggttctccgggatcgttcgtggtcgtggtgataaatccggcaccgcgaagctatctaaaagctcttccatggctggaggaggaagcggaagcggagattacggtggaccaatcaaagggaagaatcaatttcgcggtgttttgttcaaatacggtcctaaatcaattcaggttgcttttaagaccggagagtataaacaacaagtgatatttatcggtggattaactgatggacttttagctactgattacttggaacctcttgcgattgctttggataaagagaaatggtcacttgttcaactactgatgtcttcttcatattctggatttggcacttccagcttgaaacaagatgcacaagaaatcgaccagctaataaaccacctcatcaacaaagagaattctgaaggtgttgttctgcttggtcatagcactggctgtcaggacattgtgtattatatgggaacaaatgcggcatgctcccgagctgtccgggctgcaattttacaggcaccagtcagcgatagagagtacaaagcaacgcttcctgaaacacctgctatgatagacttggctgcaaacatgataaaagaaggtcgaggagaggagctaatgcctagagaagctgatccttgtgctccaatctctgcttatagatatcactccctctgcgcttacatgggagatgacgatatgtttagttctgaccttagtgatgatcagttgaaaactagacttggccatatggctaacacaccttgtcaggtgattttctccatgggtgatgagtatgtaccagattatgtcgacaaaaaagcattggtcaatagattaagtaaagcaatgggaggagcagagaaagtggagatagagcatgggaatcattctctctccaatagagttcatgaagctgttcaagccatcattggttttgtcaaaagagaaggacccagtggttgggatgatccttggagctaaatctgctttttccatttatgtggatgaaaaacttatccaaatctgaatctcatgaattaattcacttcttggctgattcgtaaccatttatccttaaaaagtaaaaaagtaaattgttgtccttttgttctgatatatacttggatcattaagaaaagtgtcttccttatt

SEQ ID NO: 98517 - protein, 361 aa, Arabidopsis thaliana; identical to SEQ ID NO: 29371
  peptide (1)..(361): Ceres Seq. ID no. 13600936
  misc_feature (1)..(361): Homolog of NCBI NO: 15239639 NR Description: expressed protein [Arabidopsis thaliana] hypothetical protein [Arabidopsis thaliana] unknown protein [Arabidopsis thaliana]
  misc_feature (4)..(361): Homolog of NCBI NO: 34393295 NR Description: unknown protein [Oryza sativa (japonica
  misc_feature (4)..(268): Homolog of NCBI NO: 34900046 NR Description: contains EST C72879(E2411)~similar to Arabidopsis
  misc_feature (263)..(361): Homolog of NCBI NO: 34900044 NR Description: hypothetical protein~predicted by GeneMark.hmm
  misc_feature (80)..(285): Homolog of NCBI NO: 19114904 NR Description: hypothetical protein; sequence orphan pombe] >gi|13624908|emb|CAC36902.1| hypothetical protein;
  misc_feature (124)..(306): Homolog of NCBI NO: 32403674 NR Description: hypothetical protein [Neurospora crassa]
  misc_feature (79)..(190): Homolog of NCBI NO: 40741836 NR Description: hypothetical protein AN4948.2 [Aspergillus
  misc_feature (76)..(351): Homolog of NCBI NO: 19173345 NR Description: hypothetical protein [Encephalitozoon cuniculi]
  misc_feature (72)..(192): Homolog of NCBI NO: 40739421 NR Description: hypothetical protein AN6793.2 [Aspergillus
  misc_feature (81)..(190): Homolog of NCBI NO: 40739433 NR Description: hypothetical protein AN6239.2 [Aspergillus

SEQ ID NO: 98518 - protein, 303 aa, Arabidopsis thaliana; identical to SEQ ID NO: 29372
  peptide (1)..(303): Ceres Seq. ID no. 13600937
  misc_feature (1)..(303): Homolog of NCBI NO: 15239639 NR Description: expressed protein [Arabidopsis thaliana] hypothetical protein [Arabidopsis thaliana] unknown protein [Arabidopsis thaliana]
  misc_feature (1)..(303): Homolog of NCBI NO: 34393295 NR Description: unknown protein [Oryza sativa (japonica
  misc_feature (1)..(210): Homolog of NCBI NO: 34900046 NR Description: contains EST C72879(E2411)~similar to Arabidopsis
  misc_feature (205)..(303): Homolog of NCBI NO: 34900044 NR Description: hypothetical protein~predicted by GeneMark.hmm
  misc_feature (22)..(227): Homolog of NCBI NO: 19114904 NR Description: hypothetical protein; sequence orphan pombe] >gi|13624908|emb|CAC36902.1| hypothetical protein;
  misc_feature (66)..(248): Homolog of NCBI NO: 32403674 NR Description: hypothetical protein [Neurospora crassa]
  misc_feature (21)..(132): Homolog of NCBI NO: 40741836 NR Description: hypothetical protein AN4948.2 [Aspergillus
  misc_feature (18)..(293): Homolog of NCBI NO: 19173345 NR Description: hypothetical protein [Encephalitozoon cuniculi]
  misc_feature (14)..(134): Homolog of NCBI NO: 40739421 NR Description: hypothetical protein AN6793.2 [Aspergillus
  misc_feature (23)..(132): Homolog of NCBI NO: 40739433 NR Description: hypothetical protein AN6239.2 [Aspergillus

SEQ ID NO: 98519 - protein, 223 aa, Arabidopsis thaliana; identical to SEQ ID NO: 29373
  peptide (1)..(223): Ceres Seq. ID no. 13600938
  misc_feature (1)..(223): Homolog of NCBI NO: 15239639 NR Description: expressed protein [Arabidopsis thaliana] hypothetical protein [Arabidopsis thaliana] unknown protein [Arabidopsis thaliana]
  misc_feature (1)..(223): Homolog of NCBI NO: 34393295 NR Description: unknown protein [Oryza sativa (japonica
  misc_feature (1)..(130): Homolog of NCBI NO: 34900046 NR Description: contains EST C72879(E2411)~similar to Arabidopsis
  misc_feature (125)..(223): Homolog of NCBI NO: 34900044 NR Description: hypothetical protein~predicted by GeneMark.hmm
  misc_feature (1)..(147): Homolog of NCBI NO: 19114904 NR Description: hypothetical protein; sequence orphan pombe] >gi|13624908|emb|CAC36902.1| hypothetical protein;
  misc_feature (1)..(168): Homolog of NCBI NO: 32403674 NR Description: hypothetical protein [Neurospora crassa]
  misc_feature (1)..(52): Homolog of NCBI NO: 40741836 NR Description: hypothetical protein AN4948.2 [Aspergillus
  misc_feature (1)..(213): Homolog of NCBI NO: 19173345 NR Description: hypothetical protein [Encephalitozoon cuniculi]
  misc_feature (1)..(54): Homolog of NCBI NO: 40739421 NR Description: hypothetical protein AN6793.2 [Aspergillus
  misc_feature (1)..(52): Homolog of NCBI NO: 40739433 NR Description: hypothetical protein AN6239.2 [Aspergillus

SEQ ID NO: 98520 - DNA, 1157 bp, Arabidopsis thaliana
  misc_feature (1)..(1157): Ceres Seq. ID no. 13600939
  misc_feature: MA Experiment ID: 108462 Result: Up-regulated in Transcription
  misc_feature: MA Experiment 108462 PARAMETER Experiment Name: At_Germinating_Seeds_cDNA_P Parameter: Age (day) Value: 2 vs. 0
  misc_feature: MA Experiment 108462 PARAMETER Experiment Name: At_Germinating_Seeds_cDNA_P Parameter: Tissue Value: Germinating Seeds
  misc_feature: MA Experiment ID: 108579 Result: Up-regulated in Transcription
  misc_feature: MA Experiment 108579 PARAMETER Experiment Name: At_4deg_Cold_cDNA_P Parameter: Temperature (deg C) Value: 4 vs. 22
  misc_feature: MA Experiment 108579 PARAMETER Experiment Name: At_4deg_Cold_cDNA_P Parameter: Timepoint (hr) Value: 6
  misc_feature: MA Experiment 108579 PARAMETER Experiment Name: At_4deg_Cold_cDNA_P Parameter: Tissue Value: Aerial
  misc_feature: MA Experiment ID: 20000234 Result: Down-regulated in Transcription
  misc_feature: MA Experiment 20000234 PARAMETER Experiment Name: At_Siliques_P Parameter: Age (day) Value: 21
  misc_feature: MA Experiment 20000234 PARAMETER Experiment Name: At_Siliques_P Parameter: Organism Value: A. thaliana
  misc_feature: MA Experiment 20000234 PARAMETER Experiment Name: At_Siliques_P Parameter: Plant Line Value: WS
  misc_feature: MA Experiment 20000234 PARAMETER Experiment Name: At_Siliques_P Parameter: Tissue Value: Less Than 5mm Siliques vs. Whole Plant
  misc_feature: MA Experiment ID: 20000235 Result: Down-regulated in Transcription
  misc_feature: MA Experiment 20000235 PARAMETER Experiment Name: At_Siliques_P Parameter: Age (day) Value: 21
  misc_feature: MA Experiment 20000235 PARAMETER Experiment Name: At_Siliques_P Parameter: Organism Value: A. thaliana
  misc_feature: MA Experiment 20000235 PARAMETER Experiment Name: At_Siliques_P Parameter: Plant Line Value: WS
  misc_feature: MA Experiment 20000235 PARAMETER Experiment Name: At_Siliques_P Parameter: Tissue Value: 5-10mm Siliques vs. Whole Plant
  misc_feature: MA Experiment ID: 20000264 Result: Down-regulated in Transcription
  misc_feature: MA Experiment 20000264 PARAMETER Experiment Name: At_Open_Flower_P Parameter: Age (day) Value: 21
  misc_feature: MA Experiment 20000264 PARAMETER Experiment Name: At_Open_Flower_P Parameter: Plant Line Value: WS
  misc_feature: MA Experiment 20000264 PARAMETER Experiment Name: At_Open_Flower_P Parameter: Tissue Value: Open Flower vs. Whole Plant
  misc_feature: MA Experiment ID: 20000265 Result: Down-regulated in Transcription
  misc_feature: MA Experiment 20000265 PARAMETER Experiment Name: At_Open_Flower_P Parameter: Age (day) Value: 21
  misc_feature: MA Experiment 20000265 PARAMETER Experiment Name: At_Open_Flower_P Parameter: Plant Line Value: WS
  misc_feature: MA Experiment 20000265 PARAMETER Experiment Name: At_Open_Flower_P Parameter: Tissue Value: Closed Flower vs. Whole Plant
  misc_feature: MA Experiment ID: 20000286 Result: Down-regulated in Transcription
  misc_feature: MA Experiment 20000286 PARAMETER Experiment Name: At_Open_Flower_P Parameter: Age (day) Value: 21
  misc_feature: MA Experiment 20000286 PARAMETER Experiment Name: At_Open_Flower_P Parameter: Plant Line Value: WS
  misc_feature: MA Experiment 20000286 PARAMETER Experiment Name: At_Open_Flower_P Parameter: Tissue Value: Half Open vs. Whole Plant
  misc_feature: MA Experiment ID: 20000451 Result: Up-regulated in Transcription
  misc_feature: MA Experiment 20000451 PARAMETER Experiment Name: At_CS6879_Shoots-Roots_P Parameter: Age (day) Value: 14
  misc_feature: MA Experiment 20000451 PARAMETER Experiment Name: At_CS6879_Shoots-Roots_P Parameter: Organism Value: A. thaliana
  misc_feature: MA Experiment 20000451 PARAMETER Experiment Name: At_CS6879_Shoots-Roots_P Parameter: Plant Line Value: CS6879 vs. WS
  misc_feature: MA Experiment 20000451 PARAMETER Experiment Name: At_CS6879_Shoots-Roots_P Parameter: Tissue Value: Roots
  misc_feature: MA Experiment ID: 20000452 Result: Up-regulated in Transcription
  misc_feature: MA Experiment 20000452 PARAMETER Experiment Name: At_CS6879_Shoots-Roots_P Parameter: Age (day) Value: 14
  misc_feature: MA Experiment 20000452 PARAMETER Experiment Name: At_CS6879_Shoots-Roots_P Parameter: Organism Value: A. thaliana
  misc_feature: MA Experiment 20000452 PARAMETER Experiment Name: At_CS6879_Shoots-Roots_P Parameter: Plant Line Value: CS6879 vs. WS
  misc_feature: MA Experiment 20000452 PARAMETER Experiment Name: At_CS6879_Shoots-Roots_P Parameter: Tissue Value: Shoots
  misc_feature: MA Experiment ID: 20000574 Result: Down-regulated in Transcription
  misc_feature: MA Experiment 20000574 PARAMETER Experiment Name: At_100uM_ABA_Mutants__P Parameter: Organism Value: A. thaliana
  misc_feature: MA Experiment 20000574 PARAMETER Experiment Name: At_100uM_ABA_Mutants__P Parameter: Plant Line Value: CS23 vs. Ler wt
  misc_feature: MA Experiment 20000574 PARAMETER Experiment Name: At_100uM_ABA_Mutants__P Parameter: Timepoint (hr) Value: N/A
  misc_feature: MA Experiment 20000574 PARAMETER Experiment Name: At_100uM_ABA_Mutants__P Parameter: Tissue Value: Whole Plant
  misc_feature: MA Experiment 20000574 PARAMETER Experiment Name: At_100uM_ABA_Mutants__P Parameter: Treatment Value: None
atccttaaagatctcgttgcggtttttgtcggaattgtttcgatttgttgtggttctcaataagctctcgcttgtcagagaaacaccggcaacgccgttgaaatagtcaccggagaccattttgcatcgtagagttcgccttttatggcgttcacgtggggatctgctctccggatttctgttctccttatccttgtagctgcaattgtcttagcttgttattttctccctgttgagaagctattgaaggattttttgttatgggttgaacaagatctagggccttggggaccttttgccctagctgttgcgtacattcctctaacagttttggctgttcctgcctcggttctcacgctcggtggtggctacctttttgggctgccaattggttttgtggcggactcagtcggtgctacacttggctcaggagctgcatttctactaggccgtacgattggaaaaccttttgtagttgcaaaattaaaggattatcctcagtttcaatcagtggcactcgcgatagagaaatccggcttcaagatatgcttgttgctccggcttgctcctcttcttccgttcagcatgttgaactacctcttatctgtcacgccaattcggctaggtccatacttgctttcttcgtggttagggatgatgccaataacacttgcgttagtgtatgttggaacaactctaaaagacctttctgatgtaactcacaagtggagcgagttctcgccaggtcgctgggcgttcttgatttcgagccttgtaatatccgtgatattaatggtgtgtgttacaaaggtggcgaaggacgctctaagaaaagctttagcagagcacggaggagacatgaacgaagcggttgcagccttgccggagctgaccgttactgatgatgcttcgacggatttaaatgagcctctcttgataaagatagatgcacaacaacctcaagaccaagtaaaccatagtcattaaaattaagatgatgaatacttactttgtataatctttattttaacatacaaagcttagttttcttggtttgtataataataacatagattaaaaattatttttaaaaagttatttttcttagtaactttgagatgtaattattagttcacagagatttaaaatattggatg

SEQ ID NO: 98521 - protein, 280 aa, Arabidopsis thaliana
  peptide (1)..(280): Ceres Seq. ID no. 13600940
  misc_feature (1)..(280): Homolog of NCBI NO: 30687125 NR Description: expressed protein [Arabidopsis thaliana]
  misc_feature (1)..(268): Homolog of NCBI NO: 23617115 NR Description: contains EST AU173803(R3795)~integral membrane
  misc_feature (1)..(268): Homolog of NCBI NO: 40823094 NR Description: At1g03260 [Arabidopsis thaliana]
  misc_feature (1)..(268): Homolog of NCBI NO: 30678508 NR Description: expressed protein [Arabidopsis thaliana]
  misc_feature (1)..(268): Homolog of NCBI NO: 25406732 NR Description: protein F15K9.14 [imported] - Arabidopsis
  misc_feature (11)..(233): Homolog of NCBI NO: 23042280 NR Description: hypothetical protein [Trichodesmium erythraeum
  misc_feature (7)..(233): Homolog of NCBI NO: 23128176 NR Description: hypothetical protein [Nostoc punctiforme]
  misc_feature (5)..(228): Homolog of NCBI NO: 32476849 NR Description: conserved hypothetical protein [Pirellula sp.]
  misc_feature (26)..(232): Homolog of NCBI NO: 23128177 NR Description: hypothetical protein [Nostoc punctiforme]
  misc_feature (10)..(236): Homolog of NCBI NO: 17232678 NR Description: hypothetical protein [Nostoc sp. PCC 7120]
MAFTWGSALRISVLLILVAAIVLACYFLPVEKLLKDFLLWVEQDLGPWGPFALAVAYIPLTVLAVPASVLTLGGGYLFGLPIGFVADSVGATLGSGAAFLLGRTIGKPFVVAKLKDYPQFQSVALAIEKSGFKICLLLRLAPLLPFSMLNYLLSVTPIRLGPYLLSSWLGMMPITLALVYVGTTLKDLSDVTHKWSEFSPGRWAFLISSLVISVILMVCVTKVAKDALRKALAEHGGDMNEAVAALPELTVTDDASTDLNEPLLIKIDAQQPQDQVNHSH

SEQ ID NO: 98522 - DNA, 1259 bp, Arabidopsis thaliana
  misc_feature (1)..(1259): Ceres Seq. ID no. 13600945
  misc_feature: MA Experiment ID: 108461 Result: Up-regulated in Transcription
  misc_feature: MA Experiment 108461 PARAMETER Experiment Name: At_Germinating_Seeds_cDNA_P Parameter: Age (day) Value: 1 vs. 0
  misc_feature: MA Experiment 108461 PARAMETER Experiment Name: At_Germinating_Seeds_cDNA_P Parameter: Tissue Value: Germinating Seeds
  misc_feature: MA Experiment ID: 108569 Result: Up-regulated in Transcription
  misc_feature: MA Experiment 108569 PARAMETER Experiment Name: At_0.001%_MeJA__cDNA_P Parameter: Timepoint (hr) Value: 6
  misc_feature: MA Experiment 108569 PARAMETER Experiment Name: At_0.001%_MeJA__cDNA_P Parameter: Tissue Value: Aerial
  misc_feature: MA Experiment 108569 PARAMETER Experiment Name: At_0.001%_MeJA__cDNA_P Parameter: Treatment Value: 0.001% MeJA vs. No Treatment
  misc_feature: MA Experiment ID: 108595 Result: Up-regulated in Transcription
  misc_feature: MA Experiment 108595 PARAMETER Experiment Name: At_Ler-pi_Ovule_cDNA_P Parameter: Plant Line Value: null
  misc_feature: MA Experiment ID: 20000211 Result: Up-regulated in Transcription
  misc_feature: MA Experiment 20000211 PARAMETER Experiment Name: At_0.001percent_MeJA__P Parameter: Age (day) Value: 14
  misc_feature: MA Experiment 20000211 PARAMETER Experiment Name: At_0.001percent_MeJA__P Parameter: Organism Value: A. thaliana
  misc_feature: MA Experiment 20000211 PARAMETER Experiment Name: At_0.001percent_MeJA__P Parameter: Plant Line Value: WS
  misc_feature: MA Experiment 20000211 PARAMETER Experiment Name: At_0.001percent_MeJA__P Parameter: Timepoint (hr) Value: 1
  misc_feature: MA Experiment 20000211 PARAMETER Experiment Name: At_0.001percent_MeJA__P Parameter: Tissue Value: Aerial
  misc_feature: MA Experiment 20000211 PARAMETER Experiment Name: At_0.001percent_MeJA__P Parameter: Treatment Value: 0.001percent MeJA vs. No Treatment
  misc_feature: MA Experiment ID: 20000224 Result: Up-regulated in Transcription
  misc_feature: MA Experiment ID: 20000227 Result: Up-regulated in Transcription
  misc_feature: MA Experiment 20000227 PARAMETER Experiment Name: At_Root-Tips-vs-Tops_P Parameter: Tissue Value: Root Tips vs. Root Tops
  misc_feature: MA Experiment ID: 20000527 Result: Down-regulated in Transcription
  misc_feature: MA Experiment 20000527 PARAMETER Experiment Name: At_10percent_PEG_P Parameter: Age (day) Value: 20
  misc_feature: MA Experiment 20000527 PARAMETER Experiment Name: At_10percent_PEG_P Parameter: Organism Value: A. thaliana
  misc_feature: MA Experiment 20000527 PARAMETER Experiment Name: At_10percent_PEG_P Parameter: Plant Line Value: WS
  misc_feature: MA Experiment 20000527 PARAMETER Experiment Name: At_10percent_PEG_P Parameter: Timepoint (day) Value: 20
  misc_feature: MA Experiment 20000527 PARAMETER Experiment Name: At_10percent_PEG_P Parameter: Tissue Value: Whole Plant
  misc_feature: MA Experiment 20000527 PARAMETER Experiment Name: At_10percent_PEG_P Parameter: Treatment Value: 10percent PEG vs. No Treatment
aaacaacacacacacaaatggctcctcgtgtgatcttcttacttctctcgcttgtttttctctacctcgcaaacacatcacactctttgagaaagtttcaatcatttctacaccctatttataaagacacggccaaaaatatatacaccatccctttgtccatcggctcaacttccagcgaaaaattcgtccttgacctcaacggagccgcaccgttattgcaaaactgtccaaccgccgccaaatccaccacctaccacccaatcagatgtggctccacaagatgcaaatacgcaaaccccaacttcccctgtcccaacaatgtcattgccaagaagaggaccgtgtgtctctcctccgacaattcccgcctattccgagacaccgtccccttgttatacacatttaatggagtttacactagggacagtgaaatgagttcttcattgactttgacttgcactgacggtgctcctgccttaaaacaaagaaccatcggtctcgctaacacccacttgtcgattccctcgcagctcatctccatgtaccagcttcctcataagatagctctttgtttgccttccaccgaacgaagtcagtctcataatggtgacctttggatcggtaaaggggaatattattatctgccttacgataaagatgtctctaagatctttgcctccacgcctctgatcggtaatggcaagtccggcgagtacttaatcgatgtgaagtccatccaaatcggtgcaaagaccgttcctataccctatggagccacaaagatcagcactttggctccttacaccgtattccaaacttccctttacaaggctctgctcacagctttcaccgaaaacatcaagatagctaaagctcccgcggtgaagcctttcggtgcgtgcttctactccaatggaggacgtggagttcccgtgatcgacctggtgctgagcggaggggctaagtggaggatctacgggtctaattccttggtgaaggtgaataaaaatgtggtttgtttagggtttgtggacggaggtgtgaagccgaagtaccctatagtgatcggaggatttcagatggaggataatttggtggagttcgatcttgaagcttccaaattttctttctcctcttctcttttgcttcacaacacttcttgctcagtgcaaaggttgtctcctttctaatgcatgtgatcgattattcatgttatcaagacatatcatcaatttcctttttaataaattaatgtc

SEQ ID NO: 98523 - protein, 396 aa, Arabidopsis thaliana
  peptide (1)..(396): Ceres Seq. ID no. 13600946
  misc_feature (258)..(380): Pfam Name: Eukaryotic aspartyl protease Pfam Description: Eukaryotic aspartyl protease
  misc_feature (6)..(396): Homolog of NCBI NO: 15239644 NR Description: dermal glyco protein precursor -related protein
  misc_feature (10)..(255): Homolog of NCBI NO: 27372527 NR Description: xyloglucan-specific fungal endoglucanase
  misc_feature (258)..(388): Homolog of NCBI NO: 27372527 NR Description: xyloglucan-specific fungal endoglucanase
  misc_feature (10)..(255): Homolog of NCBI NO: 32482806 NR Description: putative xyloglucanase inhibitor [Solanum
  misc_feature (258)..(389): Homolog of NCBI NO: 32482806 NR Description: putative xyloglucanase inhibitor [Solanum
  misc_feature (15)..(388): Homolog of NCBI NO: 34907230 NR Description: putative dermal glycoprotein precursor [Oryza
  misc_feature (238)..(389): Homolog of NCBI NO: 10334495 NR Description: putative extracellular dermal glycoprotein [Cicer
  misc_feature (241)..(389): Homolog of NCBI NO: 18379072 NR Description: expressed protein [Arabidopsis thaliana]
  misc_feature (246)..(389): Homolog of NCBI NO: 21537233 NR Description: EDGP precursor [Arabidopsis thaliana]
  misc_feature (258)..(389): Homolog of NCBI NO: 15218740 NR Description: expressed protein [Arabidopsis thaliana]
TTHTQMAPRVIFLLLSLVFLYLANTSHSLRKFQSFLHPIYKDTAKNIYTIPLSIGSTSSEKFVLDLNGAAPLLQNCPTAAKSTTYHPIRCGSTRCKYANPNFPCPNNVIAKKRTVCLSSDNSRLFRDTVPLLYTFNGVYTRDSEMSSSLTLTCTDGAPALKQRTIGLANTHLSIPSQLISMYQLPHKIALCLPSTERSQSHNGDLWIGKGEYYYLPYDKDVSKIFASTPLIGNGKSGEYLIDVKSIQIGAKTVPIPYGATKISTLAPYTVFQTSLYKALLTAFTENIKIAKAPAVKPFGACFYSNGGRGVPVIDLVLSGGAKWRIYGSNSLVKVNKNVVCLGFVDGGVKPKYPIVIGGFQMEDNLVEFDLEASKFSFSSSLLLHNTSCSVQRLSPF

SEQ ID NO: 98524 - protein, 391 aa, Arabidopsis thaliana
  peptide (1)..(391): Ceres Seq. ID no. 13600947
  misc_feature (253)..(375): Pfam Name: Eukaryotic aspartyl protease Pfam Description: Eukaryotic aspartyl protease
  misc_feature (1)..(391): Homolog of NCBI NO: 15239644 NR Description: dermal glyco protein precursor -related protein
  misc_feature (5)..(250): Homolog of NCBI NO: 27372527 NR Description: xyloglucan-specific fungal endoglucanase
  misc_feature (253)..(383): Homolog of NCBI NO: 27372527 NR Description: xyloglucan-specific fungal endoglucanase
  misc_feature (5)..(250): Homolog of NCBI NO: 32482806 NR Description: putative xyloglucanase inhibitor [Solanum
  misc_feature (253)..(384): Homolog of NCBI NO: 32482806 NR Description: putative xyloglucanase inhibitor [Solanum
  misc_feature (10)..(383): Homolog of NCBI NO: 34907230 NR Description: putative dermal glycoprotein precursor [Oryza
  misc_feature (233)..(384): Homolog of NCBI NO: 10334495 NR Description: putative extracellular dermal glycoprotein [Cicer
  misc_feature (236)..(384): Homolog of NCBI NO: 18379072 NR Description: expressed protein [Arabidopsis thaliana]
  misc_feature (241)..(384): Homolog of NCBI NO: 21537233 NR Description: EDGP precursor [Arabidopsis thaliana]
  misc_feature (253)..(384): Homolog of NCBI NO: 15218740 NR Description: expressed protein [Arabidopsis thaliana]
MAPRVIFLLLSLVFLYLANTSHSLRKFQSFLHPIYKDTAKNIYTIPLSIGSTSSEKFVLDLNGAAPLLQNCPTAAKSTTYHPIRCGSTRCKYANPNFPCPNNVIAKKRTVCLSSDNSRLFRDTVPLLYTFNGVYTRDSEMSSSLTLTCTDGAPALKQRTIGLANTHLSIPSQLISMYQLPHKIALCLPSTERSQSHNGDLWIGKGEYYYLPYDKDVSKIFASTPLIGNGKSGEYLIDVKSIQIGAKTVPIPYGATKISTLAPYTVFQTSLYKALLTAFTENIKIAKAPAVKPFGACFYSNGGRGVPVIDLVLSGGAKWRIYGSNSLVKVNKNVVCLGFVDGGVKPKYPIVIGGFQMEDNLVEFDLEASKFSFSSSLLLHNTSCSVQRLSPF

SEQ ID NO: 98525 - protein, 252 aa, Arabidopsis thaliana; identical to SEQ ID NO: 42894
  peptide (1)..(252): Ceres Seq. ID no. 13600948
  misc_feature (114)..(236): Pfam Name: Eukaryotic aspartyl protease Pfam Description: Eukaryotic aspartyl protease
  misc_feature (1)..(252): Homolog of NCBI NO: 15239644 NR Description: dermal glyco protein precursor -related protein
  misc_feature (1)..(111): Homolog of NCBI NO: 27372527 NR Description: xyloglucan-specific fungal endoglucanase
  misc_feature (114)..(244): Homolog of NCBI NO: 27372527 NR Description: xyloglucan-specific fungal endoglucanase
  misc_feature (1)..(111): Homolog of NCBI NO: 32482806 NR Description: putative xyloglucanase inhibitor [Solanum
  misc_feature (114)..(245): Homolog of NCBI NO: 32482806 NR Description: putative xyloglucanase inhibitor [Solanum
  misc_feature (1)..(244): Homolog of NCBI NO: 34907230 NR Description: putative dermal glycoprotein precursor [Oryza
  misc_feature (94)..(245): Homolog of NCBI NO: 10334495 NR Description: putative extracellular dermal glycoprotein [Cicer
  misc_feature (97)..(245): Homolog of NCBI NO: 18379072 NR Description: expressed protein [Arabidopsis thaliana]
  misc_feature (102)..(245): Homolog of NCBI NO: 21537233 NR Description: EDGP precursor [Arabidopsis thaliana]
  misc_feature (114)..(245): Homolog of NCBI NO: 15218740 NR Description: expressed protein [Arabidopsis thaliana]

SEQ ID NO: 98526 - DNA, 1535 bp, Arabidopsis thaliana
  misc_feature (1)..(1535): Ceres Seq. ID no. 13600949
  misc_feature: MA Experiment ID: 108434 Result: Down-regulated in Transcription
  misc_feature: MA Experiment 108434 PARAMETER Experiment Name: At_Root_Tips_cDNA_P Parameter: Tissue Value: Root Tips
  misc_feature: MA Experiment ID: 108461 Result: Up-regulated in Transcription
  misc_feature: MA Experiment 108461 PARAMETER Experiment Name: At_Germinating_Seeds_cDNA_P Parameter: Age (day) Value: 1 vs. 0
  misc_feature: MA Experiment 108461 PARAMETER Experiment Name: At_Germinating_Seeds_cDNA_P Parameter: Tissue Value: Germinating Seeds
  misc_feature: MA Experiment ID: 108464 Result: Up-regulated in Transcription
  misc_feature: MA Experiment 108464 PARAMETER Experiment Name: At_Germinating_Seeds_cDNA_P Parameter: Age (day) Value: 4 vs. 0
  misc_feature: MA Experiment 108464 PARAMETER Experiment Name: At_Germinating_Seeds_cDNA_P Parameter: Tissue Value: Germinating Seeds
  misc_feature: MA Experiment ID: 108569 Result: Up-regulated in Transcription
  misc_feature: MA Experiment 108569 PARAMETER Experiment Name: At_0.001%_MeJA__cDNA_P Parameter: Timepoint (hr) Value: 6
  misc_feature: MA Experiment 108569 PARAMETER Experiment Name: At_0.001%_MeJA__cDNA_P Parameter: Tissue Value: Aerial
  misc_feature: MA Experiment 108569 PARAMETER Experiment Name: At_0.001%_MeJA__cDNA_P Parameter: Treatment Value: 0.001% MeJA vs. No Treatment
  misc_feature: MA Experiment ID: 108574 Result: Up-regulated in Transcription
  misc_feature: MA Experiment 108574 PARAMETER Experiment Name: At_Wounding__cDNA_P Parameter: Timepoint (hr) Value: 1
  misc_feature: MA Experiment 108574 PARAMETER Experiment Name: At_Wounding__cDNA_P Parameter: Tissue Value: Aerial
  misc_feature: MA Experiment 108574 PARAMETER Experiment Name: At_Wounding__cDNA_P Parameter: Treatment Value: Wounding vs. No Wounding
  misc_feature: MA Experiment ID: 108594 Result: Up-regulated in Transcription
  misc_feature: MA Experiment 108594 PARAMETER Experiment Name: At_Ler-rhl_Root_cDNA_P Parameter: Plant Line Value: null
  misc_feature: MA Experiment ID: 20000173 Result: Up-regulated in Transcription
  misc_feature: MA Experiment 20000173 PARAMETER Experiment Name: At_42deg_Heat_P Parameter: Age (day) Value: 14
  misc_feature: MA Experiment 20000173 PARAMETER Experiment Name: At_42deg_Heat_P Parameter: Organism Value: A. thaliana
  misc_feature: MA Experiment 20000173 PARAMETER Experiment Name: At_42deg_Heat_P Parameter: Plant Line Value: WS
  misc_feature: MA Experiment 20000173 PARAMETER Experiment Name: At_42deg_Heat_P Parameter: Temperature (deg C) Value: 42 vs. 22
  misc_feature: MA Experiment 20000173 PARAMETER Experiment Name: At_42deg_Heat_P Parameter: Timepoint (hr) Value: 6
  misc_feature: MA Experiment 20000173 PARAMETER Experiment Name: At_42deg_Heat_P Parameter: Tissue Value: Aerial
  misc_feature: MA Experiment ID: 20000180 Result: Up-regulated in Transcription
  misc_feature: MA Experiment 20000180 PARAMETER Experiment Name: At_Germinating_Seeds_P Parameter: Age (hr) Value: 24 vs. 0
  misc_feature: MA Experiment 20000180 PARAMETER Experiment Name: At_Germinating_Seeds_P Parameter: Tissue Value: Germinating Seeds
  misc_feature: MA Experiment ID: 20000185 Result: Up-regulated in Transcription
  misc_feature: MA Experiment 20000185 PARAMETER Experiment Name: At_Roots__P Parameter: Age (day) Value: 7 vs. 21
  misc_feature: MA Experiment 20000185 PARAMETER Experiment Name: At_Roots__P Parameter: Organism Value: A. thaliana
  misc_feature: MA Experiment 20000185 PARAMETER Experiment Name: At_Roots__P Parameter: Tissue Value: Roots vs. Whole Plant
  misc_feature: MA Experiment ID: 20000211 Result: Up-regulated in Transcription
  misc_feature: MA Experiment 20000211 PARAMETER Experiment Name: At_0.001percent_MeJA__P Parameter: Age (day) Value: 14
  misc_feature: MA Experiment 20000211 PARAMETER Experiment Name: At_0.001percent_MeJA__P Parameter: Organism Value: A. thaliana
  misc_feature: MA Experiment 20000211 PARAMETER Experiment Name: At_0.001percent_MeJA__P Parameter: Plant Line Value: WS
  misc_feature: MA Experiment 20000211 PARAMETER Experiment Name: At_0.001percent_MeJA__P Parameter: Timepoint (hr) Value: 1
  misc_feature: MA Experiment 20000211 PARAMETER Experiment Name: At_0.001percent_MeJA__P Parameter: Tissue Value: Aerial
  misc_feature: MA Experiment 20000211 PARAMETER Experiment Name: At_0.001percent_MeJA__P Parameter: Treatment Value: 0.001percent MeJA vs. No Treatment
  misc_feature: MA Experiment ID: 20000227 Result: Up-regulated in Transcription
  misc_feature: MA Experiment 20000227 PARAMETER Experiment Name: At_Root-Tips-vs-Tops_P Parameter: Tissue Value: Root Tips vs. Root Tops
  misc_feature: MA Experiment ID: 20000308 Result: Up-regulated in Transcription
  misc_feature: MA Experiment 20000308 PARAMETER Experiment Name: At_100mM_NaCl__P Parameter: Age (day) Value: 17
  misc_feature: MA Experiment 20000308 PARAMETER Experiment Name: At_100mM_NaCl__P Parameter: Organism Value: A. thaliana
  misc_feature: MA Experiment 20000308 PARAMETER Experiment Name: At_100mM_NaCl__P Parameter: Plant Line Value: WS
  misc_feature: MA Experiment 20000308 PARAMETER Experiment Name: At_100mM_NaCl__P Parameter: Timepoint (hr) Value: 72
  misc_feature: MA Experiment 20000308 PARAMETER Experiment Name: At_100mM_NaCl__P Parameter: Tissue Value: Whole Plant
  misc_feature: MA Experiment 20000308 PARAMETER Experiment Name: At_100mM_NaCl__P Parameter: Treatment Value: 100mM NaCl vs. No Treatment
  misc_feature: MA Experiment ID: 20000439 Result: Up-regulated in Transcription
  misc_feature: MA Experiment 20000439 PARAMETER Experiment Name: At_Roots__P Parameter: Age (day) Value: 14 vs. 21
  misc_feature: MA Experiment 20000439 PARAMETER Experiment Name: At_Roots__P Parameter: Organism Value: A. thaliana
  misc_feature: MA Experiment 20000439 PARAMETER Experiment Name: At_Roots__P Parameter: Tissue Value: Roots vs. Whole Plant
  misc_feature: MA Experiment ID: 20000456 Result: Up-regulated in Transcription
  misc_feature: MA Experiment 20000456 PARAMETER Experiment Name: At_100uM_BA_P Parameter: Age (day) Value: 14
  misc_feature: MA Experiment 20000456 PARAMETER Experiment Name: At_100uM_BA_P Parameter: Organism Value: A. thaliana
  misc_feature: MA Experiment 20000456 PARAMETER Experiment Name: At_100uM_BA_P Parameter: Plant Line Value: WS
  misc_feature: MA Experiment 20000456 PARAMETER Experiment Name: At_100uM_BA_P Parameter: Timepoint (hr) Value: 6
  misc_feature: MA Experiment 20000456 PARAMETER Experiment Name: At_100uM_BA_P Parameter: Tissue Value: Aerial
  misc_feature: MA Experiment 20000456 PARAMETER Experiment Name: At_100uM_BA_P Parameter: Treatment Value: 100uM BA vs. No Treatment
  misc_feature: MA Experiment ID: 20000527 Result: Down-regulated in Transcription
  misc_feature: MA Experiment 20000527 PARAMETER Experiment Name: At_10percent_PEG_P Parameter: Age (day) Value: 20
  misc_feature: MA Experiment 20000527 PARAMETER Experiment Name: At_10percent_PEG_P Parameter: Organism Value: A. thaliana
  misc_feature: MA Experiment 20000527 PARAMETER Experiment Name: At_10percent_PEG_P Parameter: Plant Line Value: WS
  misc_feature: MA Experiment 20000527 PARAMETER Experiment Name: At_10percent_PEG_P Parameter: Timepoint (day) Value: 20
  misc_feature: MA Experiment 20000527 PARAMETER Experiment Name: At_10percent_PEG_P Parameter: Tissue Value: Whole Plant
  misc_feature: MA Experiment 20000527 PARAMETER Experiment Name: At_10percent_PEG_P Parameter: Treatment Value: 10percent PEG vs. No Treatment
acaaacaatcacattcatcatttcatttaccaaaaaaaattataacctgaatataatagagatgggtagtagcctcacgcgcctactagtcttcctttccattttcgcagccatagctctgaaatcaaactctcaataccttcttccgatcaccaagcacgaacccaccaatctattctacaccactttcaacgtcggatccgccgcaaaatctcctgtaaacctcctcctcgacctcggaacaaacctcacgtggctcgactgccgcaaacttaaatctttatcatctctccgcctagtcacttgccagagctccacatgcaagtctatccccggtaatggatgcgctggcaaatcttgtctttacaagcaaccaaacccactcggacaaaaccccgttgtaaccggccgtgtcgtccaagacagagcttccctctacaccacagacggcggcaagttcctctctcaagtctccgtccgccacttcacattctcatgcgccggtgagaaagccctccaaggccttcctcctccagtcgacggagttctggctctttctcccggatcttcgtcgttcacgaaacaagtgacgtcagcgtttaacgtcatccctaaattctctctctgcttgccttcttccggtaccggtcatttctatatcgccggcattcactactttatcccaccattcaatagtagcgataatccgattccaaggactttaactcccattaaaggcactgactcaggagattatctaatcactgtaaaatctatctacgttggtggaactgctttgaagttgaaccctgatttgctaaccggcggagccaaactcagtacggtggttcactacaccgtacttcaaaccgatatctacaatgctcttgctcagtcttttacactcaaggctaaggctatgggaatagctaaggttccatcggtggcgccgtttaaacattgttttgattcacgcaccgctggaaagaatttgacggcggggcctaacgtgcccgtgatagagattggtctgccggggaggataggggaggtaaagtgggggttctacggtgcgaatacggtggtgaaagtgaaggaaacggtgatgtgtttggcgtttatcgacggtggaaagacaccgaaggatttgatggtgattgggacacatcagcttcaagatcatatgctcgagttcgatttcagcgggacggttctcgcttttagtgagtcactcttgctccataacacaagctgctccacttggccttcccaaaaatagaatcatcagtcactcatgatagtatcacagtttttggtcttgtatgacacgttttcagcgacacatgtgttctaatcgaaattttaagaaattatcacccgtttctcataaatatcgtctatgttattttattcaaatttgatattcgcttgttttgataaaaaatattgtctgaggattttgcacattaataattatctaaagtattctgtatttcttattagaaattgcaatttagatttgaaattcaaaagtt

SEQ ID NO: 98527 - protein, 425 aa, Arabidopsis thaliana
  peptide (1)..(425): Ceres Seq. ID no. 13600950
  misc_feature (101)..(410): Pfam Name: Eukaryotic aspartyl protease Pfam Description: Eukaryotic aspartyl protease
  misc_feature (21)..(425): Homolog of NCBI NO: 15239655 NR Description: dermal glyco protein - like [Arabidopsis thaliana]
  misc_feature (107)..(421): Homolog of NCBI NO: 32482806 NR Description: putative xyloglucanase inhibitor [Solanum
  misc_feature (107)..(421): Homolog of NCBI NO: 27372527 NR Description: xyloglucan-specific fungal endoglucanase
  misc_feature (88)..(421): Homolog of NCBI NO: 7488910 NR Description: dermal glycoprotein precursor, extracellular - (fragment) >gi|285741|dbj|BAA03413.1| EDGP precursor [Daucus
  misc_feature (106)..(421): Homolog of NCBI NO: 15218740 NR Description: expressed protein [Arabidopsis thaliana]
  misc_feature (106)..(421): Homolog of NCBI NO: 21537233 NR Description: EDGP precursor [Arabidopsis thaliana]
  misc_feature (28)..(418): Homolog of NCBI NO: 23954367 NR Description: xylanase inhibitor [Triticum aestivum]
  misc_feature (100)..(421): Homolog of NCBI NO: 18379072 NR Description: expressed protein [Arabidopsis thaliana]
  misc_feature (114)..(419): Homolog of NCBI NO: 10334495 NR Description: putative extracellular dermal glycoprotein [Cicer
  misc_feature (49)..(421): Homolog of NCBI NO: 34907230 NR Description: putative dermal glycoprotein precursor [Oryza
QTITFIISFTKKNYNLNIIEMGSSLTRLLVFLSIFAAIALKSNSQYLLPITKHEPTNLFYTTFNVGSAAKSPVNLLLDLGTNLTWLDCRKLKSLSSLRLVTCQSSTCKSIPGNGCAGKSCLYKQPNPLGQNPVVTGRVVQDRASLYTTDGGKFLSQVSVRHFTFSCAGEKALQGLPPPVDGVLALSPGSSSFTKQVTSAFNVIPKFSLCLPSSGTGHFYIAGIHYFIPPFNSSDNPIPRTLTPIKGTDSGDYLITVKSIYVGGTALKLNPDLLTGGAKLSTVVHYTVLQTDIYNALAQSFTLKAKAMGIAKVPSVAPFKHCFDSRTAGKNLTAGPNVPVIEIGLPGRIGEVKWGFYGANTVVKVKETVMCLAFIDGGKTPKDLMVIGTHQLQDHMLEFDFSGTVLAFSESLLLHNTSCSTWPSQK

SEQ ID NO: 98528 - protein, 405 aa, Arabidopsis thaliana
  peptide (1)..(405): Ceres Seq. ID no. 13600951
  misc_feature (81)..(390): Pfam Name: Eukaryotic aspartyl protease Pfam Description: Eukaryotic aspartyl protease
  misc_feature (1)..(405): Homolog of NCBI NO: 15239655 NR Description: dermal glyco protein - like [Arabidopsis thaliana]
  misc_feature (87)..(401): Homolog of NCBI NO: 32482806 NR Description: putative xyloglucanase inhibitor [Solanum
  misc_feature (87)..(401): Homolog of NCBI NO: 27372527 NR Description: xyloglucan-specific fungal endoglucanase
  misc_feature (68)..(401): Homolog of NCBI NO: 7488910 NR Description: dermal glycoprotein precursor, extracellular - (fragment) >gi|285741|dbj|BAA03413.1| EDGP precursor [Daucus
  misc_feature (86)..(401): Homolog of NCBI NO: 15218740 NR Description: expressed protein [Arabidopsis thaliana]
  misc_feature (86)..(401): Homolog of NCBI NO: 21537233 NR Description: EDGP precursor [Arabidopsis thaliana]
  misc_feature (8)..(398): Homolog of NCBI NO: 23954367 NR Description: xylanase inhibitor [Triticum aestivum]
  misc_feature (80)..(401): Homolog of NCBI NO: 18379072 NR Description: expressed protein [Arabidopsis thaliana]
  misc_feature (94)..(399): Homolog of NCBI NO: 10334495 NR Description: putative extracellular dermal glycoprotein [Cicer
  misc_feature (29)..(401): Homolog of NCBI NO: 34907230 NR Description: putative dermal glycoprotein precursor [Oryza
MGSSLTRLLVFLSIFAAIALKSNSQYLLPITKHEPTNLFYTTFNVGSAAKSPVNLLLDLGTNLTWLDCRKLKSLSSLRLVTCQSSTCKSIPGNGCAGKSCLYKQPNPLGQNPVVTGRVVQDRASLYTTDGGKFLSQVSVRHFTFSCAGEKALQGLPPPVDGVLALSPGSSSFTKQVTSAFNVIPKFSLCLPSSGTGHFYIAGIHYFIPPFNSSDNPIPRTLTPIKGTDSGDYLITVKSIYVGGTALKLNPDLLTGGAKLSTVVHYTVLQTDIYNALAQSFTLKAKAMGIAKVPSVAPFKHCFDSRTAGKNLTAGPNVPVIEIGLPGRIGEVKWGFYGANTVVKVKETVMCLAFIDGGKTPKDLMVIGTHQLQDHMLEFDFSGTVLAFSESLLLHNTSCSTWPSQK

SEQ ID NO: 98529 - DNA, 1330 bp, Arabidopsis thaliana
  misc_feature (1)..(1330): Ceres Seq. ID no. 13600952
  misc_feature: MA Experiment ID: 108473 Result: Up-regulated in Transcription
  misc_feature: MA Experiment 108473 PARAMETER Experiment Name: At_Drought_Flowers_cDNA_P Parameter: Timepoint (hr) Value: 7 d
  misc_feature: MA Experiment 108473 PARAMETER Experiment Name: At_Drought_Flowers_cDNA_P Parameter: Tissue Value: Flower
  misc_feature: MA Experiment 108473 PARAMETER Experiment Name: At_Drought_Flowers_cDNA_P Parameter: Treatment Value: Drought vs. No Drought
  misc_feature: MA Experiment ID: 108474 Result: Up-regulated in Transcription
  misc_feature: MA Experiment 108474 PARAMETER Experiment Name: At_Drought_Flowers_cDNA_P Parameter: Timepoint (hr) Value: null
  misc_feature: MA Experiment 108474 PARAMETER Experiment Name: At_Drought_Flowers_cDNA_P Parameter: Treatment Value: Drought vs. No Drought
  misc_feature: MA Experiment ID: 108489 Result: Up-regulated in Transcription
  misc_feature: MA Experiment ID: 108501 Result: Down-regulated in Transcription
  misc_feature: MA Experiment 108501 PARAMETER Experiment Name: At_ap2_floral_buds_cDNA_P Parameter: Plant Line Value: ap2 (Ler.)
  misc_feature: MA Experiment 108501 PARAMETER Experiment Name: At_ap2_floral_buds_cDNA_P Parameter: Tissue Value: Closed Flower
  misc_feature: MA Experiment ID: 108579 Result: Down-regulated in Transcription
  misc_feature: MA Experiment 108579 PARAMETER Experiment Name: At_4deg_Cold_cDNA_P Parameter: Temperature (deg C) Value: 4 vs. 22
  misc_feature: MA Experiment 108579 PARAMETER Experiment Name: At_4deg_Cold_cDNA_P Parameter: Timepoint (hr) Value: 6
  misc_feature: MA Experiment 108579 PARAMETER Experiment Name: At_4deg_Cold_cDNA_P Parameter: Tissue Value: Aerial
  misc_feature: MA Experiment ID: 108585 Result: Up-regulated in Transcription
  misc_feature: MA Experiment 108585 PARAMETER Experiment Name: At_5mM_NaNP_cDNA_P Parameter: Timepoint (hr) Value: 6
  misc_feature: MA Experiment 108585 PARAMETER Experiment Name: At_5mM_NaNP_cDNA_P Parameter: Tissue Value: Aerial
  misc_feature: MA Experiment 108585 PARAMETER Experiment Name: At_5mM_NaNP_cDNA_P Parameter: Treatment Value: null
  misc_feature: MA Experiment ID: 108607 Result: Down-regulated in Transcription
  misc_feature: MA Experiment 108607 PARAMETER Experiment Name: At_100uM_ABA_cDNA_P Parameter: Timepoint (hr) Value: 4
  misc_feature: MA Experiment 108607 PARAMETER Experiment Name: At_100uM_ABA_cDNA_P Parameter: Tissue Value: Aerial
  misc_feature: MA Experiment 108607 PARAMETER Experiment Name: At_100uM_ABA_cDNA_P Parameter: Treatment Value: 100uM ABA vs. No Treatment
  misc_feature: MA Experiment ID: 20000089 Result: Up-regulated in Transcription
  misc_feature: MA Experiment ID: 20000166 Result: Down-regulated in Transcription
  misc_feature: MA Experiment 20000166 PARAMETER Experiment Name: At_100uM_ABA_P Parameter: Age (day) Value: 14
  misc_feature: MA Experiment 20000166 PARAMETER Experiment Name: At_100uM_ABA_P Parameter: Organism Value: A. thaliana
  misc_feature: MA Experiment 20000166 PARAMETER Experiment Name: At_100uM_ABA_P Parameter: Plant Line Value: WS
  misc_feature: MA Experiment 20000166 PARAMETER Experiment Name: At_100uM_ABA_P Parameter: Timepoint (hr) Value: 1
  misc_feature: MA Experiment 20000166 PARAMETER Experiment Name: At_100uM_ABA_P Parameter: Tissue Value: Aerial
  misc_feature: MA Experiment 20000166 PARAMETER Experiment Name: At_100uM_ABA_P Parameter: Treatment Value: 100uM ABA vs. No Treatment
  misc_feature: MA Experiment ID: 20000169 Result: Down-regulated in Transcription
  misc_feature: MA Experiment 20000169 PARAMETER Experiment Name: At_100uM_ABA_P Parameter: Age (day) Value: 14
  misc_feature: MA Experiment 20000169 PARAMETER Experiment Name: At_100uM_ABA_P Parameter: Organism Value: A. thaliana
  misc_feature: MA Experiment 20000169 PARAMETER Experiment Name: At_100uM_ABA_P Parameter: Plant Line Value: WS
  misc_feature: MA Experiment 20000169 PARAMETER Experiment Name: At_100uM_ABA_P Parameter: Timepoint (hr) Value: 6
  misc_feature: MA Experiment 20000169 PARAMETER Experiment Name: At_100uM_ABA_P Parameter: Tissue Value: Aerial
  misc_feature: MA Experiment 20000169 PARAMETER Experiment Name: At_100uM_ABA_P Parameter: Treatment Value: 100uM ABA vs. No Treatment
  misc_feature: MA Experiment ID: 20000213 Result: Down-regulated in Transcription
  misc_feature: MA Experiment 20000213 PARAMETER Experiment Name: At_4deg_Cold_P Parameter: Timepoint (hr) Value: 2
  misc_feature: MA Experiment ID: 20000224 Result: Down-regulated in Transcription
  misc_feature: MA Experiment ID: 20000227 Result: Down-regulated in Transcription
  misc_feature: MA Experiment 20000227 PARAMETER Experiment Name: At_Root-Tips-vs-Tops_P Parameter: Tissue Value: Root Tips vs. Root Tops
  misc_feature: MA Experiment ID: 20000234 Result: Down-regulated in Transcription
  misc_feature: MA Experiment 20000234 PARAMETER Experiment Name: At_Siliques_P Parameter: Age (day) Value: 21
  misc_feature: MA Experiment 20000234 PARAMETER Experiment Name: At_Siliques_P Parameter: Organism Value: A. thaliana
  misc_feature: MA Experiment 20000234 PARAMETER Experiment Name: At_Siliques_P Parameter: Plant Line Value: WS
  misc_feature: MA Experiment 20000234 PARAMETER Experiment Name: At_Siliques_P Parameter: Tissue Value: Less Than 5mm Siliques vs. Whole Plant
  misc_feature: MA Experiment ID: 20000235 Result: Down-regulated in Transcription
  misc_feature: MA Experiment 20000235 PARAMETER Experiment Name: At_Siliques_P Parameter: Age (day) Value: 21
  misc_feature: MA Experiment 20000235 PARAMETER Experiment Name: At_Siliques_P Parameter: Organism Value: A. thaliana
  misc_feature: MA Experiment 20000235 PARAMETER Experiment Name: At_Siliques_P Parameter: Plant Line Value: WS
  misc_feature: MA Experiment 20000235 PARAMETER Experiment Name: At_Siliques_P Parameter: Tissue Value: 5-10mm Siliques vs. Whole Plant
  misc_feature: MA Experiment ID: 20000264 Result: Down-regulated in Transcription
  misc_feature: MA Experiment 20000264 PARAMETER Experiment Name: At_Open_Flower_P Parameter: Age (day) Value: 21
  misc_feature: MA Experiment 20000264 PARAMETER Experiment Name: At_Open_Flower_P Parameter: Plant Line Value: WS
  misc_feature: MA Experiment 20000264 PARAMETER Experiment Name: At_Open_Flower_P Parameter: Tissue Value: Open Flower vs. Whole Plant
  misc_feature: MA Experiment ID: 20000265 Result: Down-regulated in Transcription
  misc_feature: MA Experiment 20000265 PARAMETER Experiment Name: At_Open_Flower_P Parameter: Age (day) Value: 21
  misc_feature: MA Experiment 20000265 PARAMETER Experiment Name: At_Open_Flower_P Parameter: Plant Line Value: WS
  misc_feature: MA Experiment 20000265 PARAMETER Experiment Name: At_Open_Flower_P Parameter: Tissue Value: Closed Flower vs. Whole Plant
  misc_feature: MA Experiment ID: 20000268 Result: Down-regulated in Transcription
  misc_feature: MA Experiment 20000268 PARAMETER Experiment Name: At_100mM_NaCl__P Parameter: Age (day) Value: 14
  misc_feature: MA Experiment 20000268 PARAMETER Experiment Name: At_100mM_NaCl__P Parameter: Organism Value: A. thaliana
  misc_feature: MA Experiment 20000268 PARAMETER Experiment Name: At_100mM_NaCl__P Parameter: Plant Line Value: WS
  misc_feature: MA Experiment 20000268 PARAMETER Experiment Name: At_100mM_NaCl__P Parameter: Timepoint (hr) Value: 6
  misc_feature: MA Experiment 20000268 PARAMETER Experiment Name: At_100mM_NaCl__P Parameter: Tissue Value: Whole Plant
  misc_feature: MA Experiment 20000268 PARAMETER Experiment Name: At_100mM_NaCl__P Parameter: Treatment Value: 100mM NaCl vs. No Treatment
  misc_feature: MA Experiment ID: 20000269 Result: Down-regulated in Transcription
  misc_feature: MA Experiment 20000269 PARAMETER Experiment Name: At_1mM_KNO3_L-vs-H_Roots_P Parameter: Age (day) Value: 7,10,12
  misc_feature: MA Experiment 20000269 PARAMETER Experiment Name: At_1mM_KNO3_L-vs-H_Roots_P Parameter: Organism Value: A. thaliana
  misc_feature: MA Experiment 20000269 PARAMETER Experiment Name: At_1mM_KNO3_L-vs-H_Roots_P Parameter: Plant Line Value: WS
  misc_feature: MA Experiment 20000269 PARAMETER Experiment Name: At_1mM_KNO3_L-vs-H_Roots_P Parameter: Timepoint (day) Value: 7,10,12
  misc_feature: MA Experiment 20000269 PARAMETER Experiment Name: At_1mM_KNO3_L-vs-H_Roots_P Parameter: Tissue Value: Roots
  misc_feature: MA Experiment 20000269 PARAMETER Experiment Name: At_1mM_KNO3_L-vs-H_Roots_P Parameter: Treatment Value: 1mM KNO3 vs. 50mM KNO3
  misc_feature: MA Experiment ID: 20000286 Result: Down-regulated in Transcription
  misc_feature: MA Experiment 20000286 PARAMETER Experiment Name: At_Open_Flower_P Parameter: Age (day) Value: 21
  misc_feature: MA Experiment 20000286 PARAMETER Experiment Name: At_Open_Flower_P Parameter: Plant Line Value: WS
  misc_feature: MA Experiment 20000286 PARAMETER Experiment Name: At_Open_Flower_P Parameter: Tissue Value: Half Open vs. Whole Plant
  misc_feature: MA Experiment ID: 20000437 Result: Down-regulated in Transcription
  misc_feature: MA Experiment 20000437 PARAMETER Experiment Name: At_Drought_P Parameter: Age (day) Value: 8
  misc_feature: MA Experiment 20000437 PARAMETER Experiment Name: At_Drought_P Parameter: Organism Value: A. thaliana
  misc_feature: MA Experiment 20000437 PARAMETER Experiment Name: At_Drought_P Parameter: Plant Line Value: WS
  misc_feature: MA Experiment 20000437 PARAMETER Experiment Name: At_Drought_P Parameter: Timepoint (hr) Value: 24
  misc_feature: MA Experiment 20000437 PARAMETER Experiment Name: At_Drought_P Parameter: Tissue Value: Whole Plant
  misc_feature: MA Experiment 20000437 PARAMETER Experiment Name: At_Drought_P Parameter: Treatment Value: Drought vs. No Drought
  misc_feature: MA Experiment ID: 20000441 Result: Up-regulated in Transcription
  misc_feature: MA Experiment 20000441 PARAMETER Experiment Name: At_1uM_BR-BRZ__P Parameter: Tissue Value: Shoot Apices
  misc_feature: MA Experiment 20000441 PARAMETER Experiment Name: At_1uM_BR-BRZ__P Parameter: Treatment Value: 1uM BR vs. No Treatment
  misc_feature: MA Experiment ID: 20000443 Result: Up-regulated in Transcription
  misc_feature: MA Experiment 20000443 PARAMETER Experiment Name: At_1uM_BR-BRZ__P Parameter: Tissue Value: Shoot Apices
  misc_feature: MA Experiment 20000443 PARAMETER Experiment Name: At_1uM_BR-BRZ__P Parameter: Treatment Value: 1uM BRZ vs. No Treatment
  misc_feature: MA Experiment ID: 20000495 Result: Up-regulated in Transcription
  misc_feature: MA Experiment 20000495 PARAMETER Experiment Name: At_Guard_Cells_P Parameter: Harvest Date Value: 8/2/2002
  misc_feature: MA Experiment 20000495 PARAMETER Experiment Name: At_Guard_Cells_P Parameter: Organism Value: A. thaliana
  misc_feature: MA Experiment 20000495 PARAMETER Experiment Name: At_Guard_Cells_P Parameter: Tissue Value: Guard Cells vs. Leaves
  misc_feature: MA Experiment ID: 20000496 Result: Up-regulated in Transcription
  misc_feature: MA Experiment 20000496 PARAMETER Experiment Name: At_Guard_Cells_P Parameter: Harvest Date Value: 7/19/2002
  misc_feature: MA Experiment 20000496 PARAMETER Experiment Name: At_Guard_Cells_P Parameter: Organism Value: Canola
  misc_feature: MA Experiment 20000496 PARAMETER Experiment Name: At_Guard_Cells_P Parameter: Tissue Value: Guard Cells vs. Leaves
  misc_feature: MA Experiment ID: 20000709 Result: Up-regulated in Transcription
  misc_feature: MA Experiment 20000709 PARAMETER Experiment Name: At_15mM_NH4NO3_L-to-H_P Parameter: Age (hr) Value: 14
  misc_feature: MA Experiment 20000709 PARAMETER Experiment Name: At_15mM_NH4NO3_L-to-H_P Parameter: Organism Value: A. thaliana
  misc_feature: MA Experiment 20000709 PARAMETER Experiment Name: At_15mM_NH4NO3_L-to-H_P Parameter: Plant Line Value: WS
  misc_feature: MA Experiment 20000709 PARAMETER Experiment Name: At_15mM_NH4NO3_L-to-H_P Parameter: Timepoint (hr) Value: 4
  misc_feature: MA Experiment 20000709 PARAMETER Experiment Name: At_15mM_NH4NO3_L-to-H_P Parameter: Tissue Value: Aerial
  misc_feature: MA Experiment 20000709 PARAMETER Experiment Name: At_15mM_NH4NO3_L-to-H_P Parameter: Treatment Value: 15mM NH4NO3 vs. 30mM Mannitol
  misc_feature: MA Experiment ID: 20000794 Result: Down-regulated in Transcription
  misc_feature: MA Experiment 20000794 PARAMETER Experiment Name: At_Petals_P Parameter: Age (day) Value: 23-25 days
  misc_feature: MA Experiment 20000794 PARAMETER Experiment Name: At_Petals_P Parameter: Plant Line Value: WS
  misc_feature: MA Experiment 20000794 PARAMETER Experiment Name: At_Petals_P Parameter: Tissue Value: Petals vs. Whole plant
  misc_feature: MA Experiment ID: 20001247 Result: Up-regulated in Transcription
  misc_feature: MA Experiment 20001247 PARAMETER Experiment Name: At_Far-red-induction_P Parameter: Age (day) Value: 7
  misc_feature: MA Experiment 20001247 PARAMETER Experiment Name: At_Far-red-induction_P Parameter: Light Value: Far-red vs. White
  misc_feature: MA Experiment 20001247 PARAMETER Experiment Name: At_Far-red-induction_P Parameter: Organism Value: A. thaliana
  misc_feature: MA Experiment 20001247 PARAMETER Experiment Name: At_Far-red-induction_P Parameter: Plant Line Value: Columbia
  misc_feature: MA Experiment 20001247 PARAMETER Experiment Name: At_Far-red-induction_P Parameter: Timepoint (hr) Value: 1
  misc_feature: MA Experiment 20001247 PARAMETER Experiment Name: At_Far-red-induction_P Parameter: Tissue Value: Whole Plant
  misc_feature: MA Experiment ID: 20001248 Result: Up-regulated in Transcription
  misc_feature: MA Experiment 20001248 PARAMETER Experiment Name: At_Far-red-induction_P Parameter: Age (day) Value: 7
  misc_feature: MA Experiment 20001248 PARAMETER Experiment Name: At_Far-red-induction_P Parameter: Light Value: Far-red vs. White
  misc_feature: MA Experiment 20001248 PARAMETER Experiment Name: At_Far-red-induction_P Parameter: Organism Value: A. thaliana
  misc_feature: MA Experiment 20001248 PARAMETER Experiment Name: At_Far-red-induction_P Parameter: Plant Line Value: Columbia
  misc_feature: MA Experiment 20001248 PARAMETER Experiment Name: At_Far-red-induction_P Parameter: Timepoint (hr) Value: 4
  misc_feature: MA Experiment 20001248 PARAMETER Experiment Name: At_Far-red-induction_P Parameter: Tissue Value: Whole Plant
  misc_feature: MA Experiment ID: 20001450 Result: Up-regulated in Transcription
  misc_feature: MA Experiment 20001450 PARAMETER Experiment Name: At_Far-red-induction_P Parameter: Age (day) Value: 7
  misc_feature: MA Experiment 20001450 PARAMETER Experiment Name: At_Far-red-induction_P Parameter: Light Value: Far-red vs. White
  misc_feature: MA Experiment 20001450 PARAMETER Experiment Name: At_Far-red-induction_P Parameter: Organism Value: A. thaliana
  misc_feature: MA Experiment 20001450 PARAMETER Experiment Name: At_Far-red-induction_P Parameter: Plant Line Value: Columbia
  misc_feature: MA Experiment 20001450 PARAMETER Experiment Name: At_Far-red-induction_P Parameter: Timepoint (hr) Value: 8
  misc_feature: MA Experiment 20001450 PARAMETER Experiment Name: At_Far-red-induction_P Parameter: Tissue Value: Whole Plant
  misc_feature: MA Experiment ID: 20001451 Result: Up-regulated in Transcription
  misc_feature: MA Experiment 20001451 PARAMETER Experiment Name: At_Far-red-induction_P Parameter: Age (day) Value: 7
  misc_feature: MA Experiment 20001451 PARAMETER Experiment Name: At_Far-red-induction_P Parameter: Light Value: Far-red vs. White
  misc_feature: MA Experiment 20001451 PARAMETER Experiment Name: At_Far-red-induction_P Parameter: Organism Value: A. thaliana
  misc_feature: MA Experiment 20001451 PARAMETER Experiment Name: At_Far-red-induction_P Parameter: Plant Line Value: Columbia
  misc_feature: MA Experiment 20001451 PARAMETER Experiment Name: At_Far-red-induction_P Parameter: Timepoint (hr) Value: 24
  misc_feature: MA Experiment 20001451 PARAMETER Experiment Name: At_Far-red-induction_P Parameter: Tissue Value: Whole Plant
  misc_feature: MA Experiment ID: 20001457 Result: Up-regulated in Transcription
  misc_feature: MA Experiment 20001457 PARAMETER Experiment Name: At_50mM_NH4NO3_L-to-H_P Parameter: Age (day) Value: Undefined
  misc_feature: MA Experiment 20001457 PARAMETER Experiment Name: At_50mM_NH4NO3_L-to-H_P Parameter: Organism Value: Undefined
  misc_feature: MA Experiment 20001457 PARAMETER Experiment Name: At_50mM_NH4NO3_L-to-H_P Parameter: Plant Line Value: Undefined
  misc_feature: MA Experiment 20001457 PARAMETER Experiment Name: At_50mM_NH4NO3_L-to-H_P Parameter: Timepoint (hr) Value: 0.5
  misc_feature: MA Experiment 20001457 PARAMETER Experiment Name: At_50mM_NH4NO3_L-to-H_P Parameter: Tissue Value: Siliques
  misc_feature: MA Experiment 20001457 PARAMETER Experiment Name: At_50mM_NH4NO3_L-to-H_P Parameter: Treatment Value: 50mM NH4NO3 vs. 100mM Manitol
  misc_feature: MA Experiment ID: 20001458 Result: Up-regulated in Transcription
  misc_feature: MA Experiment 20001458 PARAMETER Experiment Name: At_50mM_NH4NO3_L-to-H_P Parameter: Age (day) Value: Undefined
  misc_feature: MA Experiment 20001458 PARAMETER Experiment Name: At_50mM_NH4NO3_L-to-H_P Parameter: Organism Value: Undefined
  misc_feature: MA Experiment 20001458 PARAMETER Experiment Name: At_50mM_NH4NO3_L-to-H_P Parameter: Plant Line Value: Undefined
  misc_feature: MA Experiment 20001458 PARAMETER Experiment Name: At_50mM_NH4NO3_L-to-H_P Parameter: Timepoint (hr) Value: 2
  misc_feature: MA Experiment 20001458 PARAMETER Experiment Name: At_50mM_NH4NO3_L-to-H_P Parameter: Tissue Value: Siliques
  misc_feature: MA Experiment 20001458 PARAMETER Experiment Name: At_50mM_NH4NO3_L-to-H_P Parameter: Treatment Value: 50mM NH4NO3 vs. 100mM Manitol
  misc_feature: MA Experiment ID: 20001459 Result: Up-regulated in Transcription
  misc_feature: MA Experiment 20001459 PARAMETER Experiment Name: At_50mM_NH4NO3_L-to-H_P Parameter: Age (day) Value: Undefined
  misc_feature: MA Experiment 20001459 PARAMETER Experiment Name: At_50mM_NH4NO3_L-to-H_P Parameter: Organism Value: Undefined
  misc_feature: MA Experiment 20001459 PARAMETER Experiment Name: At_50mM_NH4NO3_L-to-H_P Parameter: Plant Line Value: Undefined
  misc_feature: MA Experiment 20001459 PARAMETER Experiment Name: At_50mM_NH4NO3_L-to-H_P Parameter: Timepoint (hr) Value: 4
  misc_feature: MA Experiment 20001459 PARAMETER Experiment Name: At_50mM_NH4NO3_L-to-H_P Parameter: Tissue Value: Siliques
  misc_feature: MA Experiment 20001459 PARAMETER Experiment Name: At_50mM_NH4NO3_L-to-H_P Parameter: Treatment Value: 50mM NH4NO3 vs. 100mM Manitol
  misc_feature: MA Experiment ID: 20001554 Result: Down-regulated in Transcription
  misc_feature: MA Experiment 20001554 PARAMETER Experiment Name: At_Drought_Soil_Dry_P Parameter: Age (day) Value: 21
  misc_feature: MA Experiment 20001554 PARAMETER Experiment Name: At_Drought_Soil_Dry_P Parameter: Organism Value: A. thaliana
  misc_feature: MA Experiment 20001554 PARAMETER Experiment Name: At_Drought_Soil_Dry_P Parameter: Plant Line Value: WS
  misc_feature: MA Experiment 20001554 PARAMETER Experiment Name: At_Drought_Soil_Dry_P Parameter: Post Timepoint (hr) Value: None
  misc_feature: MA Experiment 20001554 PARAMETER Experiment Name: At_Drought_Soil_Dry_P Parameter: Post-Treatment Value: None
  misc_feature: MA Experiment 20001554 PARAMETER Experiment Name: At_Drought_Soil_Dry_P Parameter: Timepoint (day) Value: 7
  misc_feature: MA Experiment 20001554 PARAMETER Experiment Name: At_Drought_Soil_Dry_P Parameter: Treatment Value: Drought vs. No Drought
  misc_feature: MA Experiment ID: 20001555 Result: Down-regulated in Transcription
  misc_feature: MA Experiment 20001555 PARAMETER Experiment Name: At_Drought_Soil_Dry_P Parameter: Age (day) Value: 24
  misc_feature: MA Experiment 20001555 PARAMETER Experiment Name: At_Drought_Soil_Dry_P Parameter: Organism Value: A. thaliana
  misc_feature: MA Experiment 20001555 PARAMETER Experiment Name: At_Drought_Soil_Dry_P Parameter: Plant Line Value: WS
  misc_feature: MA Experiment 20001555 PARAMETER Experiment Name: At_Drought_Soil_Dry_P Parameter: Post Timepoint (hr) Value: None
  misc_feature: MA Experiment 20001555 PARAMETER Experiment Name: At_Drought_Soil_Dry_P Parameter: Post-Treatment Value: None
  misc_feature: MA Experiment 20001555 PARAMETER Experiment Name: At_Drought_Soil_Dry_P Parameter: Timepoint (day) Value: 10
  misc_feature: MA Experiment 20001555 PARAMETER Experiment Name: At_Drought_Soil_Dry_P Parameter: Treatment Value: Drought vs. No Drought
  misc_feature: MA Experiment ID: 20001556 Result: Down-regulated in Transcription
  misc_feature: MA Experiment 20001556 PARAMETER Experiment Name: At_Drought_Soil_Dry_P Parameter: Age (day) Value: 26
  misc_feature: MA Experiment 20001556 PARAMETER Experiment Name: At_Drought_Soil_Dry_P Parameter: Organism Value: A. thaliana
  misc_feature: MA Experiment 20001556 PARAMETER Experiment Name: At_Drought_Soil_Dry_P Parameter: Plant Line Value: WS
  misc_feature: MA Experiment 20001556 PARAMETER Experiment Name: At_Drought_Soil_Dry_P Parameter: Post Timepoint (hr) Value: None
  misc_feature: MA Experiment 20001556 PARAMETER Experiment Name: At_Drought_Soil_Dry_P Parameter: Post-Treatment Value: None
  misc_feature: MA Experiment 20001556 PARAMETER Experiment Name: At_Drought_Soil_Dry_P Parameter: Timepoint (day) Value: 12
  misc_feature: MA Experiment 20001556 PARAMETER Experiment Name: At_Drought_Soil_Dry_P Parameter: Treatment Value: Drought vs. No Drought
  misc_feature: MA Experiment ID: 20001557 Result: Down-regulated in Transcription
  misc_feature: MA Experiment 20001557 PARAMETER Experiment Name: At_Drought_Soil_Dry_P Parameter: Age (day) Value: 27
  misc_feature: MA Experiment 20001557 PARAMETER Experiment Name: At_Drought_Soil_Dry_P Parameter: Organism Value: A. thaliana
  misc_feature: MA Experiment 20001557 PARAMETER Experiment Name: At_Drought_Soil_Dry_P Parameter: Plant Line Value: WS
  misc_feature: MA Experiment 20001557 PARAMETER Experiment Name: At_Drought_Soil_Dry_P Parameter: Post Timepoint (hr) Value: 3
  misc_feature: MA Experiment 20001557 PARAMETER Experiment Name: At_Drought_Soil_Dry_P Parameter: Post-Treatment Value: Re-Water vs. No Drought
  misc_feature: MA Experiment 20001557 PARAMETER Experiment Name: At_Drought_Soil_Dry_P Parameter: Timepoint (day) Value: 13
  misc_feature: MA Experiment 20001557 PARAMETER Experiment Name: At_Drought_Soil_Dry_P Parameter: Treatment Value: Drought vs. No Drought
  misc_feature: MA Experiment ID: 20001558 Result: Down-regulated in Transcription
  misc_feature: MA Experiment 20001558 PARAMETER Experiment Name: At_Drought_Soil_Dry_P Parameter: Age (day) Value: 27
  misc_feature: MA Experiment 20001558 PARAMETER Experiment Name: At_Drought_Soil_Dry_P Parameter: Organism Value: A. thaliana
  misc_feature: MA Experiment 20001558 PARAMETER Experiment Name: At_Drought_Soil_Dry_P Parameter: Plant Line Value: WS
  misc_feature: MA Experiment 20001558 PARAMETER Experiment Name: At_Drought_Soil_Dry_P Parameter: Post Timepoint (hr) Value: 6
  misc_feature: MA Experiment 20001558 PARAMETER Experiment Name: At_Drought_Soil_Dry_P Parameter: Post-Treatment Value: Re-Water vs. No Drought
  misc_feature: MA Experiment 20001558 PARAMETER Experiment Name: At_Drought_Soil_Dry_P Parameter: Timepoint (day) Value: 13
  misc_feature: MA Experiment 20001558 PARAMETER Experiment Name: At_Drought_Soil_Dry_P Parameter: Treatment Value: Drought vs. No Drought
  misc_feature: MA Experiment ID: 20001559 Result: Down-regulated in Transcription
  misc_feature: MA Experiment 20001559 PARAMETER Experiment Name: At_Drought_Soil_Dry_P Parameter: Age (day) Value: 28
  misc_feature: MA Experiment 20001559 PARAMETER Experiment Name: At_Drought_Soil_Dry_P Parameter: Organism Value: A. thaliana
  misc_feature: MA Experiment 20001559 PARAMETER Experiment Name: At_Drought_Soil_Dry_P Parameter: Plant Line Value: WS
  misc_feature: MA Experiment 20001559 PARAMETER Experiment Name: At_Drought_Soil_Dry_P Parameter: Post Timepoint (hr) Value: 29
  misc_feature: MA Experiment 20001559 PARAMETER Experiment Name: At_Drought_Soil_Dry_P Parameter: Post-Treatment Value: Re-Water vs. No Drought
  misc_feature: MA Experiment 20001559 PARAMETER Experiment Name: At_Drought_Soil_Dry_P Parameter: Timepoint (day) Value: 14
  misc_feature: MA Experiment 20001559 PARAMETER Experiment Name: At_Drought_Soil_Dry_P Parameter: Treatment Value: Drought vs. No Drought
  misc_feature: MA Experiment ID: 20001560 Result: Down-regulated in Transcription
  misc_feature: MA Experiment 20001560 PARAMETER Experiment Name: At_Drought_Soil_Dry_P Parameter: Age (day) Value: 28
  misc_feature: MA Experiment 20001560 PARAMETER Experiment Name: At_Drought_Soil_Dry_P Parameter: Organism Value: A. thaliana
  misc_feature: MA Experiment 20001560 PARAMETER Experiment Name: At_Drought_Soil_Dry_P Parameter: Plant Line Value: WS
  misc_feature: MA Experiment 20001560 PARAMETER Experiment Name: At_Drought_Soil_Dry_P Parameter: Post Timepoint (hr) Value: None
  misc_feature: MA Experiment 20001560 PARAMETER Experiment Name: At_Drought_Soil_Dry_P Parameter: Post-Treatment Value: None
  misc_feature: MA Experiment 20001560 PARAMETER Experiment Name: At_Drought_Soil_Dry_P Parameter: Timepoint (day) Value: 14
  misc_feature: MA Experiment 20001560 PARAMETER Experiment Name: At_Drought_Soil_Dry_P Parameter: Treatment Value: Drought vs. No Drought
  misc_feature: MA Experiment ID: 20001757 Result: Up-regulated in Transcription
  misc_feature: MA Experiment 20001757 PARAMETER Experiment Name: At_50mM_NH4NO3_L-to-H_P Parameter: Timepoint (hr) Value: 6
  misc_feature: MA Experiment 20001757 PARAMETER Experiment Name: At_50mM_NH4NO3_L-to-H_P Parameter: Tissue Value: Leaf
  misc_feature: MA Experiment 20001757 PARAMETER Experiment Name: At_50mM_NH4NO3_L-to-H_P Parameter: Treatment Value: 50mM NH4NO3 vs 100mM Mannitol
  misc_feature: MA Experiment ID: 20001759 Result: Up-regulated in Transcription
  misc_feature: MA Experiment 20001759 PARAMETER Experiment Name: At_50mM_NH4NO3_L-to-H_P Parameter: Timepoint (hr) Value: 1
  misc_feature: MA Experiment 20001759 PARAMETER Experiment Name: At_50mM_NH4NO3_L-to-H_P Parameter: Tissue Value: Siliques
  misc_feature: MA Experiment 20001759 PARAMETER Experiment Name: At_50mM_NH4NO3_L-to-H_P Parameter: Treatment Value: 50mM NH4NO3 vs 100mM Mannitol
attcacaataaaccagcgtcggcccaccgcatcccaaaccataacgcttaatccttaaaaaccgtccagatccatttccttcctctaaaactcatcacacacacttctaatggcttcttcttcttgtttgaatctcttcttcttctcttttctctccgctctaatcatttctaaatctcagatctctgattccgttaacggggtcgttttccctgttgttaaagaccttccaaccggtcaatacctcgcacagattcgactcggtgactcaccggatccagtcaagctcgtagtcgatctggccggctcaattctctggtttgattgttcctcaagacatgtttcctcgtcaaggaacctaatatccggtagctctagcggctgcttaaaggcaaaagttggaaatgaacgagtatcatcatcatcatcatcgcgtaaagaccaaaacgccgattgcgaattacttgttaaaaacgacgcctttgggattacggcgagaggagagcttttcagtgacgtcatgtcggttggctctgttacttctccgggaaccgttgatctacttttcgcttgtactccaccgtggctgttacgtgggctcgctagtggagcccaaggagtaatgggcttaggaagggcccaaatctcactcccttcacaactcgccgcggaaactaacgaacgtcgtcggttaactgtttacctgtcgccgttgaacggtgtcgtatcaacgagttcggtggaggaggtttttggagtggctgcgtctagatcgctggtttacacgcctttgttaaccggttcgagtggcaactacgtaattaacgtgaaatcgattagagtcaacggggaaaagctctccgtggaaggtccgttggcggtggagctgagcacggtggttccttacacgattttagagagctcgatctacaaggtgttcgcggaagcttacgccaaagctgcgggtgaagctacatcggtgcctcctgtcgcaccgtttgggctctgcttcactagtgacgtagattttccggcggtagatctagcgttgcagagtgagatggtgcggtggaggattcatgggaagaatctgatggtggatgttggtggtggagtccgatgctcggggattgttgacggcgggtcaagtcgagtcaacccgattgtaatgggtgggctacaattagaaggctttatattggactttgatttgggtaactcaatgatgggctttggacaaagaacacgctctgattcaacttcgttgtaatacagaaacctttgtaattgtaaccttctaattatctggtagatatcctcaattttgatc

SEQ ID NO: 98530 - protein, 386 aa, Arabidopsis thaliana; identical to SEQ ID NO: 25101
  peptide (1)..(386): Ceres Seq. ID no. 13600953
  misc_feature (26)..(216): Pfam Name: Eukaryotic aspartyl protease Pfam Description: Eukaryotic aspartyl protease
  misc_feature (1)..(386): Homolog of NCBI NO: 15239656 NR Description: conglutin gamma - like protein [Arabidopsis >gi|15010798|gb|AAK74058.1| AT5g19120/T24G5_20 [Arabidopsis >gi|15810069|gb|AAL06960.1| AT5g19120/T24G5_20 [Arabidopsis
  misc_feature (1)..(200): Homolog of NCBI NO: 27372527 NR Description: xyloglucan-specific fungal endoglucanase
  misc_feature (238)..(375): Homolog of NCBI NO: 27372527 NR Description: xyloglucan-specific fungal endoglucanase
  misc_feature (1)..(206): Homolog of NCBI NO: 32482806 NR Description: putative xyloglucanase inhibitor [Solanum
  misc_feature (238)..(375): Homolog of NCBI NO: 32482806 NR Description: putative xyloglucanase inhibitor [Solanum
  misc_feature (5)..(278): Homolog of NCBI NO: 21537233 NR Description: EDGP precursor [Arabidopsis thaliana]
  misc_feature (241)..(375): Homolog of NCBI NO: 21537233 NR Description: EDGP precursor [Arabidopsis thaliana]
  misc_feature (1)..(284): Homolog of NCBI NO: 18379072 NR Description: expressed protein [Arabidopsis thaliana]
  misc_feature (259)..(375): Homolog of NCBI NO: 18379072 NR Description: expressed protein [Arabidopsis thaliana]
  misc_feature (30)..(246): Homolog of NCBI NO: 11558383 NR Description: conglutin gamma [Lupinus albus]

SEQ ID NO: 98531 - protein, 249 aa, Arabidopsis thaliana; identical to SEQ ID NO: 25102
  peptide (1)..(249): Ceres Seq. ID no. 13600954
  misc_feature (1)..(79): Pfam Name: Eukaryotic aspartyl protease Pfam Description: Eukaryotic aspartyl protease
  misc_feature (1)..(249): Homolog of NCBI NO: 15239656 NR Description: conglutin gamma - like protein [Arabidopsis >gi|15010798|gb|AAK74058.1| AT5g19120/T24G5_20 [Arabidopsis >gi|15810069|gb|AAL06960.1| AT5g19120/T24G5_20 [Arabidopsis
  misc_feature (1)..(63): Homolog of NCBI NO: 27372527 NR Description: xyloglucan-specific fungal endoglucanase
  misc_feature (101)..(238): Homolog of NCBI NO: 27372527 NR Description: xyloglucan-specific fungal endoglucanase
  misc_feature (1)..(69): Homolog of NCBI NO: 32482806 NR Description: putative xyloglucanase inhibitor [Solanum
  misc_feature (101)..(238): Homolog of NCBI NO: 32482806 NR Description: putative xyloglucanase inhibitor [Solanum
  misc_feature (1)..(141): Homolog of NCBI NO: 21537233 NR Description: EDGP precursor [Arabidopsis thaliana]
  misc_feature (104)..(238): Homolog of NCBI NO: 21537233 NR Description: EDGP precursor [Arabidopsis thaliana]
  misc_feature (1)..(147): Homolog of NCBI NO: 18379072 NR Description: expressed protein [Arabidopsis thaliana]
  misc_feature (122)..(238): Homolog of NCBI NO: 18379072 NR Description: expressed protein [Arabidopsis thaliana]
  misc_feature (1)..(109): Homolog of NCBI NO: 11558383 NR Description: conglutin gamma [Lupinus albus]

SEQ ID NO: 98532 - protein, 215 aa, Arabidopsis thaliana; identical to SEQ ID NO: 25103
  peptide (1)..(215): Ceres Seq. ID no. 13600955
  misc_feature (89)..(204): Pfam Name: Eukaryotic aspartyl protease Pfam Description: Eukaryotic aspartyl protease
  misc_feature (1)..(215): Homolog of NCBI NO: 15239656 NR Description: conglutin gamma - like protein [Arabidopsis >gi|15010798|gb|AAK74058.1| AT5g19120/T24G5_20 [Arabidopsis >gi|15810069|gb|AAL06960.1| AT5g19120/T24G5_20 [Arabidopsis
  misc_feature (1)..(29): Homolog of NCBI NO: 27372527 NR Description: xyloglucan-specific fungal endoglucanase
  misc_feature (67)..(204): Homolog of NCBI NO: 27372527 NR Description: xyloglucan-specific fungal endoglucanase
  misc_feature (1)..(35): Homolog of NCBI NO: 32482806 NR Description: putative xyloglucanase inhibitor [Solanum
  misc_feature (67)..(204): Homolog of NCBI NO: 32482806 NR Description: putative xyloglucanase inhibitor [Solanum
  misc_feature (1)..(107): Homolog of NCBI NO: 21537233 NR Description: EDGP precursor [Arabidopsis thaliana]
  misc_feature (70)..(204): Homolog of NCBI NO: 21537233 NR Description: EDGP precursor [Arabidopsis thaliana]
  misc_feature (1)..(113): Homolog of NCBI NO: 18379072 NR Description: expressed protein [Arabidopsis thaliana]
  misc_feature (88)..(204): Homolog of NCBI NO: 18379072 NR Description: expressed protein [Arabidopsis thaliana]
  misc_feature (1)..(75): Homolog of NCBI NO: 11558383 NR Description: conglutin gamma [Lupinus albus]

SEQ ID NO: 98533 - DNA, 1376 bp, Arabidopsis thaliana
  misc_feature (1)..(1376): Ceres Seq. ID no. 13600960
  misc_feature: MA Experiment ID: 108434 Result: Up-regulated in Transcription
  misc_feature: MA Experiment 108434 PARAMETER Experiment Name: At_Root_Tips_cDNA_P Parameter: Tissue Value: Root Tips
  misc_feature: MA Experiment ID: 108576 Result: Up-regulated in Transcription
  misc_feature: MA Experiment 108576 PARAMETER Experiment Name: At_42deg_Heat_cDNA_P Parameter: Temperature (deg C) Value: 42 vs. 22
  misc_feature: MA Experiment 108576 PARAMETER Experiment Name: At_42deg_Heat_cDNA_P Parameter: Timepoint (hr) Value: 1
  misc_feature: MA Experiment 108576 PARAMETER Experiment Name: At_42deg_Heat_cDNA_P Parameter: Tissue Value: Aerial
  misc_feature: MA Experiment ID: 108577 Result: Up-regulated in Transcription
  misc_feature: MA Experiment 108577 PARAMETER Experiment Name: At_42deg_Heat_cDNA_P Parameter: Temperature (deg C) Value: 42 vs. 22
  misc_feature: MA Experiment 108577 PARAMETER Experiment Name: At_42deg_Heat_cDNA_P Parameter: Timepoint (hr) Value: 6
  misc_feature: MA Experiment 108577 PARAMETER Experiment Name: At_42deg_Heat_cDNA_P Parameter: Tissue Value: Aerial
  misc_feature: MA Experiment ID: 108585 Result: Up-regulated in Transcription
  misc_feature: MA Experiment 108585 PARAMETER Experiment Name: At_5mM_NaNP_cDNA_P Parameter: Timepoint (hr) Value: 6
  misc_feature: MA Experiment 108585 PARAMETER Experiment Name: At_5mM_NaNP_cDNA_P Parameter: Tissue Value: Aerial
  misc_feature: MA Experiment 108585 PARAMETER Experiment Name: At_5mM_NaNP_cDNA_P Parameter: Treatment Value: null
  misc_feature: MA Experiment ID: 20000093 Result: Up-regulated in Transcription
  misc_feature: MA Experiment 20000093 PARAMETER Experiment Name: At_42deg_Heat_cDNA_P Parameter: Temperature (deg C) Value: 42 vs. 22
  misc_feature: MA Experiment 20000093 PARAMETER Experiment Name: At_42deg_Heat_cDNA_P Parameter: Timepoint (hr) Value: 0.5
  misc_feature: MA Experiment 20000093 PARAMETER Experiment Name: At_42deg_Heat_cDNA_P Parameter: Tissue Value: Aerial
  misc_feature: MA Experiment ID: 20000171 Result: Up-regulated in Transcription
  misc_feature: MA Experiment 20000171 PARAMETER Experiment Name: At_42deg_Heat_P Parameter: Age (day) Value: 14
  misc_feature: MA Experiment 20000171 PARAMETER Experiment Name: At_42deg_Heat_P Parameter: Organism Value: A. thaliana
  misc_feature: MA Experiment 20000171 PARAMETER Experiment Name: At_42deg_Heat_P Parameter: Plant Line Value: WS
  misc_feature: MA Experiment 20000171 PARAMETER Experiment Name: At_42deg_Heat_P Parameter: Temperature (deg C) Value: 42 vs. 22
  misc_feature: MA Experiment 20000171 PARAMETER Experiment Name: At_42deg_Heat_P Parameter: Timepoint (hr) Value: 1
  misc_feature: MA Experiment 20000171 PARAMETER Experiment Name: At_42deg_Heat_P Parameter: Tissue Value: Aerial
  misc_feature: MA Experiment ID: 20000173 Result: Up-regulated in Transcription
  misc_feature: MA Experiment 20000173 PARAMETER Experiment Name: At_42deg_Heat_P Parameter: Age (day) Value: 14
  misc_feature: MA Experiment 20000173 PARAMETER Experiment Name: At_42deg_Heat_P Parameter: Organism Value: A. thaliana
  misc_feature: MA Experiment 20000173 PARAMETER Experiment Name: At_42deg_Heat_P Parameter: Plant Line Value: WS
  misc_feature: MA Experiment 20000173 PARAMETER Experiment Name: At_42deg_Heat_P Parameter: Temperature (deg C) Value: 42 vs. 22
  misc_feature: MA Experiment 20000173 PARAMETER Experiment Name: At_42deg_Heat_P Parameter: Timepoint (hr) Value: 6
  misc_feature: MA Experiment 20000173 PARAMETER Experiment Name: At_42deg_Heat_P Parameter: Tissue Value: Aerial
  misc_feature: MA Experiment ID: 20000443 Result: Up-regulated in Transcription
  misc_feature: MA Experiment 20000443 PARAMETER Experiment Name: At_1uM_BR-BRZ__P Parameter: Tissue Value: Shoot Apices
  misc_feature: MA Experiment 20000443 PARAMETER Experiment Name: At_1uM_BR-BRZ__P Parameter: Treatment Value: 1uM BRZ vs. No Treatment
  misc_feature: MA Experiment ID: 20001248 Result: Down-regulated in Transcription
  misc_feature: MA Experiment 20001248 PARAMETER Experiment Name: At_Far-red-induction_P Parameter: Age (day) Value: 7
  misc_feature: MA Experiment 20001248 PARAMETER Experiment Name: At_Far-red-induction_P Parameter: Light Value: Far-red vs. White
  misc_feature: MA Experiment 20001248 PARAMETER Experiment Name: At_Far-red-induction_P Parameter: Organism Value: A. thaliana
  misc_feature: MA Experiment 20001248 PARAMETER Experiment Name: At_Far-red-induction_P Parameter: Plant Line Value: Columbia
  misc_feature: MA Experiment 20001248 PARAMETER Experiment Name: At_Far-red-induction_P Parameter: Timepoint (hr) Value: 4
  misc_feature: MA Experiment 20001248 PARAMETER Experiment Name: At_Far-red-induction_P Parameter: Tissue Value: Whole Plant
aaattgtccccaaaaaaaaaaaaaaaaagtttctagaggcttcgttagcctaattcattaactaggttctcctagtttctgctgctaattcccaaatctcagcgaaatcaaacttctctgctctgcttagctctcagctagctgaaatctctctcaatccgtgtagcttagcttccctaatccaaccatggcaaagttcggtgaaggtgacaagagatggatcgtagaagacagacctgacggcaccaacgtccataactggcactggtccgaaaccaattgccttgaatggtctcgcaacttcttcaccaaacaattctccggcgttgatatcctctccggcgaaggtaatcttttcatcaaggtcagtaagatcgagaaagtcgaaggcgaggcttatgtgaatgtgaggaaggggaagattatccctggctacgagcttaacgtctctttatcttgggaaggtgaggctaaagattccgatgggaagacgcttttgaaagctgatggattggtcgatatgccttatatctccgatgagaatgctgatgaagatccggagattaggttttcggtgaaggatgagggaccgattgggaggactttgaaggaagcgatggtgaagaaggggaaggagattattctggagaaggttagggtttatgtggaggctatggcgagaggaggcccgtgtagggatgaattggaatcgaagaaggttgcgccgaaatcggtagcggctggatcagctacggtggcggtggagaagtctggtgctgccccggtggtgtctgctgctgcggtggagagtaaggtagttaaggagaagaagaaggcgaagactaaggaagggtttaagacaattactatgaccgagaagtttaattgcagagctagggatttgtatgagattttaatggatgagaatcgttggaaaggttttacgcagagtaatgctaagattagtaaagatgtgaatggtccgattagtgtctttgatgggtctgttactggaatgaatcttgagcttgaagaaggcaaattgattgttcagaagtggagatttgggagctggcctgatggtcttgattcaacggtgaagatcgttttcgaggagcctcaaccaggagtcaccattgtcaatcttactcacactgacgttcctgaagaggacagatacgggaatgcgactgtggtggaaaacactgagagaggatggagagatcttatattccataggatccgtgcagttttcggatttggaatatgaacttatgattttgattatcaaataagttgattatgatttggaccgataaccaatgcaaaatgtatgattttaaagtttttcagttttagttaatgcatttcccttg

SEQ ID NO: 98534 - protein, 360 aa, Arabidopsis thaliana
  peptide (1)..(360): Ceres Seq. ID no. 13600961
  misc_feature (221)..(360): Pfam Name: Aha1 domain Pfam Description: Aha1 domain
  misc_feature (1)..(360): Homolog of NCBI NO: 18399461 NR Description: expressed protein [Arabidopsis thaliana]
  misc_feature (1)..(360): Homolog of NCBI NO: 21539453 NR Description: unknown protein [Arabidopsis thaliana]
  misc_feature (89)..(360): Homolog of NCBI NO: 30682028 NR Description: expressed protein [Arabidopsis thaliana]
  misc_feature (1)..(54): Homolog of NCBI NO: 30682028 NR Description: expressed protein [Arabidopsis thaliana]
  misc_feature (1)..(359): Homolog of NCBI NO: 24585720 NR Description: CG1416-PA [Drosophila melanogaster]
  misc_feature (1)..(326): Homolog of NCBI NO: 40786381 NR Description: Bm44 [Bombyx mori]
  misc_feature (1)..(258): Homolog of NCBI NO: 31211041 NR Description: ENSANGP00000020586 [Anopheles gambiae]
  misc_feature (1)..(326): Homolog of NCBI NO: 39583346 NR Description: Hypothetical protein CBG11571 [Caenorhabditis
  misc_feature (1)..(326): Homolog of NCBI NO: 17557460 NR Description: Putative cytoplasmic protein of eukaryotic origin
  misc_feature (1)..(200): Homolog of NCBI NO: 39850089 NR Description: RIKEN cDNA 1110064P04 [Mus musculus]
MAKFGEGDKRWIVEDRPDGTNVHNWHWSETNCLEWSRNFFTKQFSGVDILSGEGNLFIKVSKIEKVEGEAYVNVRKGKIIPGYELNVSLSWEGEAKDSDGKTLLKADGLVDMPYISDENADEDPEIRFSVKDEGPIGRTLKEAMVKKGKEIILEKVRVYVEAMARGGPCRDELESKKVAPKSVAAGSATVAVEKSGAAPVVSAAAVESKVVKEKKKAKTKEGFKTITMTEKFNCRARDLYEILMDENRWKGFTQSNAKISKDVNGPISVFDGSVTGMNLELEEGKLIVQKWRFGSWPDGLDSTVKIVFEEPQPGVTIVNLTHTDVPEEDRYGNATVVENTERGWRDLIFHRIRAVFGFGI

SEQ ID NO: 98535 - protein, 249 aa, Arabidopsis thaliana
  peptide (1)..(249): Ceres Seq. ID no. 13600962
  misc_feature (110)..(249): Pfam Name: Aha1 domain Pfam Description: Aha1 domain
  misc_feature (1)..(249): Homolog of NCBI NO: 18399461 NR Description: expressed protein [Arabidopsis thaliana]
  misc_feature (1)..(249): Homolog of NCBI NO: 21539453 NR Description: unknown protein [Arabidopsis thaliana]
  misc_feature (1)..(249): Homolog of NCBI NO: 30682028 NR Description: expressed protein [Arabidopsis thaliana]
  misc_feature (1)..(248): Homolog of NCBI NO: 24585720 NR Description: CG1416-PA [Drosophila melanogaster]
  misc_feature (1)..(215): Homolog of NCBI NO: 40786381 NR Description: Bm44 [Bombyx mori]
  misc_feature (1)..(147): Homolog of NCBI NO: 31211041 NR Description: ENSANGP00000020586 [Anopheles gambiae]
  misc_feature (1)..(215): Homolog of NCBI NO: 39583346 NR Description: Hypothetical protein CBG11571 [Caenorhabditis
  misc_feature (1)..(215): Homolog of NCBI NO: 17557460 NR Description: Putative cytoplasmic protein of eukaryotic origin
  misc_feature (1)..(89): Homolog of NCBI NO: 39850089 NR Description: RIKEN cDNA 1110064P04 [Mus musculus]
  misc_feature (1)..(89): Homolog of NCBI NO: 31982558 NR Description: RIKEN cDNA 1110064P04 [Mus musculus]
MPYISDENADEDPEIRFSVKDEGPIGRTLKEAMVKKGKEIILEKVRVYVEAMARGGPCRDELESKKVAPKSVAAGSATVAVEKSGAAPVVSAAAVESKVVKEKKKAKTKEGFKTITMTEKFNCRARDLYEILMDENRWKGFTQSNAKISKDVNGPISVFDGSVTGMNLELEEGKLIVQKWRFGSWPDGLDSTVKIVFEEPQPGVTIVNLTHTDVPEEDRYGNATVVENTERGWRDLIFHRIRAVFGFGI

SEQ ID NO: 98536 - protein, 217 aa, Arabidopsis thaliana
  peptide (1)..(217): Ceres Seq. ID no. 13600963
  misc_feature (78)..(217): Pfam Name: Aha1 domain Pfam Description: Aha1 domain
  misc_feature (1)..(217): Homolog of NCBI NO: 18399461 NR Description: expressed protein [Arabidopsis thaliana]
  misc_feature (1)..(217): Homolog of NCBI NO: 21539453 NR Description: unknown protein [Arabidopsis thaliana]
  misc_feature (1)..(217): Homolog of NCBI NO: 30682028 NR Description: expressed protein [Arabidopsis thaliana]
  misc_feature (1)..(216): Homolog of NCBI NO: 24585720 NR Description: CG1416-PA [Drosophila melanogaster]
  misc_feature (1)..(183): Homolog of NCBI NO: 40786381 NR Description: Bm44 [Bombyx mori]
  misc_feature (1)..(115): Homolog of NCBI NO: 31211041 NR Description: ENSANGP00000020586 [Anopheles gambiae]
  misc_feature (1)..(183): Homolog of NCBI NO: 39583346 NR Description: Hypothetical protein CBG11571 [Caenorhabditis
  misc_feature (1)..(183): Homolog of NCBI NO: 17557460 NR Description: Putative cytoplasmic protein of eukaryotic origin
  misc_feature (1)..(57): Homolog of NCBI NO: 39850089 NR Description: RIKEN cDNA 1110064P04 [Mus musculus]
  misc_feature (1)..(57): Homolog of NCBI NO: 31982558 NR Description: RIKEN cDNA 1110064P04 [Mus musculus]
MVKKGKEIILEKVRVYVEAMARGGPCRDELESKKVAPKSVAAGSATVAVEKSGAAPVVSAAAVESKVVKEKKKAKTKEGFKTITMTEKFNCRARDLYEILMDENRWKGFTQSNAKISKDVNGPISVFDGSVTGMNLELEEGKLIVQKWRFGSWPDGLDSTVKIVFEEPQPGVTIVNLTHTDVPEEDRYGNATVVENTERGWRDLIFHRIRAVFGFGI

SEQ ID NO: 98537 - DNA, 1667 bp, Arabidopsis thaliana
  misc_feature (1)..(1667): Ceres Seq. ID no. 13600968
  misc_feature: MA Experiment ID: 108573 Result: Up-regulated in Transcription
  misc_feature: MA Experiment 108573 PARAMETER Experiment Name: At_Drought_cDNA_P Parameter: Timepoint (hr) Value: 6
  misc_feature: MA Experiment 108573 PARAMETER Experiment Name: At_Drought_cDNA_P Parameter: Tissue Value: Aerial
  misc_feature: MA Experiment 108573 PARAMETER Experiment Name: At_Drought_cDNA_P Parameter: Treatment Value: Drought vs. No Drought
  misc_feature: MA Experiment ID: 108595 Result: Down-regulated in Transcription
  misc_feature: MA Experiment 108595 PARAMETER Experiment Name: At_Ler-pi_Ovule_cDNA_P Parameter: Plant Line Value: null
  misc_feature: MA Experiment ID: 20000184 Result: Down-regulated in Transcription
  misc_feature: MA Experiment 20000184 PARAMETER Experiment Name: At_Shoots__P Parameter: Age (day) Value: 7
  misc_feature: MA Experiment 20000184 PARAMETER Experiment Name: At_Shoots__P Parameter: Tissue Value: Shoots vs. Whole Plant
gttgattttagtatttgccgaagttggaactttaagatcaaagaagaaaatggagagatccatttcctttaatcctcgaggcgataacgagctccctgatgatcggagcagcgatgtcggatatgctgctaatgatcggaggcttgcttattctcgctcgtttcagcaatctcacggtccacgaacgccggcggtcacggaagcggctaagccttttctcgataggacggtctcgagcatcgatatgccgccggatatttactccgttgatggaagtgatgtgtttttcggggaagggaaagatgtagacatggcaaaagtgtctgttttggaaatggtttgggaggtttttggagtagtgacaagtggaaatcggcagatgaagagactgtttctgctaattgcgcttaatgtgttgtattctacaacagagctctctattggtatcttcactggtcgtgtaggtttggtctctgatgcattccatttgacatttggttgtggtctcttgacattttctttatttgcaatggcaacttcaaggaagaagcctgatcatgcttactcatacgggtacaaaagacttgaagttttatctgctttcactaatgctacagctgttccttatgttcatgtcattctccttagctgtggaagctcttcatgcatttatacaagatgaatcagagcataagcattatttgattgtatcagcggtaacaaatctgctggtgaacctactaggtgtttggtttttccggaattatgctcgtgtcaatattgcctttgttggtggctttggtattcatttgtagaaattggccacccttgtcagttttcgctttaaagccaaagaagtaagggtgtttggttaagatagaatcagtacgaagattagttgaaagagagagtcagcataattgtaactgatctgtcaaacgactattcgttgcttcttgaaattatctgtcccttctttacatatctaaaaaccacatgttatcttgaatttttttcttatattcataatatgcaatatgctgcagcctacagaaaagcagaagatatgaattatcactccgtttgcttgcacgtcatatcagattccatccgcagtgcaggtttgatactggcatcttggctcctctcgctcggggttgaaaatgcagaggtcctatgtttaggattggtatcggtcacagtgtttatgcttgttatgccactcttcaaagccactggtggtgtcttgcttcagatggcacccccaaacattccttcttctgctttaagcaaatgcttgcgacagattacttctcgagaagatgtaacggaggttttacaggcacgtttctgggaggttgtgcctggtcacactgttggctcactcagactccaggtgaagagcggaatagatgaaagaccattactgcaatatgtatatgatgtataccatgatttgggtgtacaagacttgaccctgcaaactgattacacctaagctgcatctgcctcttctttgtttttaaatgctgatttgaagatttttggatgtatactagagatcatggttctttaggaatataaatattgtgaattttcaagttgtgactttgtgatattgttttgtttgtttttcatttatgtgaattttcaaccacacaaagacc

SEQ ID NO: 98538 - protein, 226 aa, Arabidopsis thaliana
  peptide (1)..(226): Ceres Seq. ID no. 13600969
  misc_feature (130)..(214): Pfam Name: Cation efflux family Pfam Description: Cation efflux family
  misc_feature (17)..(214): Homolog of NCBI NO: 15229954 NR Description: cation efflux family protein/metal tolerance putative [Arabidopsis thaliana]
  misc_feature (17)..(214): Homolog of NCBI NO: 9294107 NR Description: contains similarity to cation
  misc_feature (100)..(218): Homolog of NCBI NO: 28278399 NR Description: Similar to RIKEN cDNA 1810059J10 gene [Danio
  misc_feature (100)..(225): Homolog of NCBI NO: 39645387 NR Description: Unknown (protein for MGC:76189) [Silurana
  misc_feature (128)..(203): Homolog of NCBI NO: 13182751 NR Description: putative disease resistance protein [Homo sapiens]
  misc_feature (87)..(203): Homolog of NCBI NO: 37537241 NR Description: Slc30a5 protein [Mus musculus]
  misc_feature (124)..(216): Homolog of NCBI NO: 31209583 NR Description: ENSANGP00000017072 [Anopheles gambiae]
  misc_feature (87)..(203): Homolog of NCBI NO: 26352918 NR Description: unnamed protein product [Mus musculus]
  misc_feature (87)..(203): Homolog of NCBI NO: 34853639 NR Description: similar to zinc transporter 5 [Rattus norvegicus]
  misc_feature (87)..(203): Homolog of NCBI NO: 10434017 NR Description: unnamed protein product [Homo sapiens]
LILVFAEVGTLRSKKKMERSISFNPRGDNELPDDRSSDVGYAANDRRLAYSRSFQQSHGPRTPAVTEAAKPFLDRTVSSIDMPPDIYSVDGSDVFFGEGKDVDMAKVSVLEMVWEVFGVVTSGNRQMKRLFLLIALNVLYSTTELSIGIFTGRVGLVSDAFHLTFGCGLLTFSLFAMATSRKKPDHAYSYGYKRLEVLSAFTNATAVPYVHVILLSCGSSSCIYTR

SEQ ID NO: 98539 - protein, 210 aa, Arabidopsis thaliana
  peptide (1)..(210): Ceres Seq. ID no. 13600970
  misc_feature (114)..(198): Pfam Name: Cation efflux family Pfam Description: Cation efflux family
  misc_feature (1)..(198): Homolog of NCBI NO: 15229954 NR Description: cation efflux family protein/metal tolerance putative [Arabidopsis thaliana]
  misc_feature (1)..(198): Homolog of NCBI NO: 9294107 NR Description: contains similarity to cation
  misc_feature (84)..(202): Homolog of NCBI NO: 28278399 NR Description: Similar to RIKEN cDNA 1810059J10 gene [Danio
  misc_feature (84)..(209): Homolog of NCBI NO: 39645387 NR Description: Unknown (protein for MGC:76189) [Silurana
  misc_feature (112)..(187): Homolog of NCBI NO: 13182751 NR Description: putative disease resistance protein [Homo sapiens]
  misc_feature (71)..(187): Homolog of NCBI NO: 37537241 NR Description: Slc30a5 protein [Mus musculus]
  misc_feature (108)..(200): Homolog of NCBI NO: 31209583 NR Description: ENSANGP00000017072 [Anopheles gambiae]
  misc_feature (71)..(187): Homolog of NCBI NO: 26352918 NR Description: unnamed protein product [Mus musculus]
  misc_feature (71)..(187): Homolog of NCBI NO: 34853639 NR Description: similar to zinc transporter 5 [Rattus norvegicus]
  misc_feature (71)..(187): Homolog of NCBI NO: 10434017 NR Description: unnamed protein product [Homo sapiens]
MERSISFNPRGDNELPDDRSSDVGYAANDRRLAYSRSFQQSHGPRTPAVTEAAKPFLDRTVSSIDMPPDIYSVDGSDVFFGEGKDVDMAKVSVLEMVWEVFGVVTSGNRQMKRLFLLIALNVLYSTTELSIGIFTGRVGLVSDAFHLTFGCGLLTFSLFAMATSRKKPDHAYSYGYKRLEVLSAFTNATAVPYVHVILLSCGSSSCIYTR

SEQ ID NO: 98540 - protein, 155 aa, Arabidopsis thaliana; identical to SEQ ID NO: 25560
  peptide (1)..(155): Ceres Seq. ID no. 13600971
  misc_feature (6)..(155): Pfam Name: Cation efflux family Pfam Description: Cation efflux family
  misc_feature (6)..(155): Homolog of NCBI NO: 15229954 NR Description: cation efflux family protein/metal tolerance putative [Arabidopsis thaliana]
  misc_feature (6)..(155): Homolog of NCBI NO: 9294107 NR Description: contains similarity to cation
  misc_feature (18)..(153): Homolog of NCBI NO: 28278399 NR Description: Similar to RIKEN cDNA 1810059J10 gene [Danio
  misc_feature (18)..(153): Homolog of NCBI NO: 39645387 NR Description: Unknown (protein for MGC:76189) [Silurana
  misc_feature (14)..(153): Homolog of NCBI NO: 13182751 NR Description: putative disease resistance protein [Homo sapiens]
  misc_feature (14)..(153): Homolog of NCBI NO: 37537241 NR Description: Slc30a5 protein [Mus musculus]
  misc_feature (18)..(155): Homolog of NCBI NO: 31209583 NR Description: ENSANGP00000017072 [Anopheles gambiae]
  misc_feature (14)..(153): Homolog of NCBI NO: 26352918 NR Description: unnamed protein product [Mus musculus]
  misc_feature (14)..(153): Homolog of NCBI NO: 34853639 NR Description: similar to zinc transporter 5 [Rattus norvegicus]
  misc_feature (14)..(153): Homolog of NCBI NO: 10434017 NR Description: unnamed protein product [Homo sapiens]

SEQ ID NO: 98541 - DNA, 1416 bp, Arabidopsis thaliana
  misc_feature (1)..(1416): Ceres Seq. ID no. 13600972
  misc_feature: MA Experiment ID: 108434 Result: Up-regulated in Transcription
  misc_feature: MA Experiment 108434 PARAMETER Experiment Name: At_Root_Tips_cDNA_P Parameter: Tissue Value: Root Tips
  misc_feature: MA Experiment ID: 108461 Result: Up-regulated in Transcription
  misc_feature: MA Experiment 108461 PARAMETER Experiment Name: At_Germinating_Seeds_cDNA_P Parameter: Age (day) Value: 1 vs. 0
  misc_feature: MA Experiment 108461 PARAMETER Experiment Name: At_Germinating_Seeds_cDNA_P Parameter: Tissue Value: Germinating Seeds
  misc_feature: MA Experiment ID: 108462 Result: Up-regulated in Transcription
  misc_feature: MA Experiment 108462 PARAMETER Experiment Name: At_Germinating_Seeds_cDNA_P Parameter: Age (day) Value: 2 vs. 0
  misc_feature: MA Experiment 108462 PARAMETER Experiment Name: At_Germinating_Seeds_cDNA_P Parameter: Tissue Value: Germinating Seeds
  misc_feature: MA Experiment ID: 108463 Result: Up-regulated in Transcription
  misc_feature: MA Experiment 108463 PARAMETER Experiment Name: At_Germinating_Seeds_cDNA_P Parameter: Age (day) Value: 3 vs. 0
  misc_feature: MA Experiment 108463 PARAMETER Experiment Name: At_Germinating_Seeds_cDNA_P Parameter: Tissue Value: Germinating Seeds
  misc_feature: MA Experiment ID: 108464 Result: Up-regulated in Transcription
  misc_feature: MA Experiment 108464 PARAMETER Experiment Name: At_Germinating_Seeds_cDNA_P Parameter: Age (day) Value: 4 vs. 0
  misc_feature: MA Experiment 108464 PARAMETER Experiment Name: At_Germinating_Seeds_cDNA_P Parameter: Tissue Value: Germinating Seeds
  misc_feature: MA Experiment ID: 108576 Result: Down-regulated in Transcription
  misc_feature: MA Experiment 108576 PARAMETER Experiment Name: At_42deg_Heat_cDNA_P Parameter: Temperature (deg C) Value: 42 vs. 22
  misc_feature: MA Experiment 108576 PARAMETER Experiment Name: At_42deg_Heat_cDNA_P Parameter: Timepoint (hr) Value: 1
  misc_feature: MA Experiment 108576 PARAMETER Experiment Name: At_42deg_Heat_cDNA_P Parameter: Tissue Value: Aerial
  misc_feature: MA Experiment ID: 108594 Result: Down-regulated in Transcription
  misc_feature: MA Experiment 108594 PARAMETER Experiment Name: At_Ler-rhl_Root_cDNA_P Parameter: Plant Line Value: null
  misc_feature: MA Experiment ID: 20000070 Result: Down-regulated in Transcription
  misc_feature: MA Experiment 20000070 PARAMETER Experiment Name: At_100uM_ABA_Mutants_cDNA_P Parameter: Plant Line Value: CS24
  misc_feature: MA Experiment 20000070 PARAMETER Experiment Name: At_100uM_ABA_Mutants_cDNA_P Parameter: Timepoint (hr) Value: 6
  misc_feature: MA Experiment 20000070 PARAMETER Experiment Name: At_100uM_ABA_Mutants_cDNA_P Parameter: Tissue Value: Aerial
  misc_feature: MA Experiment 20000070 PARAMETER Experiment Name: At_100uM_ABA_Mutants_cDNA_P Parameter: Treatment Value: 100uM ABA vs. No Treatment
  misc_feature: MA Experiment ID: 20000087 Result: Down-regulated in Transcription
  misc_feature: MA Experiment 20000087 PARAMETER Experiment Name: At_100uM_ABA_Mutants_cDNA_P Parameter: Plant Line Value: WS
  misc_feature: MA Experiment 20000087 PARAMETER Experiment Name: At_100uM_ABA_Mutants_cDNA_P Parameter: Timepoint (hr) Value: 6
  misc_feature: MA Experiment 20000087 PARAMETER Experiment Name: At_100uM_ABA_Mutants_cDNA_P Parameter: Tissue Value: Aerial
  misc_feature: MA Experiment 20000087 PARAMETER Experiment Name: At_100uM_ABA_Mutants_cDNA_P Parameter: Treatment Value: 100uM ABA vs. No Treatment
  misc_feature: MA Experiment ID: 20000117 Result: Down-regulated in Transcription
  misc_feature: MA Experiment 20000117 PARAMETER Experiment Name: At_100uM_ABA_Mutants_cDNA_P Parameter: Plant Line Value: Columbia
  misc_feature: MA Experiment 20000117 PARAMETER Experiment Name: At_100uM_ABA_Mutants_cDNA_P Parameter: Timepoint (hr) Value: 6
  misc_feature: MA Experiment 20000117 PARAMETER Experiment Name: At_100uM_ABA_Mutants_cDNA_P Parameter: Tissue Value: Aerial
  misc_feature: MA Experiment 20000117 PARAMETER Experiment Name: At_100uM_ABA_Mutants_cDNA_P Parameter: Treatment Value: 100uM ABA vs. No Treatment
  misc_feature: MA Experiment ID: 20000179 Result: Up-regulated in Transcription
  misc_feature: MA Experiment 20000179 PARAMETER Experiment Name: At_Germinating_Seeds_P Parameter: Age (hr) Value: 6 vs. 0
  misc_feature: MA Experiment 20000179 PARAMETER Experiment Name: At_Germinating_Seeds_P Parameter: Tissue Value: Germinating Seeds
  misc_feature: MA Experiment ID: 20000180 Result: Up-regulated in Transcription
  misc_feature: MA Experiment 20000180 PARAMETER Experiment Name: At_Germinating_Seeds_P Parameter: Age (hr) Value: 24 vs. 0
  misc_feature: MA Experiment 20000180 PARAMETER Experiment Name: At_Germinating_Seeds_P Parameter: Tissue Value: Germinating Seeds
  misc_feature: MA Experiment ID: 20000182 Result: Down-regulated in Transcription
  misc_feature: MA Experiment 20000182 PARAMETER Experiment Name: At_2mM_SA_P Parameter: Age (day) Value: 14
  misc_feature: MA Experiment 20000182 PARAMETER Experiment Name: At_2mM_SA_P Parameter: Organism Value: A. thaliana
  misc_feature: MA Experiment 20000182 PARAMETER Experiment Name: At_2mM_SA_P Parameter: Plant Line Value: WS
  misc_feature: MA Experiment 20000182 PARAMETER Experiment Name: At_2mM_SA_P Parameter: Timepoint (hr) Value: 6
  misc_feature: MA Experiment 20000182 PARAMETER Experiment Name: At_2mM_SA_P Parameter: Tissue Value: Aerial
  misc_feature: MA Experiment 20000182 PARAMETER Experiment Name: At_2mM_SA_P Parameter: Treatment Value: 2mM SA vs. No Treatment
  misc_feature: MA Experiment ID: 20000184 Result: Up-regulated in Transcription
  misc_feature: MA Experiment 20000184 PARAMETER Experiment Name: At_Shoots__P Parameter: Age (day) Value: 7
  misc_feature: MA Experiment 20000184 PARAMETER Experiment Name: At_Shoots__P Parameter: Tissue Value: Shoots vs. Whole Plant
  misc_feature: MA Experiment ID: 20000234 Result: Up-regulated in Transcription
  misc_feature: MA Experiment 20000234 PARAMETER Experiment Name: At_Siliques_P Parameter: Age (day) Value: 21
  misc_feature: MA Experiment 20000234 PARAMETER Experiment Name: At_Siliques_P Parameter: Organism Value: A. thaliana
  misc_feature: MA Experiment 20000234 PARAMETER Experiment Name: At_Siliques_P Parameter: Plant Line Value: WS
  misc_feature: MA Experiment 20000234 PARAMETER Experiment Name: At_Siliques_P Parameter: Tissue Value: Less Than 5mm Siliques vs. Whole Plant
  misc_feature: MA Experiment ID: 20000235 Result: Up-regulated in Transcription
  misc_feature: MA Experiment 20000235 PARAMETER Experiment Name: At_Siliques_P Parameter: Age (day) Value: 21
  misc_feature: MA Experiment 20000235 PARAMETER Experiment Name: At_Siliques_P Parameter: Organism Value: A. thaliana
  misc_feature: MA Experiment 20000235 PARAMETER Experiment Name: At_Siliques_P Parameter: Plant Line Value: WS
  misc_feature: MA Experiment 20000235 PARAMETER Experiment Name: At_Siliques_P Parameter: Tissue Value: 5-10mm Siliques vs. Whole Plant
  misc_feature: MA Experiment ID: 20000437 Result: Down-regulated in Transcription
  misc_feature: MA Experiment 20000437 PARAMETER Experiment Name: At_Drought_P Parameter: Age (day) Value: 8
  misc_feature: MA Experiment 20000437 PARAMETER Experiment Name: At_Drought_P Parameter: Organism Value: A. thaliana
  misc_feature: MA Experiment 20000437 PARAMETER Experiment Name: At_Drought_P Parameter: Plant Line Value: WS
  misc_feature: MA Experiment 20000437 PARAMETER Experiment Name: At_Drought_P Parameter: Timepoint (hr) Value: 24
  misc_feature: MA Experiment 20000437 PARAMETER Experiment Name: At_Drought_P Parameter: Tissue Value: Whole Plant
  misc_feature: MA Experiment 20000437 PARAMETER Experiment Name: At_Drought_P Parameter: Treatment Value: Drought vs. No Drought
  misc_feature: MA Experiment ID: 20001248 Result: Down-regulated in Transcription
  misc_feature: MA Experiment 20001248 PARAMETER Experiment Name: At_Far-red-induction_P Parameter: Age (day) Value: 7
  misc_feature: MA Experiment 20001248 PARAMETER Experiment Name: At_Far-red-induction_P Parameter: Light Value: Far-red vs. White
  misc_feature: MA Experiment 20001248 PARAMETER Experiment Name: At_Far-red-induction_P Parameter: Organism Value: A. thaliana
  misc_feature: MA Experiment 20001248 PARAMETER Experiment Name: At_Far-red-induction_P Parameter: Plant Line Value: Columbia
  misc_feature: MA Experiment 20001248 PARAMETER Experiment Name: At_Far-red-induction_P Parameter: Timepoint (hr) Value: 4
  misc_feature: MA Experiment 20001248 PARAMETER Experiment Name: At_Far-red-induction_P Parameter: Tissue Value: Whole Plant
  misc_feature: MA Experiment ID: 20001555 Result: Down-regulated in Transcription
  misc_feature: MA Experiment 20001555 PARAMETER Experiment Name: At_Drought_Soil_Dry_P Parameter: Age (day) Value: 24
  misc_feature: MA Experiment 20001555 PARAMETER Experiment Name: At_Drought_Soil_Dry_P Parameter: Organism Value: A. thaliana
  misc_feature: MA Experiment 20001555 PARAMETER Experiment Name: At_Drought_Soil_Dry_P Parameter: Plant Line Value: WS
  misc_feature: MA Experiment 20001555 PARAMETER Experiment Name: At_Drought_Soil_Dry_P Parameter: Post Timepoint (hr) Value: None
  misc_feature: MA Experiment 20001555 PARAMETER Experiment Name: At_Drought_Soil_Dry_P Parameter: Post-Treatment Value: None
  misc_feature: MA Experiment 20001555 PARAMETER Experiment Name: At_Drought_Soil_Dry_P Parameter: Timepoint (day) Value: 10
  misc_feature: MA Experiment 20001555 PARAMETER Experiment Name: At_Drought_Soil_Dry_P Parameter: Treatment Value: Drought vs. No Drought
  misc_feature: MA Experiment ID: 20001556 Result: Down-regulated in Transcription
  misc_feature: MA Experiment 20001556 PARAMETER Experiment Name: At_Drought_Soil_Dry_P Parameter: Age (day) Value: 26
  misc_feature: MA Experiment 20001556 PARAMETER Experiment Name: At_Drought_Soil_Dry_P Parameter: Organism Value: A. thaliana
  misc_feature: MA Experiment 20001556 PARAMETER Experiment Name: At_Drought_Soil_Dry_P Parameter: Plant Line Value: WS
  misc_feature: MA Experiment 20001556 PARAMETER Experiment Name: At_Drought_Soil_Dry_P Parameter: Post Timepoint (hr) Value: None
  misc_feature: MA Experiment 20001556 PARAMETER Experiment Name: At_Drought_Soil_Dry_P Parameter: Post-Treatment Value: None
  misc_feature: MA Experiment 20001556 PARAMETER Experiment Name: At_Drought_Soil_Dry_P Parameter: Timepoint (day) Value: 12
  misc_feature: MA Experiment 20001556 PARAMETER Experiment Name: At_Drought_Soil_Dry_P Parameter: Treatment Value: Drought vs. No Drought
  misc_feature: MA Experiment ID: 20001557 Result: Up-regulated in Transcription
  misc_feature: MA Experiment 20001557 PARAMETER Experiment Name: At_Drought_Soil_Dry_P Parameter: Age (day) Value: 27
  misc_feature: MA Experiment 20001557 PARAMETER Experiment Name: At_Drought_Soil_Dry_P Parameter: Organism Value: A. thaliana
  misc_feature: MA Experiment 20001557 PARAMETER Experiment Name: At_Drought_Soil_Dry_P Parameter: Plant Line Value: WS
  misc_feature: MA Experiment 20001557 PARAMETER Experiment Name: At_Drought_Soil_Dry_P Parameter: Post Timepoint (hr) Value: 3
  misc_feature: MA Experiment 20001557 PARAMETER Experiment Name: At_Drought_Soil_Dry_P Parameter: Post-Treatment Value: Re-Water vs. No Drought
  misc_feature: MA Experiment 20001557 PARAMETER Experiment Name: At_Drought_Soil_Dry_P Parameter: Timepoint (day) Value: 13
  misc_feature: MA Experiment 20001557 PARAMETER Experiment Name: At_Drought_Soil_Dry_P Parameter: Treatment Value: Drought vs. No Drought
  misc_feature: MA Experiment ID: 20001558 Result: Up-regulated in Transcription
  misc_feature: MA Experiment 20001558 PARAMETER Experiment Name: At_Drought_Soil_Dry_P Parameter: Age (day) Value: 27
  misc_feature: MA Experiment 20001558 PARAMETER Experiment Name: At_Drought_Soil_Dry_P Parameter: Organism Value: A. thaliana
  misc_feature: MA Experiment 20001558 PARAMETER Experiment Name: At_Drought_Soil_Dry_P Parameter: Plant Line Value: WS
  misc_feature: MA Experiment 20001558 PARAMETER Experiment Name: At_Drought_Soil_Dry_P Parameter: Post Timepoint (hr) Value: 6
  misc_feature: MA Experiment 20001558 PARAMETER Experiment Name: At_Drought_Soil_Dry_P Parameter: Post-Treatment Value: Re-Water vs. No Drought
  misc_feature: MA Experiment 20001558 PARAMETER Experiment Name: At_Drought_Soil_Dry_P Parameter: Timepoint (day) Value: 13
  misc_feature: MA Experiment 20001558 PARAMETER Experiment Name: At_Drought_Soil_Dry_P Parameter: Treatment Value: Drought vs. No Drought
  misc_feature: MA Experiment ID: 20001560 Result: Up-regulated in Transcription
  misc_feature: MA Experiment 20001560 PARAMETER Experiment Name: At_Drought_Soil_Dry_P Parameter: Age (day) Value: 28
  misc_feature: MA Experiment 20001560 PARAMETER Experiment Name: At_Drought_Soil_Dry_P Parameter: Organism Value: A. thaliana
  misc_feature: MA Experiment 20001560 PARAMETER Experiment Name: At_Drought_Soil_Dry_P Parameter: Plant Line Value: WS
  misc_feature: MA Experiment 20001560 PARAMETER Experiment Name: At_Drought_Soil_Dry_P Parameter: Post Timepoint (hr) Value: None
  misc_feature: MA Experiment 20001560 PARAMETER Experiment Name: At_Drought_Soil_Dry_P Parameter: Post-Treatment Value: None
  misc_feature: MA Experiment 20001560 PARAMETER Experiment Name: At_Drought_Soil_Dry_P Parameter: Timepoint (day) Value: 14
  misc_feature: MA Experiment 20001560 PARAMETER Experiment Name: At_Drought_Soil_Dry_P Parameter: Treatment Value: Drought vs. No Drought
  misc_feature: MA Experiment ID: 20001906 Result: Down-regulated in Transcription
  misc_feature: MA Experiment 20001906 PARAMETER Experiment Name: At_Drought_Reproduction_P Parameter: Age (day) Value: 35
  misc_feature: MA Experiment 20001906 PARAMETER Experiment Name: At_Drought_Reproduction_P Parameter: Organism Value: A. thaliana
  misc_feature: MA Experiment 20001906 PARAMETER Experiment Name: At_Drought_Reproduction_P Parameter: Plant Line Value: WS
  misc_feature: MA Experiment 20001906 PARAMETER Experiment Name: At_Drought_Reproduction_P Parameter: Timepoint (day) Value: 5
  misc_feature: MA Experiment 20001906 PARAMETER Experiment Name: At_Drought_Reproduction_P Parameter: Tissue Value: Siliques
  misc_feature: MA Experiment 20001906 PARAMETER Experiment Name: At_Drought_Reproduction_P Parameter: Treatment Value: Drought vs. No Drought
  misc_feature: MA Experiment ID: 20001911 Result: Down-regulated in Transcription
  misc_feature: MA Experiment 20001911 PARAMETER Experiment Name: At_Drought_Reproduction_P Parameter: Age (day) Value: 40
  misc_feature: MA Experiment 20001911 PARAMETER Experiment Name: At_Drought_Reproduction_P Parameter: Organism Value: A. thaliana
  misc_feature: MA Experiment 20001911 PARAMETER Experiment Name: At_Drought_Reproduction_P Parameter: Plant Line Value: WS
  misc_feature: MA Experiment 20001911 PARAMETER Experiment Name: At_Drought_Reproduction_P Parameter: Timepoint (day) Value: 10
  misc_feature: MA Experiment 20001911 PARAMETER Experiment Name: At_Drought_Reproduction_P Parameter: Tissue Value: Flowers
  misc_feature: MA Experiment 20001911 PARAMETER Experiment Name: At_Drought_Reproduction_P Parameter: Treatment Value: Drought vs. No Drought
attcgctccgtttctctctcaaaaactacacacccgtaccacaccaccaccctcctcgtttcctcagagatcccctctctaacttctaaggatatagaaaatggcagatggtgaagacattcagcctctcgtctgtgacaatggaaccggaatggttaaggctggatttgctggagatgatgcaccaagagctgtattccctagcatcgttggtcgtcctcgacacactggtgtcatggttggtatgggacaaaaagatgcttacgttggtgatgaggctcagtctaagagaggtattttgacattgaaatatcctattgagcatggtattgttagcaactgggatgatatggagaagatttggcatcacactttctacaatgagctccgtgttgcacctgaagaacaccctgttcttctcactgaggctcctctcaaccccaaggccaatcgtgagaaaatgactcagattatgtttgaaactttcaacactcctgccatgtatgtcgctatccaagctgttctttccctctacgctagtggtcgtactactggtattgtgttggactctggagatggtgtgagtcacactgttccaatttatgaaggatatgctcttccacatgctattctgcgtttggaccttgcaggccgtgaccttactgattacctcatgaagatcttaaccgagcgtggttactcattcactacctcagcagagcgtgaaatcgtaagggatgtgaaagagaaacttgcttacatagcacttgactacgagcaagagatggaaacagcaaacacaagctcatccgttgagaagagctatgagttgcctgatggacaggtgatcaccattggaggagagagattccgctgcccggaggttctgttccaaccgtctttggtgggaatggaagctgctggtattcacgagaccacttacaattccatcatgaagtgtgatgtggatatcaggaaggatctgtatggaaacattgtgctcagtggtggaaccaccatgttccctggaattgctgataggatgagcaaagagatcactgctttggctccaagcagcatgaagattaaggtggttgctccaccagagaggaagtacagtgtctggattggaggctccattctagcatcactcagtaccttccaacagatgtggatagcaaaggccgagtatgatgagtcagggccatcaatagtccacaggaagtgcttctaagattaagctcaaatcaaagtgatgaatgattgttctgtattggtaaagccttttgttcatcgactttgttgcaaaatattcttttgttttctatgtttcttcaccactacattacatttctttcttgttgttatcctcttttggtgtttctgctattaatcgaaaaagaaattttcttttct

SEQ ID NO: 98542 - protein, 377 aa, Arabidopsis thaliana; identical to SEQ ID NO: 24317
  peptide (1)..(377): Ceres Seq. ID no. 13600973
  misc_feature (1)..(377): Pfam Name: Actin Pfam Description: Actin
  misc_feature (1)..(377): Homolog of NCBI NO: 15229955 NR Description: actin 11 (ACT11) [Arabidopsis thaliana]
  misc_feature (1)..(377): Homolog of NCBI NO: 231503 NR Description: ACTIN 97 >gi|100417|pir||S20098 actin 97 - potato
  misc_feature (1)..(377): Homolog of NCBI NO: 28301928 NR Description: actin [Oryza sativa (japonica cultivar-group)]
  misc_feature (1)..(377): Homolog of NCBI NO: 11276975 NR Description: actin [imported] - upland cotton
  misc_feature (1)..(377): Homolog of NCBI NO: 461465 NR Description: ACTIN >gi|322751|pir||S31933 actin - common
  misc_feature (1)..(377): Homolog of NCBI NO: 231496 NR Description: Actin 58 >gi|100421|pir||S20094 actin 58 - potato
  misc_feature (1)..(377): Homolog of NCBI NO: 11276977 NR Description: actin [imported] - Striga asiatica
  misc_feature (1)..(377): Homolog of NCBI NO: 11276969 NR Description: actin 1 [imported] - small naked oat
  misc_feature (1)..(377): Homolog of NCBI NO: 11276978 NR Description: actin ACT2 [imported] - Striga asiatica
  misc_feature (1)..(377): Homolog of NCBI NO: 11276968 NR Description: actin [imported] - Picea rubens

SEQ ID NO: 98543 - protein, 360 aa, Arabidopsis thaliana; identical to SEQ ID NO: 24318
  peptide (1)..(360): Ceres Seq. ID no. 13600974
  misc_feature (1)..(360): Pfam Name: Actin Pfam Description: Actin
  misc_feature (1)..(360): Homolog of NCBI NO: 15229955 NR Description: actin 11 (ACT11) [Arabidopsis thaliana]
  misc_feature (1)..(360): Homolog of NCBI NO: 231503 NR Description: ACTIN 97 >gi|100417|pir||S20098 actin 97 - potato
  misc_feature (1)..(360): Homolog of NCBI NO: 28301928 NR Description: actin [Oryza sativa (japonica cultivar-group)]
  misc_feature (1)..(360): Homolog of NCBI NO: 11276975 NR Description: actin [imported] - upland cotton
  misc_feature (1)..(360): Homolog of NCBI NO: 461465 NR Description: ACTIN >gi|322751|pir||S31933 actin - common
  misc_feature (1)..(360): Homolog of NCBI NO: 231496 NR Description: Actin 58 >gi|100421|pir||S20094 actin 58 - potato
  misc_feature (1)..(360): Homolog of NCBI NO: 11276977 NR Description: actin [imported] - Striga asiatica
  misc_feature (1)..(360): Homolog of NCBI NO: 11276969 NR Description: actin 1 [imported] - small naked oat
  misc_feature (1)..(360): Homolog of NCBI NO: 11276978 NR Description: actin ACT2 [imported] - Striga asiatica
  misc_feature (1)..(360): Homolog of NCBI NO: 11276968 NR Description: actin [imported] - Picea rubens

SEQ ID NO: 98544 - protein, 332 aa, Arabidopsis thaliana; identical to SEQ ID NO: 24319
  peptide (1)..(332): Ceres Seq. ID no. 13600975
  misc_feature (1)..(332): Pfam Name: Actin Pfam Description: Actin
  misc_feature (1)..(332): Homolog of NCBI NO: 15229955 NR Description: actin 11 (ACT11) [Arabidopsis thaliana]
  misc_feature (1)..(332): Homolog of NCBI NO: 231503 NR Description: ACTIN 97 >gi|100417|pir||S20098 actin 97 - potato
  misc_feature (1)..(332): Homolog of NCBI NO: 28301928 NR Description: actin [Oryza sativa (japonica cultivar-group)]
  misc_feature (1)..(332): Homolog of NCBI NO: 11276975 NR Description: actin [imported] - upland cotton
  misc_feature (1)..(332): Homolog of NCBI NO: 461465 NR Description: ACTIN >gi|322751|pir||S31933 actin - common
  misc_feature (1)..(332): Homolog of NCBI NO: 231496 NR Description: Actin 58 >gi|100421|pir||S20094 actin 58 - potato
  misc_feature (1)..(332): Homolog of NCBI NO: 11276977 NR Description: actin [imported] - Striga asiatica
  misc_feature (1)..(332): Homolog of NCBI NO: 11276969 NR Description: actin 1 [imported] - small naked oat
  misc_feature (1)..(332): Homolog of NCBI NO: 11276978 NR Description: actin ACT2 [imported] - Striga asiatica
  misc_feature (1)..(332): Homolog of NCBI NO: 11276968 NR Description: actin [imported] - Picea rubens

SEQ ID NO: 98545 - DNA, 1459 bp, Arabidopsis thaliana
  misc_feature (1)..(1459): Ceres Seq. ID no. 13600976
  misc_feature: MA Experiment ID: 108434 Result: Up-regulated in Transcription
  misc_feature: MA Experiment 108434 PARAMETER Experiment Name: At_Root_Tips_cDNA_P Parameter: Tissue Value: Root Tips
  misc_feature: MA Experiment ID: 108488 Result: Up-regulated in Transcription
  misc_feature: MA Experiment ID: 108501 Result: Up-regulated in Transcription
  misc_feature: MA Experiment 108501 PARAMETER Experiment Name: At_ap2_floral_buds_cDNA_P Parameter: Plant Line Value: ap2 (Ler.)
  misc_feature: MA Experiment 108501 PARAMETER Experiment Name: At_ap2_floral_buds_cDNA_P Parameter: Tissue Value: Closed Flower
  misc_feature: MA Experiment ID: 108573 Result: Up-regulated in Transcription
  misc_feature: MA Experiment 108573 PARAMETER Experiment Name: At_Drought_cDNA_P Parameter: Timepoint (hr) Value: 6
  misc_feature: MA Experiment 108573 PARAMETER Experiment Name: At_Drought_cDNA_P Parameter: Tissue Value: Aerial
  misc_feature: MA Experiment 108573 PARAMETER Experiment Name: At_Drought_cDNA_P Parameter: Treatment Value: Drought vs. No Drought
  misc_feature: MA Experiment ID: 108577 Result: Down-regulated in Transcription
  misc_feature: MA Experiment 108577 PARAMETER Experiment Name: At_42deg_Heat_cDNA_P Parameter: Temperature (deg C) Value: 42 vs. 22
  misc_feature: MA Experiment 108577 PARAMETER Experiment Name: At_42deg_Heat_cDNA_P Parameter: Timepoint (hr) Value: 6
  misc_feature: MA Experiment 108577 PARAMETER Experiment Name: At_42deg_Heat_cDNA_P Parameter: Tissue Value: Aerial
  misc_feature: MA Experiment ID: 108585 Result: Up-regulated in Transcription
  misc_feature: MA Experiment 108585 PARAMETER Experiment Name: At_5mM_NaNP_cDNA_P Parameter: Timepoint (hr) Value: 6
  misc_feature: MA Experiment 108585 PARAMETER Experiment Name: At_5mM_NaNP_cDNA_P Parameter: Tissue Value: Aerial
  misc_feature: MA Experiment 108585 PARAMETER Experiment Name: At_5mM_NaNP_cDNA_P Parameter: Treatment Value: null
  misc_feature: MA Experiment ID: 20000436 Result: Up-regulated in Transcription
  misc_feature: MA Experiment 20000436 PARAMETER Experiment Name: At_Drought_P Parameter: Age (day) Value: 7
  misc_feature: MA Experiment 20000436 PARAMETER Experiment Name: At_Drought_P Parameter: Organism Value: A. thaliana
  misc_feature: MA Experiment 20000436 PARAMETER Experiment Name: At_Drought_P Parameter: Plant Line Value: WS
  misc_feature: MA Experiment 20000436 PARAMETER Experiment Name: At_Drought_P Parameter: Timepoint (hr) Value: 12
  misc_feature: MA Experiment 20000436 PARAMETER Experiment Name: At_Drought_P Parameter: Tissue Value: Whole Plant
  misc_feature: MA Experiment 20000436 PARAMETER Experiment Name: At_Drought_P Parameter: Treatment Value: Drought vs. No Drought
  misc_feature: MA Experiment ID: 20000439 Result: Down-regulated in Transcription
  misc_feature: MA Experiment 20000439 PARAMETER Experiment Name: At_Roots__P Parameter: Age (day) Value: 14 vs. 21
  misc_feature: MA Experiment 20000439 PARAMETER Experiment Name: At_Roots__P Parameter: Organism Value: A. thaliana
  misc_feature: MA Experiment 20000439 PARAMETER Experiment Name: At_Roots__P Parameter: Tissue Value: Roots vs. Whole Plant
  misc_feature: MA Experiment ID: 20000495 Result: Up-regulated in Transcription
  misc_feature: MA Experiment 20000495 PARAMETER Experiment Name: At_Guard_Cells_P Parameter: Harvest Date Value: 8/2/2002
  misc_feature: MA Experiment 20000495 PARAMETER Experiment Name: At_Guard_Cells_P Parameter: Organism Value: A. thaliana
  misc_feature: MA Experiment 20000495 PARAMETER Experiment Name: At_Guard_Cells_P Parameter: Tissue Value: Guard Cells vs. Leaves
  misc_feature: MA Experiment ID: 20000574 Result: Down-regulated in Transcription
  misc_feature: MA Experiment 20000574 PARAMETER Experiment Name: At_100uM_ABA_Mutants__P Parameter: Organism Value: A. thaliana
  misc_feature: MA Experiment 20000574 PARAMETER Experiment Name: At_100uM_ABA_Mutants__P Parameter: Plant Line Value: CS23 vs. Ler wt
  misc_feature: MA Experiment 20000574 PARAMETER Experiment Name: At_100uM_ABA_Mutants__P Parameter: Timepoint (hr) Value: N/A
  misc_feature: MA Experiment 20000574 PARAMETER Experiment Name: At_100uM_ABA_Mutants__P Parameter: Tissue Value: Whole Plant
  misc_feature: MA Experiment 20000574 PARAMETER Experiment Name: At_100uM_ABA_Mutants__P Parameter: Treatment Value: None
  misc_feature: MA Experiment ID: 20001554 Result: Up-regulated in Transcription
  misc_feature: MA Experiment 20001554 PARAMETER Experiment Name: At_Drought_Soil_Dry_P Parameter: Age (day) Value: 21
  misc_feature: MA Experiment 20001554 PARAMETER Experiment Name: At_Drought_Soil_Dry_P Parameter: Organism Value: A. thaliana
  misc_feature: MA Experiment 20001554 PARAMETER Experiment Name: At_Drought_Soil_Dry_P Parameter: Plant Line Value: WS
  misc_feature: MA Experiment 20001554 PARAMETER Experiment Name: At_Drought_Soil_Dry_P Parameter: Post Timepoint (hr) Value: None
  misc_feature: MA Experiment 20001554 PARAMETER Experiment Name: At_Drought_Soil_Dry_P Parameter: Post-Treatment Value: None
  misc_feature: MA Experiment 20001554 PARAMETER Experiment Name: At_Drought_Soil_Dry_P Parameter: Timepoint (day) Value: 7
  misc_feature: MA Experiment 20001554 PARAMETER Experiment Name: At_Drought_Soil_Dry_P Parameter: Treatment Value: Drought vs. No Drought
  misc_feature: MA Experiment ID: 20001555 Result: Up-regulated in Transcription
  misc_feature: MA Experiment 20001555 PARAMETER Experiment Name: At_Drought_Soil_Dry_P Parameter: Age (day) Value: 24
  misc_feature: MA Experiment 20001555 PARAMETER Experiment Name: At_Drought_Soil_Dry_P Parameter: Organism Value: A. thaliana
  misc_feature: MA Experiment 20001555 PARAMETER Experiment Name: At_Drought_Soil_Dry_P Parameter: Plant Line Value: WS
  misc_feature: MA Experiment 20001555 PARAMETER Experiment Name: At_Drought_Soil_Dry_P Parameter: Post Timepoint (hr) Value: None
  misc_feature: MA Experiment 20001555 PARAMETER Experiment Name: At_Drought_Soil_Dry_P Parameter: Post-Treatment Value: None
  misc_feature: MA Experiment 20001555 PARAMETER Experiment Name: At_Drought_Soil_Dry_P Parameter: Timepoint (day) Value: 10
  misc_feature: MA Experiment 20001555 PARAMETER Experiment Name: At_Drought_Soil_Dry_P Parameter: Treatment Value: Drought vs. No Drought
  misc_feature: MA Experiment ID: 20001556 Result: Up-regulated in Transcription
  misc_feature: MA Experiment 20001556 PARAMETER Experiment Name: At_Drought_Soil_Dry_P Parameter: Age (day) Value: 26
  misc_feature: MA Experiment 20001556 PARAMETER Experiment Name: At_Drought_Soil_Dry_P Parameter: Organism Value: A. thaliana
  misc_feature: MA Experiment 20001556 PARAMETER Experiment Name: At_Drought_Soil_Dry_P Parameter: Plant Line Value: WS
  misc_feature: MA Experiment 20001556 PARAMETER Experiment Name: At_Drought_Soil_Dry_P Parameter: Post Timepoint (hr) Value: None
  misc_feature: MA Experiment 20001556 PARAMETER Experiment Name: At_Drought_Soil_Dry_P Parameter: Post-Treatment Value: None
  misc_feature: MA Experiment 20001556 PARAMETER Experiment Name: At_Drought_Soil_Dry_P Parameter: Timepoint (day) Value: 12
  misc_feature: MA Experiment 20001556 PARAMETER Experiment Name: At_Drought_Soil_Dry_P Parameter: Treatment Value: Drought vs. No Drought
atctgaccaccagaagaagagccacacactcacaaattaaaaagagagagagagagagagagacagagagagagagagattctgcggaggagcttcttcttcgtagggtgttcatcgttattaacgttatcgcccctacgtcagctccatctccagaaacatgggtgcaggtggaagaatgccggttcctacttcttccaagaaatcggaaaccgacaccacaaagcgtgtgccgtgcgagaaaccgcctttctcggtgggagatctgaagaaagcaatcccgccgcattgtttcaaacgctcaatccctcgctctttctcctaccttatcagtgacatcattatagcctcatgcttctactacgtcgccaccaattacttctctctcctccctcagcctctctcttacttggcttggccactctattgggcctgtcaaggctgtgtcctaactggtatctgggtcatagcccacgaatgcggtcaccacgcattcagcgactaccaatggctggatgacacagttggtcttatcttccattccttcctcctcgtcccttacttctcctggaagtatagtcatcgccgtcaccattccaacactggatccctcgaaagagatgaagtatttgtcccaaagcagaaatcagcaatcaagtggtacgggaaatacctcaacaaccctcttggacgcatcatgatgttaaccgtccagtttgtcctcgggtggcccttgtacttagcctttaacgtctctggcagaccgtatgacgggttcgcttgccatttcttccccaacgctcccatctacaatgaccgagaacgcctccagatatacctctctgatgcgggtattctagccgtctgttttggtctttaccgttacgctgctgcacaagggatggcctcgatgatctgcctctacggagtaccgcttctgatagtgaatgcgttcctcgtcttgatcacttacttgcagcacactcatccctcgttgcctcactacgattcatcagagtgggactggctcaggggagctttggctaccgtagacagagactacggaatcttgaacaaggtgttccacaacattacagacacacacgtggctcatcacctgttctcgacaatgccgcattataacgcaatggaagctacaaaggcgataaagccaattctgggagactattaccagttcgatggaacaccgtggtatgtagcgatgtatagggaggcaaaggagtgtatctatgtagaaccggacagggaaggtgacaagaaaggtgtgtactggtacaacaataagttatgaggatgatggtgaagaaattgtcgacctttctcttgtctgtttgtcttttgttaaagaagctatgcttcgttttaataatcttattgtccattttgttgtgttatgacattttggctgctcattatgttatgtgggaagttagtgttc

SEQ ID NO: 98546 - protein, 383 aa, Arabidopsis thaliana; identical to SEQ ID NO: 39928
  peptide (1)..(383): Ceres Seq. ID no. 13600977
  misc_feature (89)..(340): Pfam Name: Fatty acid desaturase Pfam Description: Fatty acid desaturase
  misc_feature (1)..(383): Homolog of NCBI NO: 15229956 NR Description: omega-6 fatty acid desaturase, endoplasmic
  misc_feature (1)..(383): Homolog of NCBI NO: 21536781 NR Description: omega-6 fatty acid desaturase, endoplasmic
  misc_feature (1)..(383): Homolog of NCBI NO: 4378875 NR Description: delta-12 desaturase [Brassica carinata]
  misc_feature (1)..(383): Homolog of NCBI NO: 3334184 NR Description: Omega-6 fatty acid desaturase, endoplasmic (Delta- 12 desaturase) >gi|1212781|emb|CAA62578.1| oleate
  misc_feature (1)..(383): Homolog of NCBI NO: 20520624 NR Description: fatty acid desaturase 2 [Brassica rapa]
  misc_feature (1)..(383): Homolog of NCBI NO: 8705229 NR Description: delta-12 oleate desaturase [Brassica napus]
  misc_feature (1)..(383): Homolog of NCBI NO: 3452129 NR Description: bifunctional oleate 12-hydroxylase:desaturase
  misc_feature (1)..(382): Homolog of NCBI NO: 27261181 NR Description: delta 12 oleic acid desaturase FAD2 [Vernicia
  misc_feature (1)..(383): Homolog of NCBI NO: 17225582 NR Description: delta-12 fatty acid desaturase [Gossypium
  misc_feature (1)..(383): Homolog of NCBI NO: 3417601 NR Description: delta-12 fatty acid desaturase [Borago

SEQ ID NO: 98547 - protein, 377 aa, Arabidopsis thaliana; identical to SEQ ID NO: 39929
  peptide (1)..(377): Ceres Seq. ID no. 13600978
  misc_feature (83)..(334): Pfam Name: Fatty acid desaturase Pfam Description: Fatty acid desaturase
  misc_feature (1)..(377): Homolog of NCBI NO: 15229956 NR Description: omega-6 fatty acid desaturase, endoplasmic
  misc_feature (1)..(377): Homolog of NCBI NO: 21536781 NR Description: omega-6 fatty acid desaturase, endoplasmic
  misc_feature (1)..(377): Homolog of NCBI NO: 4378875 NR Description: delta-12 desaturase [Brassica carinata]
  misc_feature (1)..(377): Homolog of NCBI NO: 3334184 NR Description: Omega-6 fatty acid desaturase, endoplasmic (Delta- 12 desaturase) >gi|1212781|emb|CAA62578.1| oleate
  misc_feature (1)..(377): Homolog of NCBI NO: 20520624 NR Description: fatty acid desaturase 2 [Brassica rapa]
  misc_feature (1)..(377): Homolog of NCBI NO: 8705229 NR Description: delta-12 oleate desaturase [Brassica napus]
  misc_feature (1)..(377): Homolog of NCBI NO: 3452129 NR Description: bifunctional oleate 12-hydroxylase:desaturase
  misc_feature (1)..(376): Homolog of NCBI NO: 27261181 NR Description: delta 12 oleic acid desaturase FAD2 [Vernicia
  misc_feature (1)..(377): Homolog of NCBI NO: 17225582 NR Description: delta-12 fatty acid desaturase [Gossypium
  misc_feature (1)..(377): Homolog of NCBI NO: 3417601 NR Description: delta-12 fatty acid desaturase [Borago

SEQ ID NO: 98548 - protein, 204 aa, Arabidopsis thaliana; identical to SEQ ID NO: 39930
  peptide (1)..(204): Ceres Seq. ID no. 13600979
  misc_feature (1)..(161): Pfam Name: Fatty acid desaturase Pfam Description: Fatty acid desaturase
  misc_feature (1)..(204): Homolog of NCBI NO: 15229956 NR Description: omega-6 fatty acid desaturase, endoplasmic
  misc_feature (1)..(204): Homolog of NCBI NO: 21536781 NR Description: omega-6 fatty acid desaturase, endoplasmic
  misc_feature (1)..(204): Homolog of NCBI NO: 4378875 NR Description: delta-12 desaturase [Brassica carinata]
  misc_feature (1)..(204): Homolog of NCBI NO: 3334184 NR Description: Omega-6 fatty acid desaturase, endoplasmic (Delta- 12 desaturase) >gi|1212781|emb|CAA62578.1| oleate
  misc_feature (1)..(204): Homolog of NCBI NO: 20520624 NR Description: fatty acid desaturase 2 [Brassica rapa]
  misc_feature (1)..(204): Homolog of NCBI NO: 8705229 NR Description: delta-12 oleate desaturase [Brassica napus]
  misc_feature (1)..(204): Homolog of NCBI NO: 3452129 NR Description: bifunctional oleate 12-hydroxylase:desaturase
  misc_feature (1)..(203): Homolog of NCBI NO: 27261181 NR Description: delta 12 oleic acid desaturase FAD2 [Vernicia
  misc_feature (1)..(204): Homolog of NCBI NO: 17225582 NR Description: delta-12 fatty acid desaturase [Gossypium
  misc_feature (1)..(204): Homolog of NCBI NO: 3417601 NR Description: delta-12 fatty acid desaturase [Borago

SEQ ID NO: 98549 - DNA, 1180 bp, Arabidopsis thaliana
  misc_feature (1)..(1180): Ceres Seq. ID no. 13600988
  misc_feature: MA Experiment ID: 108461 Result: Up-regulated in Transcription
  misc_feature: MA Experiment 108461 PARAMETER Experiment Name: At_Germinating_Seeds_cDNA_P Parameter: Age (day) Value: 1 vs. 0
  misc_feature: MA Experiment 108461 PARAMETER Experiment Name: At_Germinating_Seeds_cDNA_P Parameter: Tissue Value: Germinating Seeds
  misc_feature: MA Experiment ID: 108462 Result: Up-regulated in Transcription
  misc_feature: MA Experiment 108462 PARAMETER Experiment Name: At_Germinating_Seeds_cDNA_P Parameter: Age (day) Value: 2 vs. 0
  misc_feature: MA Experiment 108462 PARAMETER Experiment Name: At_Germinating_Seeds_cDNA_P Parameter: Tissue Value: Germinating Seeds
  misc_feature: MA Experiment ID: 108463 Result: Up-regulated in Transcription
  misc_feature: MA Experiment 108463 PARAMETER Experiment Name: At_Germinating_Seeds_cDNA_P Parameter: Age (day) Value: 3 vs. 0
  misc_feature: MA Experiment 108463 PARAMETER Experiment Name: At_Germinating_Seeds_cDNA_P Parameter: Tissue Value: Germinating Seeds
  misc_feature: MA Experiment ID: 108464 Result: Up-regulated in Transcription
  misc_feature: MA Experiment 108464 PARAMETER Experiment Name: At_Germinating_Seeds_cDNA_P Parameter: Age (day) Value: 4 vs. 0
  misc_feature: MA Experiment 108464 PARAMETER Experiment Name: At_Germinating_Seeds_cDNA_P Parameter: Tissue Value: Germinating Seeds
  misc_feature: MA Experiment ID: 108595 Result: Down-regulated in Transcription
  misc_feature: MA Experiment 108595 PARAMETER Experiment Name: At_Ler-pi_Ovule_cDNA_P Parameter: Plant Line Value: null
  misc_feature: MA Experiment ID: 20000180 Result: Up-regulated in Transcription
  misc_feature: MA Experiment 20000180 PARAMETER Experiment Name: At_Germinating_Seeds_P Parameter: Age (hr) Value: 24 vs. 0
  misc_feature: MA Experiment 20000180 PARAMETER Experiment Name: At_Germinating_Seeds_P Parameter: Tissue Value: Germinating Seeds
  misc_feature: MA Experiment ID: 20001557 Result: Down-regulated in Transcription
  misc_feature: MA Experiment 20001557 PARAMETER Experiment Name: At_Drought_Soil_Dry_P Parameter: Age (day) Value: 27
  misc_feature: MA Experiment 20001557 PARAMETER Experiment Name: At_Drought_Soil_Dry_P Parameter: Organism Value: A. thaliana
  misc_feature: MA Experiment 20001557 PARAMETER Experiment Name: At_Drought_Soil_Dry_P Parameter: Plant Line Value: WS
  misc_feature: MA Experiment 20001557 PARAMETER Experiment Name: At_Drought_Soil_Dry_P Parameter: Post Timepoint (hr) Value: 3
  misc_feature: MA Experiment 20001557 PARAMETER Experiment Name: At_Drought_Soil_Dry_P Parameter: Post-Treatment Value: Re-Water vs. No Drought
  misc_feature: MA Experiment 20001557 PARAMETER Experiment Name: At_Drought_Soil_Dry_P Parameter: Timepoint (day) Value: 13
  misc_feature: MA Experiment 20001557 PARAMETER Experiment Name: At_Drought_Soil_Dry_P Parameter: Treatment Value: Drought vs. No Drought
  misc_feature: MA Experiment ID: 20001558 Result: Down-regulated in Transcription
  misc_feature: MA Experiment 20001558 PARAMETER Experiment Name: At_Drought_Soil_Dry_P Parameter: Age (day) Value: 27
  misc_feature: MA Experiment 20001558 PARAMETER Experiment Name: At_Drought_Soil_Dry_P Parameter: Organism Value: A. thaliana
  misc_feature: MA Experiment 20001558 PARAMETER Experiment Name: At_Drought_Soil_Dry_P Parameter: Plant Line Value: WS
  misc_feature: MA Experiment 20001558 PARAMETER Experiment Name: At_Drought_Soil_Dry_P Parameter: Post Timepoint (hr) Value: 6
  misc_feature: MA Experiment 20001558 PARAMETER Experiment Name: At_Drought_Soil_Dry_P Parameter: Post-Treatment Value: Re-Water vs. No Drought
  misc_feature: MA Experiment 20001558 PARAMETER Experiment Name: At_Drought_Soil_Dry_P Parameter: Timepoint (day) Value: 13
  misc_feature: MA Experiment 20001558 PARAMETER Experiment Name: At_Drought_Soil_Dry_P Parameter: Treatment Value: Drought vs. No Drought
agattaagtcttcttcgtcatcttcgagtgtgagtggatccagagagagaattagatatttccgacacgaggcaaattcctagtggctcatggcgtcatcatctgatcacacggcgaagataatcgacggcaaggcgattgctcataccatcagatcagagatcgccgaggaagttcgcggtctatctgagaaacacggcaaggtcccaggactagctgtagttattgttgggagccgaaaggattcacagacctatgtgaatacgaagaggaaagcgtgcgctgaggttgggattaagtcatttgacgtgggcctaccagaggaagtttctgaagctgatcttattagcaaagttcatgaactaaattcaaatccggatgtccatggcatattagttcaactcccattgccgaaacatattaatgaggagcatatattgggtgcaatcagcattgataaagatgtcgatggcttccatcctttgaatattggtaagctagccatgaaaggcagagaacccctcttccttccttgcaccccaaagggatgtttggaactcctagctagaagcggcgtaaagataaaggggcaacgagcagttgttgtaggtcggagtaacattgttggtttgcccgtttcacttcttttgctcaaggctgatgctactgtcacaactgtacattctcacaccaaggatcctgaggctatcatacgggaagctgacattgttattgctgcatgcggacaagcccacatgattaagggcaactggataaagccaggggctgcagtaattgatgttggaactaatgcagtcagcgacccgagcaagaaatcaggataccggttggttggagatgttgatttcgcagaagcttcaaaagttgcaggtttcataactccggtccctggtggtgtaggcccaatgacagtggcaatgcttctcaggaacaccgtagacggtgccaagcgtgtctttggcgagtaaaacaatctactgtatgtaataaagaaaccaagagtttctccattctgtaattgtgtacttggcttgacgatatttttccactcaaataaattgaaattggcgttccctttggattaccttacattgttctgcaactagctagaacgattatttccgcaattcagttaaatacaagggtgtcatcatgtgac

SEQ ID NO: 98550 - protein, 299 aa, Arabidopsis thaliana
  peptide (1)..(299): Ceres Seq. ID no. 13600989
  misc_feature (129)..(297): Pfam Name: Tetrahydrofolate dehydrogenase/cyclohydrolase, Pfam Description: Tetrahydrofolate dehydrogenase/cyclohydrolase,
  misc_feature (1)..(299): Homolog of NCBI NO: 15230449 NR Description: tetrahydrofolate dehydrogenase/cyclohydrolase,
  misc_feature (1)..(299): Homolog of NCBI NO: 21553669 NR Description: 5,10-methylenetetrahydrofolate methenyltetrahydrofolate cyclohydrolase, putative [Arabidopsis
  misc_feature (9)..(299): Homolog of NCBI NO: 11252953 NR Description: methylenetetrahydrofolate dehydrogenase (NADP)
  misc_feature (9)..(295): Homolog of NCBI NO: 12083525 NR Description: similar to Pisum sativum
  misc_feature (3)..(296): Homolog of NCBI NO: 15236888 NR Description: tetrahydrofolate dehydrogenase/cyclohydrolase,
  misc_feature (11)..(297): Homolog of NCBI NO: 25284864 NR Description: methylenetetrahydrofolate dehydrogenase - Arabidopsis thaliana >gi|3786006|gb|AAC67352.1|
  misc_feature (11)..(297): Homolog of NCBI NO: 30687594 NR Description: tetrahydrofolate dehydrogenase/cyclohydrolase,
  misc_feature (9)..(295): Homolog of NCBI NO: 9992889 NR Description: C1-THFS protein [Yarrowia lipolytica]
  misc_feature (9)..(297): Homolog of NCBI NO: 32405166 NR Description: hypothetical protein [Neurospora crassa]
  misc_feature (9)..(295): Homolog of NCBI NO: 23001349 NR Description: hypothetical protein [Magnetococcus sp. MC-1]
MASSSDHTAKIIDGKAIAHTIRSEIAEEVRGLSEKHGKVPGLAVVIVGSRKDSQTYVNTKRKACAEVGIKSFDVGLPEEVSEADLISKVHELNSNPDVHGILVQLPLPKHINEEHILGAISIDKDVDGFHPLNIGKLAMKGREPLFLPCTPKGCLELLARSGVKIKGQRAVVVGRSNIVGLPVSLLLLKADATVTTVHSHTKDPEAIIREADIVIAACGQAHMIKGNWIKPGAAVIDVGTNAVSDPSKKSGYRLVGDVDFAEASKVAGFITPVPGGVGPMTVAMLLRNTVDGAKRVFGE

SEQ ID NO: 98551 - protein, 161 aa, Arabidopsis thaliana; identical to SEQ ID NO: 35870
  peptide (1)..(161): Ceres Seq. ID no. 13600990
  misc_feature (1)..(159): Pfam Name: Tetrahydrofolate dehydrogenase/cyclohydrolase, Pfam Description: Tetrahydrofolate dehydrogenase/cyclohydrolase,
  misc_feature (1)..(161): Homolog of NCBI NO: 15230449 NR Description: tetrahydrofolate dehydrogenase/cyclohydrolase,
  misc_feature (1)..(161): Homolog of NCBI NO: 21553669 NR Description: 5,10-methylenetetrahydrofolate methenyltetrahydrofolate cyclohydrolase, putative [Arabidopsis
  misc_feature (1)..(161): Homolog of NCBI NO: 11252953 NR Description: methylenetetrahydrofolate dehydrogenase (NADP)
  misc_feature (1)..(157): Homolog of NCBI NO: 12083525 NR Description: similar to Pisum sativum
  misc_feature (1)..(158): Homolog of NCBI NO: 15236888 NR Description: tetrahydrofolate dehydrogenase/cyclohydrolase,
  misc_feature (1)..(159): Homolog of NCBI NO: 25284864 NR Description: methylenetetrahydrofolate dehydrogenase - Arabidopsis thaliana >gi|3786006|gb|AAC67352.1|
  misc_feature (1)..(159): Homolog of NCBI NO: 30687594 NR Description: tetrahydrofolate dehydrogenase/cyclohydrolase,
  misc_feature (1)..(157): Homolog of NCBI NO: 9992889 NR Description: C1-THFS protein [Yarrowia lipolytica]
  misc_feature (1)..(159): Homolog of NCBI NO: 32405166 NR Description: hypothetical protein [Neurospora crassa]
  misc_feature (1)..(157): Homolog of NCBI NO: 23001349 NR Description: hypothetical protein [Magnetococcus sp. MC-1]

SEQ ID NO: 98552 - DNA, 771 bp, Arabidopsis thaliana
  misc_feature (1)..(771): Ceres Seq. ID no. 13600991
  misc_feature: MA Experiment ID: 108501 Result: Down-regulated in Transcription
  misc_feature: MA Experiment 108501 PARAMETER Experiment Name: At_ap2_floral_buds_cDNA_P Parameter: Plant Line Value: ap2 (Ler.)
  misc_feature: MA Experiment 108501 PARAMETER Experiment Name: At_ap2_floral_buds_cDNA_P Parameter: Tissue Value: Closed Flower
actcgctcaaaaatttagagaaaggaagaagaagacagatcaatggctccgacgatcaaaagaatcagaagtttccgtactcaccaaaaacactttgtcgattttttcggagacgacttgatcgtcaccgttacgccgactgcttccgttatccgccgctggattcgtagcgtccgctcctacaaccgtaatcactcggtacatcctctcgtcgttggaatcggtgttcagtggagaccggatagttccgatccagatccaccaccaaaaactctccagttgtgcgtcggtagtcgctgtctcatcatccaactaggttacaattacggtctcccaaaagtcctccgcactttccttgccgatcccaaaacgactttcgtcggcgtttggaacggccaagaccagaaaaaactcgagaaatgtaggcatcgagtggagatcgggaagcttctggacataaggatgttcgtgagagattcgagaggggctaggatgtgtttttgttcgtttgaacagatcgtgaaggagcgtttgggtcgcgtaggagtgaggttagatccggcgatttgtatgagcgattggggcgtttataaccttaaccattatcaggtacttcaggcgtcgattgagtcgtatgtttgctttaagctcgctgttgaggaacgtctctggaacttaaaagttgctgctaatcttgtgatttgaatttgttgttgttcttctctctttatcaatcaacgtcttcttctaattcatgaaagttttcatgtt

SEQ ID NO: 98553 - protein, 220 aa, Arabidopsis thaliana
  peptide (1)..(220): Ceres Seq. ID no. 13600992
  misc_feature (1)..(220): Homolog of NCBI NO: 18399624 NR Description: expressed protein [Arabidopsis thaliana]
  misc_feature (1)..(220): Homolog of NCBI NO: 21595009 NR Description: unknown [Arabidopsis thaliana]
  misc_feature (72)..(212): Homolog of NCBI NO: 15230479 NR Description: hypothetical protein [Arabidopsis thaliana]
  misc_feature (2)..(75): Homolog of NCBI NO: 15230479 NR Description: hypothetical protein [Arabidopsis thaliana]
  misc_feature (72)..(213): Homolog of NCBI NO: 15230500 NR Description: hypothetical protein [Arabidopsis thaliana]
  misc_feature (1)..(75): Homolog of NCBI NO: 15230500 NR Description: hypothetical protein [Arabidopsis thaliana]
  misc_feature (62)..(210): Homolog of NCBI NO: 15230481 NR Description: hypothetical protein [Arabidopsis thaliana]
  misc_feature (62)..(210): Homolog of NCBI NO: 15795162 NR Description: gb|AAD26968.1~gene_id:MQC3.25~similar to unknown
  misc_feature (1)..(68): Homolog of NCBI NO: 15230481 NR Description: hypothetical protein [Arabidopsis thaliana]
  misc_feature (1)..(68): Homolog of NCBI NO: 15795162 NR Description: gb|AAD26968.1~gene_id:MQC3.25~similar to unknown
MAPTIKRIRSFRTHQKHFVDFFGDDLIVTVTPTASVIRRWIRSVRSYNRNHSVHPLVVGIGVQWRPDSSDPDPPPKTLQLCVGSRCLIIQLGYNYGLPKVLRTFLADPKTTFVGVWNGQDQKKLEKCRHRVEIGKLLDIRMFVRDSRGARMCFCSFEQIVKERLGRVGVRLDPAICMSDWGVYNLNHYQVLQASIESYVCFKLAVEERLWNLKVAANLVI

SEQ ID NO: 98554 - DNA, 1341 bp, Arabidopsis thaliana
  misc_feature (1)..(1341): Ceres Seq. ID no. 13600997
  misc_feature: MA Experiment ID: 108434 Result: Up-regulated in Transcription
  misc_feature: MA Experiment 108434 PARAMETER Experiment Name: At_Root_Tips_cDNA_P Parameter: Tissue Value: Root Tips
  misc_feature: MA Experiment ID: 108461 Result: Up-regulated in Transcription
  misc_feature: MA Experiment 108461 PARAMETER Experiment Name: At_Germinating_Seeds_cDNA_P Parameter: Age (day) Value: 1 vs. 0
  misc_feature: MA Experiment 108461 PARAMETER Experiment Name: At_Germinating_Seeds_cDNA_P Parameter: Tissue Value: Germinating Seeds
  misc_feature: MA Experiment ID: 108462 Result: Up-regulated in Transcription
  misc_feature: MA Experiment 108462 PARAMETER Experiment Name: At_Germinating_Seeds_cDNA_P Parameter: Age (day) Value: 2 vs. 0
  misc_feature: MA Experiment 108462 PARAMETER Experiment Name: At_Germinating_Seeds_cDNA_P Parameter: Tissue Value: Germinating Seeds
  misc_feature: MA Experiment ID: 108463 Result: Up-regulated in Transcription
  misc_feature: MA Experiment 108463 PARAMETER Experiment Name: At_Germinating_Seeds_cDNA_P Parameter: Age (day) Value: 3 vs. 0
  misc_feature: MA Experiment 108463 PARAMETER Experiment Name: At_Germinating_Seeds_cDNA_P Parameter: Tissue Value: Germinating Seeds
  misc_feature: MA Experiment ID: 108464 Result: Up-regulated in Transcription
  misc_feature: MA Experiment 108464 PARAMETER Experiment Name: At_Germinating_Seeds_cDNA_P Parameter: Age (day) Value: 4 vs. 0
  misc_feature: MA Experiment 108464 PARAMETER Experiment Name: At_Germinating_Seeds_cDNA_P Parameter: Tissue Value: Germinating Seeds
  misc_feature: MA Experiment ID: 108501 Result: Up-regulated in Transcription
  misc_feature: MA Experiment 108501 PARAMETER Experiment Name: At_ap2_floral_buds_cDNA_P Parameter: Plant Line Value: ap2 (Ler.)
  misc_feature: MA Experiment 108501 PARAMETER Experiment Name: At_ap2_floral_buds_cDNA_P Parameter: Tissue Value: Closed Flower
  misc_feature: MA Experiment ID: 108573 Result: Up-regulated in Transcription
  misc_feature: MA Experiment 108573 PARAMETER Experiment Name: At_Drought_cDNA_P Parameter: Timepoint (hr) Value: 6
  misc_feature: MA Experiment 108573 PARAMETER Experiment Name: At_Drought_cDNA_P Parameter: Tissue Value: Aerial
  misc_feature: MA Experiment 108573 PARAMETER Experiment Name: At_Drought_cDNA_P Parameter: Treatment Value: Drought vs. No Drought
  misc_feature: MA Experiment ID: 108577 Result: Down-regulated in Transcription
  misc_feature: MA Experiment 108577 PARAMETER Experiment Name: At_42deg_Heat_cDNA_P Parameter: Temperature (deg C) Value: 42 vs. 22
  misc_feature: MA Experiment 108577 PARAMETER Experiment Name: At_42deg_Heat_cDNA_P Parameter: Timepoint (hr) Value: 6
  misc_feature: MA Experiment 108577 PARAMETER Experiment Name: At_42deg_Heat_cDNA_P Parameter: Tissue Value: Aerial
  misc_feature: MA Experiment ID: 108595 Result: Up-regulated in Transcription
  misc_feature: MA Experiment 108595 PARAMETER Experiment Name: At_Ler-pi_Ovule_cDNA_P Parameter: Plant Line Value: null
  misc_feature: MA Experiment ID: 108605 Result: Down-regulated in Transcription
  misc_feature: MA Experiment 108605 PARAMETER Experiment Name: At_100uM_ABA_cDNA_P Parameter: Timepoint (hr) Value: 6
  misc_feature: MA Experiment 108605 PARAMETER Experiment Name: At_100uM_ABA_cDNA_P Parameter: Tissue Value: Aerial
  misc_feature: MA Experiment 108605 PARAMETER Experiment Name: At_100uM_ABA_cDNA_P Parameter: Treatment Value: 100uM ABA vs. No Treatment
  misc_feature: MA Experiment ID: 108607 Result: Down-regulated in Transcription
  misc_feature: MA Experiment 108607 PARAMETER Experiment Name: At_100uM_ABA_cDNA_P Parameter: Timepoint (hr) Value: 4
  misc_feature: MA Experiment 108607 PARAMETER Experiment Name: At_100uM_ABA_cDNA_P Parameter: Tissue Value: Aerial
  misc_feature: MA Experiment 108607 PARAMETER Experiment Name: At_100uM_ABA_cDNA_P Parameter: Treatment Value: 100uM ABA vs. No Treatment
  misc_feature: MA Experiment ID: 20000111 Result: Down-regulated in Transcription
  misc_feature: MA Experiment 20000111 PARAMETER Experiment Name: At_42deg_Heat_cDNA_P Parameter: Temperature (deg C) Value: 42 vs. 22
  misc_feature: MA Experiment 20000111 PARAMETER Experiment Name: At_42deg_Heat_cDNA_P Parameter: Timepoint (hr) Value: 6
  misc_feature: MA Experiment 20000111 PARAMETER Experiment Name: At_42deg_Heat_cDNA_P Parameter: Tissue Value: Aerial
  misc_feature: MA Experiment ID: 20000113 Result: Down-regulated in Transcription
  misc_feature: MA Experiment 20000113 PARAMETER Experiment Name: At_42deg_Heat_cDNA_P Parameter: Temperature (deg C) Value: 42 vs. 22
  misc_feature: MA Experiment 20000113 PARAMETER Experiment Name: At_42deg_Heat_cDNA_P Parameter: Timepoint (hr) Value: 8
  misc_feature: MA Experiment 20000113 PARAMETER Experiment Name: At_42deg_Heat_cDNA_P Parameter: Tissue Value: Aerial
  misc_feature: MA Experiment ID: 20000144 Result: Down-regulated in Transcription
  misc_feature: MA Experiment 20000144 PARAMETER Experiment Name: At_42deg_Heat_cDNA_P Parameter: Temperature (deg C) Value: 42 vs. 22
  misc_feature: MA Experiment 20000144 PARAMETER Experiment Name: At_42deg_Heat_cDNA_P Parameter: Timepoint (hr) Value: 1
  misc_feature: MA Experiment 20000144 PARAMETER Experiment Name: At_42deg_Heat_cDNA_P Parameter: Tissue Value: Aerial
  misc_feature: MA Experiment ID: 20000180 Result: Up-regulated in Transcription
  misc_feature: MA Experiment 20000180 PARAMETER Experiment Name: At_Germinating_Seeds_P Parameter: Age (hr) Value: 24 vs. 0
  misc_feature: MA Experiment 20000180 PARAMETER Experiment Name: At_Germinating_Seeds_P Parameter: Tissue Value: Germinating Seeds
  misc_feature: MA Experiment ID: 20000184 Result: Up-regulated in Transcription
  misc_feature: MA Experiment 20000184 PARAMETER Experiment Name: At_Shoots__P Parameter: Age (day) Value: 7
  misc_feature: MA Experiment 20000184 PARAMETER Experiment Name: At_Shoots__P Parameter: Tissue Value: Shoots vs. Whole Plant
  misc_feature: MA Experiment ID: 20000224 Result: Down-regulated in Transcription
  misc_feature: MA Experiment ID: 20000286 Result: Up-regulated in Transcription
  misc_feature: MA Experiment 20000286 PARAMETER Experiment Name: At_Open_Flower_P Parameter: Age (day) Value: 21
  misc_feature: MA Experiment 20000286 PARAMETER Experiment Name: At_Open_Flower_P Parameter: Plant Line Value: WS
  misc_feature: MA Experiment 20000286 PARAMETER Experiment Name: At_Open_Flower_P Parameter: Tissue Value: Half Open vs. Whole Plant
  misc_feature: MA Experiment ID: 20000437 Result: Up-regulated in Transcription
  misc_feature: MA Experiment 20000437 PARAMETER Experiment Name: At_Drought_P Parameter: Age (day) Value: 8
  misc_feature: MA Experiment 20000437 PARAMETER Experiment Name: At_Drought_P Parameter: Organism Value: A. thaliana
  misc_feature: MA Experiment 20000437 PARAMETER Experiment Name: At_Drought_P Parameter: Plant Line Value: WS
  misc_feature: MA Experiment 20000437 PARAMETER Experiment Name: At_Drought_P Parameter: Timepoint (hr) Value: 24
  misc_feature: MA Experiment 20000437 PARAMETER Experiment Name: At_Drought_P Parameter: Tissue Value: Whole Plant
  misc_feature: MA Experiment 20000437 PARAMETER Experiment Name: At_Drought_P Parameter: Treatment Value: Drought vs. No Drought
  misc_feature: MA Experiment ID: 20000438 Result: Up-regulated in Transcription
  misc_feature: MA Experiment 20000438 PARAMETER Experiment Name: At_Shoots__P Parameter: Age (day) Value: 14
  misc_feature: MA Experiment 20000438 PARAMETER Experiment Name: At_Shoots__P Parameter: Tissue Value: Shoots vs. Whole Plant
  misc_feature: MA Experiment ID: 20001248 Result: Up-regulated in Transcription
  misc_feature: MA Experiment 20001248 PARAMETER Experiment Name: At_Far-red-induction_P Parameter: Age (day) Value: 7
  misc_feature: MA Experiment 20001248 PARAMETER Experiment Name: At_Far-red-induction_P Parameter: Light Value: Far-red vs. White
  misc_feature: MA Experiment 20001248 PARAMETER Experiment Name: At_Far-red-induction_P Parameter: Organism Value: A. thaliana
  misc_feature: MA Experiment 20001248 PARAMETER Experiment Name: At_Far-red-induction_P Parameter: Plant Line Value: Columbia
  misc_feature: MA Experiment 20001248 PARAMETER Experiment Name: At_Far-red-induction_P Parameter: Timepoint (hr) Value: 4
  misc_feature: MA Experiment 20001248 PARAMETER Experiment Name: At_Far-red-induction_P Parameter: Tissue Value: Whole Plant
  misc_feature: MA Experiment ID: 20001450 Result: Up-regulated in Transcription
  misc_feature: MA Experiment 20001450 PARAMETER Experiment Name: At_Far-red-induction_P Parameter: Age (day) Value: 7
  misc_feature: MA Experiment 20001450 PARAMETER Experiment Name: At_Far-red-induction_P Parameter: Light Value: Far-red vs. White
  misc_feature: MA Experiment 20001450 PARAMETER Experiment Name: At_Far-red-induction_P Parameter: Organism Value: A. thaliana
  misc_feature: MA Experiment 20001450 PARAMETER Experiment Name: At_Far-red-induction_P Parameter: Plant Line Value: Columbia
  misc_feature: MA Experiment 20001450 PARAMETER Experiment Name: At_Far-red-induction_P Parameter: Timepoint (hr) Value: 8
  misc_feature: MA Experiment 20001450 PARAMETER Experiment Name: At_Far-red-induction_P Parameter: Tissue Value: Whole Plant
  misc_feature: MA Experiment ID: 20001451 Result: Up-regulated in Transcription
  misc_feature: MA Experiment 20001451 PARAMETER Experiment Name: At_Far-red-induction_P Parameter: Age (day) Value: 7
  misc_feature: MA Experiment 20001451 PARAMETER Experiment Name: At_Far-red-induction_P Parameter: Light Value: Far-red vs. White
  misc_feature: MA Experiment 20001451 PARAMETER Experiment Name: At_Far-red-induction_P Parameter: Organism Value: A. thaliana
  misc_feature: MA Experiment 20001451 PARAMETER Experiment Name: At_Far-red-induction_P Parameter: Plant Line Value: Columbia
  misc_feature: MA Experiment 20001451 PARAMETER Experiment Name: At_Far-red-induction_P Parameter: Timepoint (hr) Value: 24
  misc_feature: MA Experiment 20001451 PARAMETER Experiment Name: At_Far-red-induction_P Parameter: Tissue Value: Whole Plant
  misc_feature: MA Experiment ID: 20001555 Result: Down-regulated in Transcription
  misc_feature: MA Experiment 20001555 PARAMETER Experiment Name: At_Drought_Soil_Dry_P Parameter: Age (day) Value: 24
  misc_feature: MA Experiment 20001555 PARAMETER Experiment Name: At_Drought_Soil_Dry_P Parameter: Organism Value: A. thaliana
  misc_feature: MA Experiment 20001555 PARAMETER Experiment Name: At_Drought_Soil_Dry_P Parameter: Plant Line Value: WS
  misc_feature: MA Experiment 20001555 PARAMETER Experiment Name: At_Drought_Soil_Dry_P Parameter: Post Timepoint (hr) Value: None
  misc_feature: MA Experiment 20001555 PARAMETER Experiment Name: At_Drought_Soil_Dry_P Parameter: Post-Treatment Value: None
  misc_feature: MA Experiment 20001555 PARAMETER Experiment Name: At_Drought_Soil_Dry_P Parameter: Timepoint (day) Value: 10
  misc_feature: MA Experiment 20001555 PARAMETER Experiment Name: At_Drought_Soil_Dry_P Parameter: Treatment Value: Drought vs. No Drought
  misc_feature: MA Experiment ID: 20001556 Result: Down-regulated in Transcription
  misc_feature: MA Experiment 20001556 PARAMETER Experiment Name: At_Drought_Soil_Dry_P Parameter: Age (day) Value: 26
  misc_feature: MA Experiment 20001556 PARAMETER Experiment Name: At_Drought_Soil_Dry_P Parameter: Organism Value: A. thaliana
  misc_feature: MA Experiment 20001556 PARAMETER Experiment Name: At_Drought_Soil_Dry_P Parameter: Plant Line Value: WS
  misc_feature: MA Experiment 20001556 PARAMETER Experiment Name: At_Drought_Soil_Dry_P Parameter: Post Timepoint (hr) Value: None
  misc_feature: MA Experiment 20001556 PARAMETER Experiment Name: At_Drought_Soil_Dry_P Parameter: Post-Treatment Value: None
  misc_feature: MA Experiment 20001556 PARAMETER Experiment Name: At_Drought_Soil_Dry_P Parameter: Timepoint (day) Value: 12
  misc_feature: MA Experiment 20001556 PARAMETER Experiment Name: At_Drought_Soil_Dry_P Parameter: Treatment Value: Drought vs. No Drought
  misc_feature: MA Experiment ID: 20001558 Result: Down-regulated in Transcription
  misc_feature: MA Experiment 20001558 PARAMETER Experiment Name: At_Drought_Soil_Dry_P Parameter: Age (day) Value: 27
  misc_feature: MA Experiment 20001558 PARAMETER Experiment Name: At_Drought_Soil_Dry_P Parameter: Organism Value: A. thaliana
  misc_feature: MA Experiment 20001558 PARAMETER Experiment Name: At_Drought_Soil_Dry_P Parameter: Plant Line Value: WS
  misc_feature: MA Experiment 20001558 PARAMETER Experiment Name: At_Drought_Soil_Dry_P Parameter: Post Timepoint (hr) Value: 6
  misc_feature: MA Experiment 20001558 PARAMETER Experiment Name: At_Drought_Soil_Dry_P Parameter: Post-Treatment Value: Re-Water vs. No Drought
  misc_feature: MA Experiment 20001558 PARAMETER Experiment Name: At_Drought_Soil_Dry_P Parameter: Timepoint (day) Value: 13
  misc_feature: MA Experiment 20001558 PARAMETER Experiment Name: At_Drought_Soil_Dry_P Parameter: Treatment Value: Drought vs. No Drought
acgagtatataactacctttcaattctctctgcctctcatagttaatatatatacgttcacaatcacttctcttctctatttcttattcattatctcaaccctctctctctctctctcagtacaacttatcatccatcaccatatatagagaatatgagcaaaacggaagcaatcagcttgaccaaaaggggaatgttgccgccaagtagttgcaatagcctaatggaccgctctgagtcccttaagagggacagtgtgatgggcaatggtgcagccaaagtgagaggaagcttggagcgcaagaaatcaaagagttttaaggaaggagatagttattcttcgtggctcataacggaggctcctgggagtatagccgccgtgaggagagagcaagtggcggcacaacaagcactaaggaaactaaagattgctcattacggtagatccaaatcaaccattaatttcacttcttccaaagtcgtccctcttcttaaccctaaccctaaccctcatcctcagagatgcagcttcctcacccccacttctgatcctatttacgtggcctaccatgatgaagaatggggagttccagttcatgatgacaagacgttgttcgaactgctgaccctaagcggcgcacaagtaggctccgattggacttcaaccttgagaaaacgccatgactataggaaggcctttatggagtttgaggcggaagtggttgccaaactcaccgagaaagagatgaatgcaataagcatcgaatacaagatagagatgagcaaagtgagaggtgttgtggaaaacgctaaaaagatcgtagagatcaagaaagcgtttgtgtcattagagaaatacctttggggatttgtgaaccacaaaccaatctccacgaactacaagcttggacacaagattccggtcaagacatcgaagtcggagagcatcagcaaagacatggttcgtcgaggcttccggttcgtgggtcccactgtggttcactcattcatgcaagccgctggtcttacaaacgaccacttgatcacttgctgtcgccacgctccttgcactctccttgcaaccaatccctaattattaatttttaatttaattgaaagtggtgtttttatttaactttcgagtgcaaaatgtaggtttaggagaaaagagattgcagttttttaaaattggcaatgtaagataaaccagctggtttgatttttttcttgtgtgtgaggtgtttaaaatcacatgtataatggtttttgatgtatgtgtggtgtggcaaattgaaatagtaattgattttcatttgatttatctattgttcaaaatttgtt

SEQ ID NO: 98555 - protein, 312 aa, Arabidopsis thaliana
  peptide (1)..(312): Ceres Seq. ID no. 13600998
  misc_feature (126)..(304): Pfam Name: Methyladenine glycosylase Pfam Description: Methyladenine glycosylase
  misc_feature (1)..(312): Homolog of NCBI NO: 18399721 NR Description: expressed protein [Arabidopsis thaliana]
  misc_feature (1)..(312): Homolog of NCBI NO: 21536975 NR Description: unknown [Arabidopsis thaliana]
  misc_feature (1)..(309): Homolog of NCBI NO: 15241554 NR Description: expressed protein [Arabidopsis thaliana]
  misc_feature (1)..(309): Homolog of NCBI NO: 21592537 NR Description: unknown [Arabidopsis thaliana]
  misc_feature (1)..(148): Homolog of NCBI NO: 34908920 NR Description: P0691E06.10 [Oryza sativa (japonica
  misc_feature (131)..(306): Homolog of NCBI NO: 34908920 NR Description: P0691E06.10 [Oryza sativa (japonica
  misc_feature (51)..(307): Homolog of NCBI NO: 18410766 NR Description: DNA-3-methyladenine glycosylase I -related
  misc_feature (97)..(310): Homolog of NCBI NO: 38345034 NR Description: OSJNBa0029H02.18 [Oryza sativa (japonica
  misc_feature (122)..(305): Homolog of NCBI NO: 15218379 NR Description: expressed protein [Arabidopsis thaliana]
  misc_feature (122)..(305): Homolog of NCBI NO: 15220860 NR Description: DNA-3-methyladenine glycosidase -related
MSKTEAISLTKRGMLPPSSCNSLMDRSESLKRDSVMGNGAAKVRGSLERKKSKSFKEGDSYSSWLITEAPGSIAAVRREQVAAQQALRKLKIAHYGRSKSTINFTSSKVVPLLNPNPNPHPQRCSFLTPTSDPIYVAYHDEEWGVPVHDDKTLFELLTLSGAQVGSDWTSTLRKRHDYRKAFMEFEAEVVAKLTEKEMNAISIEYKIEMSKVRGVVENAKKIVEIKKAFVSLEKYLWGFVNHKPISTNYKLGHKIPVKTSKSESISKDMVRRGFRFVGPTVVHSFMQAAGLTNDHLITCCRHAPCTLLATNP

SEQ ID NO: 98556 - protein, 299 aa, Arabidopsis thaliana
  peptide (1)..(299): Ceres Seq. ID no. 13600999
  misc_feature (113)..(291): Pfam Name: Methyladenine glycosylase Pfam Description: Methyladenine glycosylase
  misc_feature (1)..(299): Homolog of NCBI NO: 18399721 NR Description: expressed protein [Arabidopsis thaliana]
  misc_feature (1)..(299): Homolog of NCBI NO: 21536975 NR Description: unknown [Arabidopsis thaliana]
  misc_feature (1)..(296): Homolog of NCBI NO: 15241554 NR Description: expressed protein [Arabidopsis thaliana]
  misc_feature (1)..(296): Homolog of NCBI NO: 21592537 NR Description: unknown [Arabidopsis thaliana]
  misc_feature (1)..(135): Homolog of NCBI NO: 34908920 NR Description: P0691E06.10 [Oryza sativa (japonica
  misc_feature (118)..(293): Homolog of NCBI NO: 34908920 NR Description: P0691E06.10 [Oryza sativa (japonica
  misc_feature (38)..(294): Homolog of NCBI NO: 18410766 NR Description: DNA-3-methyladenine glycosylase I -related
  misc_feature (84)..(297): Homolog of NCBI NO: 38345034 NR Description: OSJNBa0029H02.18 [Oryza sativa (japonica
  misc_feature (109)..(292): Homolog of NCBI NO: 15218379 NR Description: expressed protein [Arabidopsis thaliana]
  misc_feature (109)..(292): Homolog of NCBI NO: 15220860 NR Description: DNA-3-methyladenine glycosidase -related
MLPPSSCNSLMDRSESLKRDSVMGNGAAKVRGSLERKKSKSFKEGDSYSSWLITEAPGSIAAVRREQVAAQQALRKLKIAHYGRSKSTINFTSSKVVPLLNPNPNPHPQRCSFLTPTSDPIYVAYHDEEWGVPVHDDKTLFELLTLSGAQVGSDWTSTLRKRHDYRKAFMEFEAEVVAKLTEKEMNAISIEYKIEMSKVRGVVENAKKIVEIKKAFVSLEKYLWGFVNHKPISTNYKLGHKIPVKTSKSESISKDMVRRGFRFVGPTVVHSFMQAAGLTNDHLITCCRHAPCTLLATNP

SEQ ID NO: 98557 - protein, 289 aa, Arabidopsis thaliana
  peptide (1)..(289): Ceres Seq. ID no. 13601000
  misc_feature (103)..(281): Pfam Name: Methyladenine glycosylase Pfam Description: Methyladenine glycosylase
  misc_feature (1)..(289): Homolog of NCBI NO: 18399721 NR Description: expressed protein [Arabidopsis thaliana]
  misc_feature (1)..(289): Homolog of NCBI NO: 21536975 NR Description: unknown [Arabidopsis thaliana]
  misc_feature (1)..(286): Homolog of NCBI NO: 15241554 NR Description: expressed protein [Arabidopsis thaliana]
  misc_feature (1)..(286): Homolog of NCBI NO: 21592537 NR Description: unknown [Arabidopsis thaliana]
  misc_feature (1)..(125): Homolog of NCBI NO: 34908920 NR Description: P0691E06.10 [Oryza sativa (japonica
  misc_feature (108)..(283): Homolog of NCBI NO: 34908920 NR Description: P0691E06.10 [Oryza sativa (japonica
  misc_feature (28)..(284): Homolog of NCBI NO: 18410766 NR Description: DNA-3-methyladenine glycosylase I -related
  misc_feature (74)..(287): Homolog of NCBI NO: 38345034 NR Description: OSJNBa0029H02.18 [Oryza sativa (japonica
  misc_feature (99)..(282): Homolog of NCBI NO: 15218379 NR Description: expressed protein [Arabidopsis thaliana]
  misc_feature (99)..(282): Homolog of NCBI NO: 15220860 NR Description: DNA-3-methyladenine glycosidase -related
MDRSESLKRDSVMGNGAAKVRGSLERKKSKSFKEGDSYSSWLITEAPGSIAAVRREQVAAQQALRKLKIAHYGRSKSTINFTSSKVVPLLNPNPNPHPQRCSFLTPTSDPIYVAYHDEEWGVPVHDDKTLFELLTLSGAQVGSDWTSTLRKRHDYRKAFMEFEAEVVAKLTEKEMNAISIEYKIEMSKVRGVVENAKKIVEIKKAFVSLEKYLWGFVNHKPISTNYKLGHKIPVKTSKSESISKDMVRRGFRFVGPTVVHSFMQAAGLTNDHLITCCRHAPCTLLATNP

SEQ ID NO: 98558 - DNA, 1125 bp, Arabidopsis thaliana
  misc_feature (1)..(1125): Ceres Seq. ID no. 13601001
  misc_feature: MA Experiment ID: 108576 Result: Up-regulated in Transcription
  misc_feature: MA Experiment 108576 PARAMETER Experiment Name: At_42deg_Heat_cDNA_P Parameter: Temperature (deg C) Value: 42 vs. 22
  misc_feature: MA Experiment 108576 PARAMETER Experiment Name: At_42deg_Heat_cDNA_P Parameter: Timepoint (hr) Value: 1
  misc_feature: MA Experiment 108576 PARAMETER Experiment Name: At_42deg_Heat_cDNA_P Parameter: Tissue Value: Aerial
  misc_feature: MA Experiment ID: 108668 Result: Up-regulated in Transcription
  misc_feature: MA Experiment 108668 PARAMETER Experiment Name: At_2mM_SA_cDNA_P Parameter: Plant Line Value: WS
  misc_feature: MA Experiment 108668 PARAMETER Experiment Name: At_2mM_SA_cDNA_P Parameter: Timepoint (hr) Value: 6
  misc_feature: MA Experiment 108668 PARAMETER Experiment Name: At_2mM_SA_cDNA_P Parameter: Treatment Value: 2mM SA vs. No Treatment
  misc_feature: MA Experiment ID: 20000111 Result: Up-regulated in Transcription
  misc_feature: MA Experiment 20000111 PARAMETER Experiment Name: At_42deg_Heat_cDNA_P Parameter: Temperature (deg C) Value: 42 vs. 22
  misc_feature: MA Experiment 20000111 PARAMETER Experiment Name: At_42deg_Heat_cDNA_P Parameter: Timepoint (hr) Value: 6
  misc_feature: MA Experiment 20000111 PARAMETER Experiment Name: At_42deg_Heat_cDNA_P Parameter: Tissue Value: Aerial
  misc_feature: MA Experiment ID: 20000112 Result: Up-regulated in Transcription
  misc_feature: MA Experiment 20000112 PARAMETER Experiment Name: At_42deg_Heat_cDNA_P Parameter: Temperature (deg C) Value: 42 vs. 22
  misc_feature: MA Experiment 20000112 PARAMETER Experiment Name: At_42deg_Heat_cDNA_P Parameter: Timepoint (hr) Value: 2
  misc_feature: MA Experiment 20000112 PARAMETER Experiment Name: At_42deg_Heat_cDNA_P Parameter: Tissue Value: Aerial
  misc_feature: MA Experiment ID: 20000113 Result: Up-regulated in Transcription
  misc_feature: MA Experiment 20000113 PARAMETER Experiment Name: At_42deg_Heat_cDNA_P Parameter: Temperature (deg C) Value: 42 vs. 22
  misc_feature: MA Experiment 20000113 PARAMETER Experiment Name: At_42deg_Heat_cDNA_P Parameter: Timepoint (hr) Value: 8
  misc_feature: MA Experiment 20000113 PARAMETER Experiment Name: At_42deg_Heat_cDNA_P Parameter: Tissue Value: Aerial
  misc_feature: MA Experiment ID: 20000144 Result: Up-regulated in Transcription
  misc_feature: MA Experiment 20000144 PARAMETER Experiment Name: At_42deg_Heat_cDNA_P Parameter: Temperature (deg C) Value: 42 vs. 22
  misc_feature: MA Experiment 20000144 PARAMETER Experiment Name: At_42deg_Heat_cDNA_P Parameter: Timepoint (hr) Value: 1
  misc_feature: MA Experiment 20000144 PARAMETER Experiment Name: At_42deg_Heat_cDNA_P Parameter: Tissue Value: Aerial
  misc_feature: MA Experiment ID: 20000173 Result: Up-regulated in Transcription
  misc_feature: MA Experiment 20000173 PARAMETER Experiment Name: At_42deg_Heat_P Parameter: Age (day) Value: 14
  misc_feature: MA Experiment 20000173 PARAMETER Experiment Name: At_42deg_Heat_P Parameter: Organism Value: A. thaliana
  misc_feature: MA Experiment 20000173 PARAMETER Experiment Name: At_42deg_Heat_P Parameter: Plant Line Value: WS
  misc_feature: MA Experiment 20000173 PARAMETER Experiment Name: At_42deg_Heat_P Parameter: Temperature (deg C) Value: 42 vs. 22
  misc_feature: MA Experiment 20000173 PARAMETER Experiment Name: At_42deg_Heat_P Parameter: Timepoint (hr) Value: 6
  misc_feature: MA Experiment 20000173 PARAMETER Experiment Name: At_42deg_Heat_P Parameter: Tissue Value: Aerial
  misc_feature: MA Experiment ID: 20000182 Result: Up-regulated in Transcription
  misc_feature: MA Experiment 20000182 PARAMETER Experiment Name: At_2mM_SA_P Parameter: Age (day) Value: 14
  misc_feature: MA Experiment 20000182 PARAMETER Experiment Name: At_2mM_SA_P Parameter: Organism Value: A. thaliana
  misc_feature: MA Experiment 20000182 PARAMETER Experiment Name: At_2mM_SA_P Parameter: Plant Line Value: WS
  misc_feature: MA Experiment 20000182 PARAMETER Experiment Name: At_2mM_SA_P Parameter: Timepoint (hr) Value: 6
  misc_feature: MA Experiment 20000182 PARAMETER Experiment Name: At_2mM_SA_P Parameter: Tissue Value: Aerial
  misc_feature: MA Experiment 20000182 PARAMETER Experiment Name: At_2mM_SA_P Parameter: Treatment Value: 2mM SA vs. No Treatment
attttgcatagaagagagagaggcggagagagaggaaagtgaagaagcaatcgtgagagactctctcgagtcttccctgagtcactcctctcctctcacacctttttgcttcgcgattaagagtcagagagagagagatagtaaacatcgaacgtcttccatttcatcttccttcgattaccttgttagggttttgtattttggcttctggattcttcttcactatgcataagttgagcagaagcaaccgtgacaaacttcagcagttcgtggctatcacaggagctagtgagaagaatgctcttcaggctctcaaagccagtgattggcaccttgaagcagcgtttgatgtgttttacagccagcctcaaccaagaagcaatgctgctgaagtaagacgcttggaggagctctacaatagatataaagacccgtattctgatatgattcttgcggagggtatctcggttctgtgtaatgatcttgaggtggaaccgcaagacatagtcacgttggttctttcgtggcatatgaatgctgcaacagcgtgtgagttttccaggcaagaatttatcagtggattacaggcattaggtgtagattcaatcgggaagttgcaggaaaagctgccatttatgcgttctgagcttaaagatgaacaaaagttccatgagatatacaactttgcttttgggtgggcgaaagagaaggggcagaaatctcttgccttagacacagcgattgggatgtggcagttgctctttgcagaaagagagtggcctttggtaactcactggtgtgatttcttgcaggatcgtcataacaaggccatatctaaggacacatgggcacagctactggaattttcaaggatggtcgacccagtgctgtcgaattacgatgcagaaggagcatggccttacctgattgatgaattcgttgagtatttgtatgacaaaaatgtcgttgagaagtgaccagccaactgggagaagtaatcaactctatttgacaatgttcctttcttctcattattttaaatagacttgcttatctcacagatttttctattgtgtttgtcagaatctttaaattgatgattaaataagtaagcttttcaacctt

SEQ ID NO: 98559 - protein, 250 aa, Arabidopsis thaliana; identical to SEQ ID NO: 21216
  peptide (1)..(250): Ceres Seq. ID no. 13601002
  misc_feature (128)..(243): Pfam Name: Domain of unknown function (DUF298) Pfam Description: Domain of unknown function (DUF298)
  misc_feature (1)..(250): Homolog of NCBI NO: 18399737 NR Description: expressed protein [Arabidopsis thaliana] gb|AAF04863.1~gene_id:MBK21.14~similar to unknown protein thaliana] >gi|23297357|gb|AAN12949.1| unknown protein
  misc_feature (1)..(250): Homolog of NCBI NO: 15292985 NR Description: unknown protein [Arabidopsis thaliana]
  misc_feature (1)..(241): Homolog of NCBI NO: 34784120 NR Description: Unknown (protein for MGC:66414) [Danio rerio]
  misc_feature (1)..(241): Homolog of NCBI NO: 34784818 NR Description: RP42 homolog [Homo sapiens]
  misc_feature (1)..(241): Homolog of NCBI NO: 18700658 NR Description: leucine zipper protein [Homo sapiens]
  misc_feature (1)..(241): Homolog of NCBI NO: 32966900 NR Description: leucine zipper protein [Branchiostoma belcheri
  misc_feature (1)..(241): Homolog of NCBI NO: 6166507 NR Description: RP42 [Mus musculus] >gi|12842984|dbj|BAB25813.1| protein product [Mus musculus] >gi|18044904|gb|AAH20161.1| testis transcript 3, pseudogene [Mus musculus]
  misc_feature (2)..(241): Homolog of NCBI NO: 34857167 NR Description: similar to RP42 homolog [Rattus norvegicus]
  misc_feature (1)..(246): Homolog of NCBI NO: 24664675 NR Description: CG7427-PA [Drosophila melanogaster]
  misc_feature (1)..(241): Homolog of NCBI NO: 15826860 NR Description: testis derived transcript 3 [Mus musculus]

SEQ ID NO: 98560 - protein, 177 aa, Arabidopsis thaliana; identical to SEQ ID NO: 21217
  peptide (1)..(177): Ceres Seq. ID no. 13601003
  misc_feature (55)..(170): Pfam Name: Domain of unknown function (DUF298) Pfam Description: Domain of unknown function (DUF298)
  misc_feature (1)..(177): Homolog of NCBI NO: 18399737 NR Description: expressed protein [Arabidopsis thaliana] gb|AAF04863.1~gene_id:MBK21.14~similar to unknown protein thaliana] >gi|23297357|gb|AAN12949.1| unknown protein
  misc_feature (1)..(177): Homolog of NCBI NO: 15292985 NR Description: unknown protein [Arabidopsis thaliana]
  misc_feature (1)..(168): Homolog of NCBI NO: 34784120 NR Description: Unknown (protein for MGC:66414) [Danio rerio]
  misc_feature (1)..(168): Homolog of NCBI NO: 34784818 NR Description: RP42 homolog [Homo sapiens]
  misc_feature (1)..(168): Homolog of NCBI NO: 18700658 NR Description: leucine zipper protein [Homo sapiens]
  misc_feature (1)..(168): Homolog of NCBI NO: 32966900 NR Description: leucine zipper protein [Branchiostoma belcheri
  misc_feature (1)..(168): Homolog of NCBI NO: 6166507 NR Description: RP42 [Mus musculus] >gi|12842984|dbj|BAB25813.1| protein product [Mus musculus] >gi|18044904|gb|AAH20161.1| testis transcript 3, pseudogene [Mus musculus]
  misc_feature (1)..(168): Homolog of NCBI NO: 34857167 NR Description: similar to RP42 homolog [Rattus norvegicus]
  misc_feature (1)..(173): Homolog of NCBI NO: 24664675 NR Description: CG7427-PA [Drosophila melanogaster]
  misc_feature (1)..(168): Homolog of NCBI NO: 15826860 NR Description: testis derived transcript 3 [Mus musculus]

SEQ ID NO: 98561 - protein, 148 aa, Arabidopsis thaliana; identical to SEQ ID NO: 21218
  peptide (1)..(148): Ceres Seq. ID no. 13601004
  misc_feature (26)..(141): Pfam Name: Domain of unknown function (DUF298) Pfam Description: Domain of unknown function (DUF298)
  misc_feature (1)..(148): Homolog of NCBI NO: 18399737 NR Description: expressed protein [Arabidopsis thaliana] gb|AAF04863.1~gene_id:MBK21.14~similar to unknown protein thaliana] >gi|23297357|gb|AAN12949.1| unknown protein
  misc_feature (1)..(148): Homolog of NCBI NO: 15292985 NR Description: unknown protein [Arabidopsis thaliana]
  misc_feature (1)..(139): Homolog of NCBI NO: 34784120 NR Description: Unknown (protein for MGC:66414) [Danio rerio]
  misc_feature (1)..(139): Homolog of NCBI NO: 34784818 NR Description: RP42 homolog [Homo sapiens]
  misc_feature (1)..(139): Homolog of NCBI NO: 18700658 NR Description: leucine zipper protein [Homo sapiens]
  misc_feature (1)..(139): Homolog of NCBI NO: 32966900 NR Description: leucine zipper protein [Branchiostoma belcheri
  misc_feature (1)..(139): Homolog of NCBI NO: 6166507 NR Description: RP42 [Mus musculus] >gi|12842984|dbj|BAB25813.1| protein product [Mus musculus] >gi|18044904|gb|AAH20161.1| testis transcript 3, pseudogene [Mus musculus]
  misc_feature (1)..(139): Homolog of NCBI NO: 34857167 NR Description: similar to RP42 homolog [Rattus norvegicus]
  misc_feature (1)..(144): Homolog of NCBI NO: 24664675 NR Description: CG7427-PA [Drosophila melanogaster]
  misc_feature (1)..(139): Homolog of NCBI NO: 15826860 NR Description: testis derived transcript 3 [Mus musculus]

SEQ ID NO: 98562 - DNA, 6308 bp, Arabidopsis thaliana
  misc_feature (1)..(6308): Ceres Seq. ID no. 13601005
  misc_feature: MA Experiment ID: 20000306 Result: Down-regulated in Transcription
  misc_feature: MA Experiment 20000306 PARAMETER Experiment Name: At_Germinating_Seeds_Sub_P Parameter: Age (hr) Value: 6 vs. 0
  misc_feature: MA Experiment 20000306 PARAMETER Experiment Name: At_Germinating_Seeds_Sub_P Parameter: Organism Value: A. thaliana
  misc_feature: MA Experiment 20000306 PARAMETER Experiment Name: At_Germinating_Seeds_Sub_P Parameter: Plant Line Value: WS
  misc_feature: MA Experiment 20000306 PARAMETER Experiment Name: At_Germinating_Seeds_Sub_P Parameter: Tissue Value: Germinating Seeds
  misc_feature: MA Experiment ID: 20000307 Result: Down-regulated in Transcription
  misc_feature: MA Experiment 20000307 PARAMETER Experiment Name: At_Germinating_Seeds_Sub_P Parameter: Age (hr) Value: 24 vs. 0
  misc_feature: MA Experiment 20000307 PARAMETER Experiment Name: At_Germinating_Seeds_Sub_P Parameter: Organism Value: A. thaliana
  misc_feature: MA Experiment 20000307 PARAMETER Experiment Name: At_Germinating_Seeds_Sub_P Parameter: Plant Line Value: WS
  misc_feature: MA Experiment 20000307 PARAMETER Experiment Name: At_Germinating_Seeds_Sub_P Parameter: Tissue Value: Germinating Seeds
  misc_feature: MA Experiment ID: 20000314 Result: Up-regulated in Transcription
  misc_feature: MA Experiment 20000314 PARAMETER Experiment Name: At_14day_Shoots-Roots_Sub_P Parameter: Age (day) Value: 14
  misc_feature: MA Experiment 20000314 PARAMETER Experiment Name: At_14day_Shoots-Roots_Sub_P Parameter: Organism Value: A. thaliana
  misc_feature: MA Experiment 20000314 PARAMETER Experiment Name: At_14day_Shoots-Roots_Sub_P Parameter: Plant Line Value: WS
  misc_feature: MA Experiment 20000314 PARAMETER Experiment Name: At_14day_Shoots-Roots_Sub_P Parameter: Tissue Value: Roots vs. Whole Plant
  misc_feature: MA Experiment ID: 20000315 Result: Down-regulated in Transcription
  misc_feature: MA Experiment 20000315 PARAMETER Experiment Name: At_14day_Shoots-Roots_Sub_P Parameter: Age (day) Value: 14
  misc_feature: MA Experiment 20000315 PARAMETER Experiment Name: At_14day_Shoots-Roots_Sub_P Parameter: Organism Value: A. thaliana
  misc_feature: MA Experiment 20000315 PARAMETER Experiment Name: At_14day_Shoots-Roots_Sub_P Parameter: Plant Line Value: WS
  misc_feature: MA Experiment 20000315 PARAMETER Experiment Name: At_14day_Shoots-Roots_Sub_P Parameter: Tissue Value: Shoots vs. Whole Plant
  misc_feature: MA Experiment ID: 20000355 Result: Up-regulated in Transcription
  misc_feature: MA Experiment 20000355 PARAMETER Experiment Name: At_Siliques_Sub_P Parameter: Age (day) Value: 21
  misc_feature: MA Experiment 20000355 PARAMETER Experiment Name: At_Siliques_Sub_P Parameter: Organism Value: A. thaliana
  misc_feature: MA Experiment 20000355 PARAMETER Experiment Name: At_Siliques_Sub_P Parameter: Plant Line Value: WS
  misc_feature: MA Experiment 20000355 PARAMETER Experiment Name: At_Siliques_Sub_P Parameter: Tissue Value: Less Than 5mm Siliques vs. Whole Plant
  misc_feature: MA Experiment ID: 20000440 Result: Up-regulated in Transcription
  misc_feature: MA Experiment 20000440 PARAMETER Experiment Name: At_Closed-Flower__Sub_P Parameter: Tissue Value: Closed Flower vs. Whole Plant
cactctgcagtcactaaccatcttcttcttggaagattttgcttaaaggcgttagtaatggcgtctaaaggtggtaaatctaaacctgatatagtaatggcgtccaagagtgggaaatctaaacctgataatgaatccagagctaagcgtcagaagacgctcgaagctcctaaagaaccacgtcgtcctaaaactcactgggaccatgtattggaggagatggcttggctgtcaaaggactttgagtctgagaggaaatggaagctggcgcaggcgaagaaggttgctttgagagccagcaaaggaatgctagatcaggcatctagggaagaaaggaagctaaaggaagaagaacagcgacttcggaaagtagccctcaatatctcgaaagacatgaaaaagttttggatgaaagttgagaagctggtgctttacaagcatcagttggtacgcaatgagaagaagaagaaggctatggacaagcaacttgaatttctgttaggccaaactgagaggtactcaaccatgttggcagaaaatttagtggagccttataaacagggccaaaatactccttcaaaacctctactaactatcgaatcaaaaagtgatgaggagagggcagaacagatacctccagagataaattcttgtcttgaatcaggaagtcctgaactcgatgaggattatgatctaaaatctgaggatgagaccgaagatgatgaagatactattgaggaggatgaaaaacacttcaccaaacgtgaaagacaggaagagttggaagctttgcaaaatgaagtggatctaccagttgaggagctgctcagacgttatacctctggaagagttagccgagaaaccagcccagtaaaagatgaaaatgaggacaatctgacctcagttagccgagtaaccagcccagtaaaagatgaaaatcaggacaatctggcctcagtaggtcaagatcatggagaggcagacaagaacaatcttgcagcttctgaagaaactgaagggaacccaagtgttcgtcgttctaatgatagctatggtcatttggcaatatccgagacccattcacatgaccttgagccaggcatgacgactgcatctgtgaagtccagaaaggaagatcatacctatgattttaacgatgaacaggaagatgttgactttgttcttgccaatggtgaggaaaaggatgatgaggcgacattggctgtcgaagaggaactggcgaaagcagataatgaagatcatgtcgaagagattgccctgctgcaaaaagagagtgaaatgcctattgaagtactacttgcaaggtataaggaggatttcggtggcaaggatatatctgaggatgaatctgaatcttcatttgctgtatctgaagactctatagtagactctgacgaaaataggcagcaagctgatttagatgatgacaacgttgatttaacagaatgtaagctagatccagagccttgctcagaaaatgttgaaggcacattccatgaagtagcagaagataatgataaagatagtagtgataaaattgctgatgcagcagcagcagcaagatctgcccagccaactggatttacatactccacaacaaaagttcgaacgaaactgccgtttctacttaagcattctctgcgtgagtaccaacacattggtttggactggcttgtcacgatgtatgagaaaaagttgaacggtattctggctgatgaaatgggtcttggaaagacaattatgaccattgctcttctagctcaccttgcatgtgataagggaatatggggtccccatctgattgtggttcctacaagtgtgatgcttaattgggagactgagtttcttaaatggtgtcctgcatttaaaattctcacctactttggtagtgcaaaggagcggaaactcaagagacaaggatggatgaagcttaactcatttcatgtatgcataacaacctataggctagttattcaggacagtaaaatgttcaagcgcaagaagtggaaatacttgattcttgacgaagcccatttaattaagaattggaagtctcagagatggcagacactattgaacttcaattctaaacgcagaattttgttgactggtacacccctgcagaatgatcttatggaactgtggtcacttatgcactttctgatgccacatgtctttcagtctcaccaggaattcaaagactggttctgtaacccaatagcagggatggtcgagggacaagaaaaaatcaacaaagaagttattgatcgcttacataatgtcctccgtcctttccttctacggcgcctaaaaagggatgtggagaagcaacttccttcgaaacatgagcatgttattttctgtagactgtctaagaggcagcgcaacttgtatgaggacttcatagcaagcacagaaacacaggctacgcttaccagtggaagcttttttgggatgataagtatcataatgcagttgcggaaagtttgtaatcatcctgatctctttgagggtcgtcctattgtaagttcttttgatatggctggcattgatgtgcagttgagttcaacaatctgttcgctactattggaaagtccgttttccaaggttgatcttgaggctttgggattcttattcacccatcttgatttttctatgacttcttgggaaggagatgagatcaaagctatttcaacaccctcagaattaatcaaacagcgtgtgaacttgaaggatgatctagaagcaatccctttgagtccaaaaaaccgcaaaaatctgcaagggacaaatatttttgaagaaattcgtaaggctgtctttgaggaaaggatacaagaatctaaggatcgggcagcagccattgcatggtggaattctttgagatgccagagaaagccgacttactctacatcactaagaactcttttaaccattaagggtcctcttgatgatcttaaagctaactgttcatcttacatgtattcatcaatcctcgctgacatagtcctttcaccaatcgagcgttttcagaagatgattgagctagttgaagctttcacatttgcgattccagctgcacgagtgccttcacctacttgctggtgcagtaaaagtgactctcctgtttttcttagtccatcgtacaaggaaaaagttacagatttattgtcacctcttttatctccaattagacctgcaatcgttaggagacaagtatattttccagataggcgactgatacagtttgattgtggtaagctgcaggagcttgctatgttattgaggaaattaaaatttgggggtcacagagcgttgatattcacgcaaatgaccaagatgcttgacgtcttggaggctttcattaatttatatggttatacctacatgcgtcttgatggctctacacctccagaagagaggcagacgttaatgcagcggtttaatacaaatcccaagatctttcttttcattttgtcaacccgaagtgggggcgttggcatcaaccttgtgggtgcggacacagttatattctatgacagtgactggaatcctgctatggatcaacaagctcaagatcgctgccacaggataggtcagacacgtgaagtgcatatataccggttgataagtgagagcaccattgaggagaatatcttaaagaaagcaaaccagaagcgtgtgcttgataacctagtaattcaaaacggtgagtataacaccgaatttttcaagaagctcgatcccatggaattgttctctgggcataaggctctgactacaaaggatgaaaaggaaacaagcaagcattgtggggcggatatacctctatcaaatgcagatgttgaggctgctctaaaacaggccgaagatgaggcagattatatggctctcaaaagagtagaacaagaagaagctgtggacaatcaagagttcacagaagaacctgtagagagaccagaagacgatgagctagtaaatgaagatgacataaaggctgatgagcctgctgatcaaggtttagttgcagcagggccggccaaagaagaaatgtcattgttacatagtgatatcagggatgagagagctgttatcactacttcaagccaagaagatgacactgatgtattagatgatgtcaagcaaatggctgcagcagcggctgatgctggacaagctatctcatcttttgagaatcagctacgtcctattgatagatatgcgattagatttttagagctttgggaccccatcattgttgaggctgcaatggaaaatgaagcaggatttgaagagaaagaatgggaacttgaccacattgagaagtacaaggaggaaatggaagctgagattgatgatggggaagagcctcttgtttacgagaaatgggatgctgattttgcaactgaggcatacaggcagcaagtggaagtcttagctcagcaccagttaatggaagatttggaaaatgaagctagagagagggaagcggcagaggtggctgaaatggttttgacacagaacgaaagtgctcatgtactgaagcctaagaagaagaaaaaggcgaagaaagccaaatataaatccctgaagaaaggatcactggctgccgaatcaaaacatgtgaagtcagttgtgaaaattgaagattctactgatgatgataatgaagaattcggctatgtgagtagcagtgactcggatatggttacaccgctttcgcggatgcatatgaagggcaagaaaagagatttaattgttgacactgatgaagagaagacctcaaagaagaaagcaaagaagcacaagaagtctctcccgaattcagatatcaaatataagcaaacaagtgcactacttgatgaactggaaccatcaaagccgtctgacagtatggttgttgataatgagttgaaattgacgaacaggggtaaaactgtagggaaaaaattcatcacttccatgccaataaagcgtgttcttatgatcaagccagagaaattgaagaaaggaaatctgtggtctagagattgtgttccctcgcctgattcttggttgccgcaggaagatgctatattgtgtgccatggttcatgaatatgggcctaactggaattttgttagcggaactctttatggaatgacagctggtggggcttacagaggacggtatcggcatcctgcatattgttgtgagagatatagagagcttattcaacgacatattttgtctgcttccgacagtgcagtgaacgagaagaacctcaacacaggttctgggaaggctctccttaaagtcactgaggaaaatattcggacactcctaaatgttgcagctgagcagccagatacggagatgctcctacaaaaacatttttcttgcttgctgtcatcaatttggaggacgtctacccgcactgggaatgatcaaatgctctccttaaacagtcctattttcaacagacagtttatgggttccgtgaatcacacccaagatttagctagaaagccttggcaggggatgaaggtcaccagcttaagtagaaagttgttagaatccgctctccaggattctggcccgagtcagccagacaatactatttcccgttctaggttgcaggagactcaacctatcaataaattgggattagagttaaccttggaattcccacgtggcaatgatgattccctgaatcagtttccaccgatgattagtctgtccattgatgggtcagattcattaaattatgtgaacgagcccccaggggaagatgttctaaaaggttctagggttgctgcagagaaccgttacaggaatgctgcaaatgcttgtattgaagattcatttggatgggcttcaaacacgttcccagccaatgatctgaagtcaagaacaggcacgaaagcacagtccctggggaaacacaagctatccgcctcagactcagccaagtctacaaaaagcaaacaccgcaaactcttagcagagcaattggaaggggcatgggttaggccaaatgatccgaatctcaagtttgatttcacacctggtgatagggaggaggaggaggagcaggaggtggatgagaaagcgaattcagcagagatagagatgataagctgttcacaatggtatgatccattctttacctcaggccttgatgattgctcattagcttcggatatctcagaaatagagtagtaaaaaagccttttgtaaaagtaaaaacctgcttgcagaagaaaatgctgatgattgtggatgatcattttcttaacctcccactt

SEQ ID NO: 98563 - protein, 2073 aa, Arabidopsis thaliana
  peptide (1)..(2073): Ceres Seq. ID no. 13601006
  misc_feature (557)..(843): Pfam Name: SNF2 family N-terminal domain Pfam Description: SNF2 family N-terminal domain
  misc_feature (128)..(918): Homolog of NCBI NO: 5730067 NR Description: Snf2-related CBP activator protein [Homo sapiens]
  misc_feature (949)..(1400): Homolog of NCBI NO: 5730067 NR Description: Snf2-related CBP activator protein [Homo sapiens]
  misc_feature (250)..(953): Homolog of NCBI NO: 28573600 NR Description: domino CG9696-PE [Drosophila melanogaster]
  misc_feature (995)..(1329): Homolog of NCBI NO: 28573600 NR Description: domino CG9696-PE [Drosophila melanogaster]
  misc_feature (250)..(953): Homolog of NCBI NO: 24656962 NR Description: domino CG9696-PD [Drosophila melanogaster]
  misc_feature (995)..(1329): Homolog of NCBI NO: 24656962 NR Description: domino CG9696-PD [Drosophila melanogaster]
  misc_feature (250)..(953): Homolog of NCBI NO: 24656966 NR Description: domino CG9696-PA [Drosophila melanogaster]
  misc_feature (995)..(1329): Homolog of NCBI NO: 24656966 NR Description: domino CG9696-PA [Drosophila melanogaster]
  misc_feature (250)..(953): Homolog of NCBI NO: 14090511 NR Description: DOMINO B [Drosophila melanogaster]
  misc_feature (1054)..(1329): Homolog of NCBI NO: 14090511 NR Description: DOMINO B [Drosophila melanogaster]
HSAVTNHLLLGRFCLKALVMASKGGKSKPDIVMASKSGKSKPDNESRAKRQKTLEAPKEPRRPKTHWDHVLEEMAWLSKDFESERKWKLAQAKKVALRASKGMLDQASREERKLKEEEQRLRKVALNISKDMKKFWMKVEKLVLYKHQLVRNEKKKKAMDKQLEFLLGQTERYSTMLAENLVEPYKQGQNTPSKPLLTIESKSDEERAEQIPPEINSCLESGSPELDEDYDLKSEDETEDDEDTIEEDEKHFTKRERQEELEALQNEVDLPVEELLRRYTSGRVSRETSPVKDENEDNLTSVSRVTSPVKDENQDNLASVGQDHGEADKNNLAASEETEGNPSVRRSNDSYGHLAISETHSHDLEPGMTTASVKSRKEDHTYDFNDEQEDVDFVLANGEEKDDEATLAVEEELAKADNEDHVEEIALLQKESEMPIEVLLARYKEDFGGKDISEDESESSFAVSEDSIVDSDENRQQADLDDDNVDLTECKLDPEPCSENVEGTFHEVAEDNDKDSSDKIADAAAAARSAQPTGFTYSTTKVRTKLPFLLKHSLREYQHIGLDWLVTMYEKKLNGILADEMGLGKTIMTIALLAHLACDKGIWGPHLIVVPTSVMLNWETEFLKWCPAFKILTYFGSAKERKLKRQGWMKLNSFHVCITTYRLVIQDSKMFKRKKWKYLILDEAHLIKNWKSQRWQTLLNFNSKRRILLTGTPLQNDLMELWSLMHFLMPHVFQSHQEFKDWFCNPIAGMVEGQEKINKEVIDRLHNVLRPFLLRRLKRDVEKQLPSKHEHVIFCRLSKRQRNLYEDFIASTETQATLTSGSFFGMISIIMQLRKVCNHPDLFEGRPIVSSFDMAGIDVQLSSTICSLLLESPFSKVDLEALGFLFTHLDFSMTSWEGDEIKAISTPSELIKQRVNLKDDLEAIPLSPKNRKNLQGTNIFEEIRKAVFEERIQESKDRAAAIAWWNSLRCQRKPTYSTSLRTLLTIKGPLDDLKANCSSYMYSSILADIVLSPIERFQKMIELVEAFTFAIPAARVPSPTCWCSKSDSPVFLSPSYKEKVTDLLSPLLSPIRPAIVRRQVYFPDRRLIQFDCGKLQELAMLLRKLKFGGHRALIFTQMTKMLDVLEAFINLYGYTYMRLDGSTPPEERQTLMQRFNTNPKIFLFILSTRSGGVGINLVGADTVIFYDSDWNPAMDQQAQDRCHRIGQTREVHIYRLISESTIEENILKKANQKRVLDNLVIQNGEYNTEFFKKLDPMELFSGHKALTTKDEKETSKHCGADIPLSNADVEAALKQAEDEADYMALKRVEQEEAVDNQEFTEEPVERPEDDELVNEDDIKADEPADQGLVAAGPAKEEMSLLHSDIRDERAVITTSSQEDDTDVLDDVKQMAAAAADAGQAISSFENQLRPIDRYAIRFLELWDPIIVEAAMENEAGFEEKEWELDHIEKYKEEMEAEIDDGEEPLVYEKWDADFATEAYRQQVEVLAQHQLMEDLENEAREREAAEVAEMVLTQNESAHVLKPKKKKKAKKAKYKSLKKGSLAAESKHVKSVVKIEDSTDDDNEEFGYVSSSDSDMVTPLSRMHMKGKKRDLIVDTDEEKTSKKKAKKHKKSLPNSDIKYKQTSALLDELEPSKPSDSMVVDNELKLTNRGKTVGKKFITSMPIKRVLMIKPEKLKKGNLWSRDCVPSPDSWLPQEDAILCAMVHEYGPNWNFVSGTLYGMTAGGAYRGRYRHPAYCCERYRELIQRHILSASDSAVNEKNLNTGSGKALLKVTEENIRTLLNVAAEQPDTEMLLQKHFSCLLSSIWRTSTRTGNDQMLSLNSPIFNRQFMGSVNHTQDLARKPWQGMKVTSLSRKLLESALQDSGPSQPDNTISRSRLQETQPINKLGLELTLEFPRGNDDSLNQFPPMISLSIDGSDSLNYVNEPPGEDVLKGSRVAAENRYRNAANACIEDSFGWASNTFPANDLKSRTGTKAQSLGKHKLSASDSAKSTKSKHRKLLAEQLEGAWVRPNDPNLKFDFTPGDREEEEEQEVDEKANSAEIEMISCSQWYDPFFTSGLDDCSLASDISEIE

SEQ ID NO: 98564 - protein, 2054 aa, Arabidopsis thaliana
  peptide (1)..(2054): Ceres Seq. ID no. 13601007
  misc_feature (538)..(824): Pfam Name: SNF2 family N-terminal domain Pfam Description: SNF2 family N-terminal domain
  misc_feature (109)..(899): Homolog of NCBI NO: 5730067 NR Description: Snf2-related CBP activator protein [Homo sapiens]
  misc_feature (930)..(1381): Homolog of NCBI NO: 5730067 NR Description: Snf2-related CBP activator protein [Homo sapiens]
  misc_feature (231)..(934): Homolog of NCBI NO: 28573600 NR Description: domino CG9696-PE [Drosophila melanogaster]
  misc_feature (976)..(1310): Homolog of NCBI NO: 28573600 NR Description: domino CG9696-PE [Drosophila melanogaster]
  misc_feature (231)..(934): Homolog of NCBI NO: 24656962 NR Description: domino CG9696-PD [Drosophila melanogaster]
  misc_feature (976)..(1310): Homolog of NCBI NO: 24656962 NR Description: domino CG9696-PD [Drosophila melanogaster]
  misc_feature (231)..(934): Homolog of NCBI NO: 24656966 NR Description: domino CG9696-PA [Drosophila melanogaster]
  misc_feature (976)..(1310): Homolog of NCBI NO: 24656966 NR Description: domino CG9696-PA [Drosophila melanogaster]
  misc_feature (231)..(934): Homolog of NCBI NO: 14090511 NR Description: DOMINO B [Drosophila melanogaster]
  misc_feature (1035)..(1310): Homolog of NCBI NO: 14090511 NR Description: DOMINO B [Drosophila melanogaster]
MASKGGKSKPDIVMASKSGKSKPDNESRAKRQKTLEAPKEPRRPKTHWDHVLEEMAWLSKDFESERKWKLAQAKKVALRASKGMLDQASREERKLKEEEQRLRKVALNISKDMKKFWMKVEKLVLYKHQLVRNEKKKKAMDKQLEFLLGQTERYSTMLAENLVEPYKQGQNTPSKPLLTIESKSDEERAEQIPPEINSCLESGSPELDEDYDLKSEDETEDDEDTIEEDEKHFTKRERQEELEALQNEVDLPVEELLRRYTSGRVSRETSPVKDENEDNLTSVSRVTSPVKDENQDNLASVGQDHGEADKNNLAASEETEGNPSVRRSNDSYGHLAISETHSHDLEPGMTTASVKSRKEDHTYDFNDEQEDVDFVLANGEEKDDEATLAVEEELAKADNEDHVEEIALLQKESEMPIEVLLARYKEDFGGKDISEDESESSFAVSEDSIVDSDENRQQADLDDDNVDLTECKLDPEPCSENVEGTFHEVAEDNDKDSSDKIADAAAAARSAQPTGFTYSTTKVRTKLPFLLKHSLREYQHIGLDWLVTMYEKKLNGILADEMGLGKTIMTIALLAHLACDKGIWGPHLIVVPTSVMLNWETEFLKWCPAFKILTYFGSAKERKLKRQGWMKLNSFHVCITTYRLVIQDSKMFKRKKWKYLILDEAHLIKNWKSQRWQTLLNFNSKRRILLTGTPLQNDLMELWSLMHFLMPHVFQSHQEFKDWFCNPIAGMVEGQEKINKEVIDRLHNVLRPFLLRRLKRDVEKQLPSKHEHVIFCRLSKRQRNLYEDFIASTETQATLTSGSFFGMISIIMQLRKVCNHPDLFEGRPIVSSFDMAGIDVQLSSTICSLLLESPFSKVDLEALGFLFTHLDFSMTSWEGDEIKAISTPSELIKQRVNLKDDLEAIPLSPKNRKNLQGTNIFEEIRKAVFEERIQESKDRAAAIAWWNSLRCQRKPTYSTSLRTLLTIKGPLDDLKANCSSYMYSSILADIVLSPIERFQKMIELVEAFTFAIPAARVPSPTCWCSKSDSPVFLSPSYKEKVTDLLSPLLSPIRPAIVRRQVYFPDRRLIQFDCGKLQELAMLLRKLKFGGHRALIFTQMTKMLDVLEAFINLYGYTYMRLDGSTPPEERQTLMQRFNTNPKIFLFILSTRSGGVGINLVGADTVIFYDSDWNPAMDQQAQDRCHRIGQTREVHIYRLISESTIEENILKKANQKRVLDNLVIQNGEYNTEFFKKLDPMELFSGHKALTTKDEKETSKHCGADIPLSNADVEAALKQAEDEADYMALKRVEQEEAVDNQEFTEEPVERPEDDELVNEDDIKADEPADQGLVAAGPAKEEMSLLHSDIRDERAVITTSSQEDDTDVLDDVKQMAAAAADAGQAISSFENQLRPIDRYAIRFLELWDPIIVEAAMENEAGFEEKEWELDHIEKYKEEMEAEIDDGEEPLVYEKWDADFATEAYRQQVEVLAQHQLMEDLENEAREREAAEVAEMVLTQNESAHVLKPKKKKKAKKAKYKSLKKGSLAAESKHVKSVVKIEDSTDDDNEEFGYVSSSDSDMVTPLSRMHMKGKKRDLIVDTDEEKTSKKKAKKHKKSLPNSDIKYKQTSALLDELEPSKPSDSMVVDNELKLTNRGKTVGKKFITSMPIKRVLMIKPEKLKKGNLWSRDCVPSPDSWLPQEDAILCAMVHEYGPNWNFVSGTLYGMTAGGAYRGRYRHPAYCCERYRELIQRHILSASDSAVNEKNLNTGSGKALLKVTEENIRTLLNVAAEQPDTEMLLQKHFSCLLSSIWRTSTRTGNDQMLSLNSPIFNRQFMGSVNHTQDLARKPWQGMKVTSLSRKLLESALQDSGPSQPDNTISRSRLQETQPINKLGLELTLEFPRGNDDSLNQFPPMISLSIDGSDSLNYVNEPPGEDVLKGSRVAAENRYRNAANACIEDSFGWASNTFPANDLKSRTGTKAQSLGKHKLSASDSAKSTKSKHRKLLAEQLEGAWVRPNDPNLKFDFTPGDREEEEEQEVDEKANSAEIEMISCSQWYDPFFTSGLDDCSLASDISEIE

SEQ ID NO: 98565 - protein, 2041 aa, Arabidopsis thaliana
  peptide (1)..(2041): Ceres Seq. ID no. 13601008
  misc_feature (525)..(811): Pfam Name: SNF2 family N-terminal domain Pfam Description: SNF2 family N-terminal domain
  misc_feature (96)..(886): Homolog of NCBI NO: 5730067 NR Description: Snf2-related CBP activator protein [Homo sapiens]
  misc_feature (917)..(1368): Homolog of NCBI NO: 5730067 NR Description: Snf2-related CBP activator protein [Homo sapiens]
  misc_feature (218)..(921): Homolog of NCBI NO: 28573600 NR Description: domino CG9696-PE [Drosophila melanogaster]
  misc_feature (963)..(1297): Homolog of NCBI NO: 28573600 NR Description: domino CG9696-PE [Drosophila melanogaster]
  misc_feature (218)..(921): Homolog of NCBI NO: 24656962 NR Description: domino CG9696-PD [Drosophila melanogaster]
  misc_feature (963)..(1297): Homolog of NCBI NO: 24656962 NR Description: domino CG9696-PD [Drosophila melanogaster]
  misc_feature (218)..(921): Homolog of NCBI NO: 24656966 NR Description: domino CG9696-PA [Drosophila melanogaster]
  misc_feature (963)..(1297): Homolog of NCBI NO: 24656966 NR Description: domino CG9696-PA [Drosophila melanogaster]
  misc_feature (218)..(921): Homolog of NCBI NO: 14090511 NR Description: DOMINO B [Drosophila melanogaster]
  misc_feature (1022)..(1297): Homolog of NCBI NO: 14090511 NR Description: DOMINO B [Drosophila melanogaster]
MASKSGKSKPDNESRAKRQKTLEAPKEPRRPKTHWDHVLEEMAWLSKDFESERKWKLAQAKKVALRASKGMLDQASREERKLKEEEQRLRKVALNISKDMKKFWMKVEKLVLYKHQLVRNEKKKKAMDKQLEFLLGQTERYSTMLAENLVEPYKQGQNTPSKPLLTIESKSDEERAEQIPPEINSCLESGSPELDEDYDLKSEDETEDDEDTIEEDEKHFTKRERQEELEALQNEVDLPVEELLRRYTSGRVSRETSPVKDENEDNLTSVSRVTSPVKDENQDNLASVGQDHGEADKNNLAASEETEGNPSVRRSNDSYGHLAISETHSHDLEPGMTTASVKSRKEDHTYDFNDEQEDVDFVLANGEEKDDEATLAVEEELAKADNEDHVEEIALLQKESEMPIEVLLARYKEDFGGKDISEDESESSFAVSEDSIVDSDENRQQADLDDDNVDLTECKLDPEPCSENVEGTFHEVAEDNDKDSSDKIADAAAAARSAQPTGFTYSTTKVRTKLPFLLKHSLREYQHIGLDWLVTMYEKKLNGILADEMGLGKTIMTIALLAHLACDKGIWGPHLIVVPTSVMLNWETEFLKWCPAFKILTYFGSAKERKLKRQGWMKLNSFHVCITTYRLVIQDSKMFKRKKWKYLILDEAHLIKNWKSQRWQTLLNFNSKRRILLTGTPLQNDLMELWSLMHFLMPHVFQSHQEFKDWFCNPIAGMVEGQEKINKEVIDRLHNVLRPFLLRRLKRDVEKQLPSKHEHVIFCRLSKRQRNLYEDFIASTETQATLTSGSFFGMISIIMQLRKVCNHPDLFEGRPIVSSFDMAGIDVQLSSTICSLLLESPFSKVDLEALGFLFTHLDFSMTSWEGDEIKAISTPSELIKQRVNLKDDLEAIPLSPKNRKNLQGTNIFEEIRKAVFEERIQESKDRAAAIAWWNSLRCQRKPTYSTSLRTLLTIKGPLDDLKANCSSYMYSSILADIVLSPIERFQKMIELVEAFTFAIPAARVPSPTCWCSKSDSPVFLSPSYKEKVTDLLSPLLSPIRPAIVRRQVYFPDRRLIQFDCGKLQELAMLLRKLKFGGHRALIFTQMTKMLDVLEAFINLYGYTYMRLDGSTPPEERQTLMQRFNTNPKIFLFILSTRSGGVGINLVGADTVIFYDSDWNPAMDQQAQDRCHRIGQTREVHIYRLISESTIEENILKKANQKRVLDNLVIQNGEYNTEFFKKLDPMELFSGHKALTTKDEKETSKHCGADIPLSNADVEAALKQAEDEADYMALKRVEQEEAVDNQEFTEEPVERPEDDELVNEDDIKADEPADQGLVAAGPAKEEMSLLHSDIRDERAVITTSSQEDDTDVLDDVKQMAAAAADAGQAISSFENQLRPIDRYAIRFLELWDPIIVEAAMENEAGFEEKEWELDHIEKYKEEMEAEIDDGEEPLVYEKWDADFATEAYRQQVEVLAQHQLMEDLENEAREREAAEVAEMVLTQNESAHVLKPKKKKKAKKAKYKSLKKGSLAAESKHVKSVVKIEDSTDDDNEEFGYVSSSDSDMVTPLSRMHMKGKKRDLIVDTDEEKTSKKKAKKHKKSLPNSDIKYKQTSALLDELEPSKPSDSMVVDNELKLTNRGKTVGKKFITSMPIKRVLMIKPEKLKKGNLWSRDCVPSPDSWLPQEDAILCAMVHEYGPNWNFVSGTLYGMTAGGAYRGRYRHPAYCCERYRELIQRHILSASDSAVNEKNLNTGSGKALLKVTEENIRTLLNVAAEQPDTEMLLQKHFSCLLSSIWRTSTRTGNDQMLSLNSPIFNRQFMGSVNHTQDLARKPWQGMKVTSLSRKLLESALQDSGPSQPDNTISRSRLQETQPINKLGLELTLEFPRGNDDSLNQFPPMISLSIDGSDSLNYVNEPPGEDVLKGSRVAAENRYRNAANACIEDSFGWASNTFPANDLKSRTGTKAQSLGKHKLSASDSAKSTKSKHRKLLAEQLEGAWVRPNDPNLKFDFTPGDREEEEEQEVDEKANSAEIEMISCSQWYDPFFTSGLDDCSLASDISEIE

SEQ ID NO: 98566 - DNA, 1142 bp, Arabidopsis thaliana
  misc_feature (1)..(1142): Ceres Seq. ID no. 13601020
  misc_feature: MA Experiment ID: 108434 Result: Up-regulated in Transcription
  misc_feature: MA Experiment 108434 PARAMETER Experiment Name: At_Root_Tips_cDNA_P Parameter: Tissue Value: Root Tips
  misc_feature: MA Experiment ID: 108461 Result: Down-regulated in Transcription
  misc_feature: MA Experiment 108461 PARAMETER Experiment Name: At_Germinating_Seeds_cDNA_P Parameter: Age (day) Value: 1 vs. 0
  misc_feature: MA Experiment 108461 PARAMETER Experiment Name: At_Germinating_Seeds_cDNA_P Parameter: Tissue Value: Germinating Seeds
  misc_feature: MA Experiment ID: 108462 Result: Down-regulated in Transcription
  misc_feature: MA Experiment 108462 PARAMETER Experiment Name: At_Germinating_Seeds_cDNA_P Parameter: Age (day) Value: 2 vs. 0
  misc_feature: MA Experiment 108462 PARAMETER Experiment Name: At_Germinating_Seeds_cDNA_P Parameter: Tissue Value: Germinating Seeds
  misc_feature: MA Experiment ID: 108463 Result: Down-regulated in Transcription
  misc_feature: MA Experiment 108463 PARAMETER Experiment Name: At_Germinating_Seeds_cDNA_P Parameter: Age (day) Value: 3 vs. 0
  misc_feature: MA Experiment 108463 PARAMETER Experiment Name: At_Germinating_Seeds_cDNA_P Parameter: Tissue Value: Germinating Seeds
  misc_feature: MA Experiment ID: 108464 Result: Down-regulated in Transcription
  misc_feature: MA Experiment 108464 PARAMETER Experiment Name: At_Germinating_Seeds_cDNA_P Parameter: Age (day) Value: 4 vs. 0
  misc_feature: MA Experiment 108464 PARAMETER Experiment Name: At_Germinating_Seeds_cDNA_P Parameter: Tissue Value: Germinating Seeds
  misc_feature: MA Experiment ID: 20000180 Result: Down-regulated in Transcription
  misc_feature: MA Experiment 20000180 PARAMETER Experiment Name: At_Germinating_Seeds_P Parameter: Age (hr) Value: 24 vs. 0
  misc_feature: MA Experiment 20000180 PARAMETER Experiment Name: At_Germinating_Seeds_P Parameter: Tissue Value: Germinating Seeds
  misc_feature: MA Experiment ID: 20000184 Result: Down-regulated in Transcription
  misc_feature: MA Experiment 20000184 PARAMETER Experiment Name: At_Shoots__P Parameter: Age (day) Value: 7
  misc_feature: MA Experiment 20000184 PARAMETER Experiment Name: At_Shoots__P Parameter: Tissue Value: Shoots vs. Whole Plant
  misc_feature: MA Experiment ID: 20001911 Result: Up-regulated in Transcription
  misc_feature: MA Experiment 20001911 PARAMETER Experiment Name: At_Drought_Reproduction_P Parameter: Age (day) Value: 40
  misc_feature: MA Experiment 20001911 PARAMETER Experiment Name: At_Drought_Reproduction_P Parameter: Organism Value: A. thaliana
  misc_feature: MA Experiment 20001911 PARAMETER Experiment Name: At_Drought_Reproduction_P Parameter: Plant Line Value: WS
  misc_feature: MA Experiment 20001911 PARAMETER Experiment Name: At_Drought_Reproduction_P Parameter: Timepoint (day) Value: 10
  misc_feature: MA Experiment 20001911 PARAMETER Experiment Name: At_Drought_Reproduction_P Parameter: Tissue Value: Flowers
  misc_feature: MA Experiment 20001911 PARAMETER Experiment Name: At_Drought_Reproduction_P Parameter: Treatment Value: Drought vs. No Drought
attctctaggcttttttatattctgaaagttttgattttttgtatcttgttttgtttctcaatcatcaatttgtggtagtagctcactagcaaacaatggaggggaggttgaataatatgtggaggttgactgtgaatgagagcaaattcgttgaatctgcgttgcaatctgagctcagagtcgatggtcgtggcctttatgattaccgcaagcttactattaagtttggcaaggaatatggcagctcacaagttcaactgggtcagactcatgtaatggcttttgtgactgctcagctagtacaaccttacaaagacagacctagtgaaggctccttctctatcttcaccgagttttctccaatggctgatccatcgtttgagccagggcatcctggtgaatctgctgttgagcttggccgtattatagaccgtgctctacgagaaagccgtgcagtagatacagagtcgctttgtgttctagccggaaagctggtttggtctgttcgcattgatcttcacattttggacaatggagggaacttggttgatgctgctaatgttgctgccttagccgcactcatgactttcaggagacctgattgcactgtaggaggggacaacagtcaagacgtgatcatacatccacccgaagaaagggaaccacttcctttgataatacatcatctcccaatagccttcacgtttggattttttaataaaggcagtatcttggtgatggacccaacttacgttgaagaagctgttatgtgtgggagaatgactgtgacagtcaatgccaatggcgatatatgcgcaatccaaaaaccaggagaagaaggcgtgaaccagagtgtaatccttcattgcctgcgtcttgcttcttcaagagcttctgcaacaacaaagataattagagatgcagttgaagcatacaaccgtgagaggagctcacagaaggtgaagcggcatcatactttggctaagtctgaagttttgggacctattgtagttgtgtaggaagagacataaataaaacatttgctgtggtcgtcgattgtaaataaagattttagttgtagaaatcttatcagcaacactaagctataaaaacgtcgatatgatcaagacatgttgagact

SEQ ID NO: 98567 - protein, 307 aa, Arabidopsis thaliana
  peptide (1)..(307): Ceres Seq. ID no. 13601021
  misc_feature (36)..(168): Pfam Name: 3' exoribonuclease family, domain 1 Pfam Description: 3' exoribonuclease family, domain 1
  misc_feature (1)..(307): Homolog of NCBI NO: 18399822 NR Description: expressed protein [Arabidopsis thaliana]
  misc_feature (1)..(307): Homolog of NCBI NO: 21536581 NR Description: nucleolar autoantigen-like protein [Arabidopsis
  misc_feature (1)..(307): Homolog of NCBI NO: 15232342 NR Description: nucleolar autoantigen - like protein [Arabidopsis
  misc_feature (12)..(287): Homolog of NCBI NO: 19075183 NR Description: putative exosome 3'-5' exoribonuclease complex;
  misc_feature (15)..(278): Homolog of NCBI NO: 28172864 NR Description: polymyositis/scleroderma autoantigen 1 [Homo
  misc_feature (15)..(278): Homolog of NCBI NO: 28172868 NR Description: polymyositis/scleroderma autoantigen 1 [Homo
  misc_feature (15)..(284): Homolog of NCBI NO: 9506981 NR Description: polymyositis/scleroderma autoantigen 1 [Mus >gi|14285679|sp|Q9JHI7|RR45_MOUSE Exosome complex exonuclease (Polymyositis/scleroderma autoantigen 1) (Autoantigen PM/Scl 1)
  misc_feature (15)..(284): Homolog of NCBI NO: 12847890 NR Description: unnamed protein product [Mus musculus]
  misc_feature (15)..(284): Homolog of NCBI NO: 34856829 NR Description: similar to polymyositis scleroderma overlap
  misc_feature (28)..(278): Homolog of NCBI NO: 14285675 NR Description: Exosome complex exonuclease RRP45 autoantigen 1) (Autoantigen PM/Scl 1) (Polymyositis/scleroderma
MEGRLNNMWRLTVNESKFVESALQSELRVDGRGLYDYRKLTIKFGKEYGSSQVQLGQTHVMAFVTAQLVQPYKDRPSEGSFSIFTEFSPMADPSFEPGHPGESAVELGRIIDRALRESRAVDTESLCVLAGKLVWSVRIDLHILDNGGNLVDAANVAALAALMTFRRPDCTVGGDNSQDVIIHPPEEREPLPLIIHHLPIAFTFGFFNKGSILVMDPTYVEEAVMCGRMTVTVNANGDICAIQKPGEEGVNQSVILHCLRLASSRASATTKIIRDAVEAYNRERSSQKVKRHHTLAKSEVLGPIVVV

SEQ ID NO: 98568 - protein, 300 aa, Arabidopsis thaliana
  peptide (1)..(300): Ceres Seq. ID no. 13601022
  misc_feature (29)..(161): Pfam Name: 3' exoribonuclease family, domain 1 Pfam Description: 3' exoribonuclease family, domain 1
  misc_feature (1)..(300): Homolog of NCBI NO: 18399822 NR Description: expressed protein [Arabidopsis thaliana]
  misc_feature (1)..(300): Homolog of NCBI NO: 21536581 NR Description: nucleolar autoantigen-like protein [Arabidopsis
  misc_feature (1)..(300): Homolog of NCBI NO: 15232342 NR Description: nucleolar autoantigen - like protein [Arabidopsis
  misc_feature (5)..(280): Homolog of NCBI NO: 19075183 NR Description: putative exosome 3'-5' exoribonuclease complex;
  misc_feature (8)..(271): Homolog of NCBI NO: 28172864 NR Description: polymyositis/scleroderma autoantigen 1 [Homo
  misc_feature (8)..(271): Homolog of NCBI NO: 28172868 NR Description: polymyositis/scleroderma autoantigen 1 [Homo
  misc_feature (8)..(277): Homolog of NCBI NO: 9506981 NR Description: polymyositis/scleroderma autoantigen 1 [Mus >gi|14285679|sp|Q9JHI7|RR45_MOUSE Exosome complex exonuclease (Polymyositis/scleroderma autoantigen 1) (Autoantigen PM/Scl 1)
  misc_feature (8)..(277): Homolog of NCBI NO: 12847890 NR Description: unnamed protein product [Mus musculus]
  misc_feature (8)..(277): Homolog of NCBI NO: 34856829 NR Description: similar to polymyositis scleroderma overlap
  misc_feature (21)..(271): Homolog of NCBI NO: 14285675 NR Description: Exosome complex exonuclease RRP45 autoantigen 1) (Autoantigen PM/Scl 1) (Polymyositis/scleroderma
MWRLTVNESKFVESALQSELRVDGRGLYDYRKLTIKFGKEYGSSQVQLGQTHVMAFVTAQLVQPYKDRPSEGSFSIFTEFSPMADPSFEPGHPGESAVELGRIIDRALRESRAVDTESLCVLAGKLVWSVRIDLHILDNGGNLVDAANVAALAALMTFRRPDCTVGGDNSQDVIIHPPEEREPLPLIIHHLPIAFTFGFFNKGSILVMDPTYVEEAVMCGRMTVTVNANGDICAIQKPGEEGVNQSVILHCLRLASSRASATTKIIRDAVEAYNRERSSQKVKRHHTLAKSEVLGPIVVV

SEQ ID NO: 98569 - protein, 247 aa, Arabidopsis thaliana
  peptide (1)..(247): Ceres Seq. ID no. 13601023
  misc_feature (1)..(108): Pfam Name: 3' exoribonuclease family, domain 1 Pfam Description: 3' exoribonuclease family, domain 1
  misc_feature (1)..(247): Homolog of NCBI NO: 18399822 NR Description: expressed protein [Arabidopsis thaliana]
  misc_feature (1)..(247): Homolog of NCBI NO: 21536581 NR Description: nucleolar autoantigen-like protein [Arabidopsis
  misc_feature (1)..(247): Homolog of NCBI NO: 15232342 NR Description: nucleolar autoantigen - like protein [Arabidopsis
  misc_feature (1)..(227): Homolog of NCBI NO: 19075183 NR Description: putative exosome 3'-5' exoribonuclease complex;
  misc_feature (1)..(218): Homolog of NCBI NO: 28172864 NR Description: polymyositis/scleroderma autoantigen 1 [Homo
  misc_feature (1)..(218): Homolog of NCBI NO: 28172868 NR Description: polymyositis/scleroderma autoantigen 1 [Homo
  misc_feature (1)..(224): Homolog of NCBI NO: 9506981 NR Description: polymyositis/scleroderma autoantigen 1 [Mus >gi|14285679|sp|Q9JHI7|RR45_MOUSE Exosome complex exonuclease (Polymyositis/scleroderma autoantigen 1) (Autoantigen PM/Scl 1)
  misc_feature (1)..(224): Homolog of NCBI NO: 12847890 NR Description: unnamed protein product [Mus musculus]
  misc_feature (1)..(224): Homolog of NCBI NO: 34856829 NR Description: similar to polymyositis scleroderma overlap
  misc_feature (1)..(218): Homolog of NCBI NO: 14285675 NR Description: Exosome complex exonuclease RRP45 autoantigen 1) (Autoantigen PM/Scl 1) (Polymyositis/scleroderma
MAFVTAQLVQPYKDRPSEGSFSIFTEFSPMADPSFEPGHPGESAVELGRIIDRALRESRAVDTESLCVLAGKLVWSVRIDLHILDNGGNLVDAANVAALAALMTFRRPDCTVGGDNSQDVIIHPPEEREPLPLIIHHLPIAFTFGFFNKGSILVMDPTYVEEAVMCGRMTVTVNANGDICAIQKPGEEGVNQSVILHCLRLASSRASATTKIIRDAVEAYNRERSSQKVKRHHTLAKSEVLGPIVVV

SEQ ID NO: 98570 - DNA, 949 bp, Arabidopsis thaliana
  misc_feature (1)..(949): Ceres Seq. ID no. 13601030
  misc_feature: MA Experiment ID: 20000111 Result: Up-regulated in Transcription
  misc_feature: MA Experiment 20000111 PARAMETER Experiment Name: At_42deg_Heat_cDNA_P Parameter: Temperature (deg C) Value: 42 vs. 22
  misc_feature: MA Experiment 20000111 PARAMETER Experiment Name: At_42deg_Heat_cDNA_P Parameter: Timepoint (hr) Value: 6
  misc_feature: MA Experiment 20000111 PARAMETER Experiment Name: At_42deg_Heat_cDNA_P Parameter: Tissue Value: Aerial
  misc_feature: MA Experiment ID: 20000113 Result: Up-regulated in Transcription
  misc_feature: MA Experiment 20000113 PARAMETER Experiment Name: At_42deg_Heat_cDNA_P Parameter: Temperature (deg C) Value: 42 vs. 22
  misc_feature: MA Experiment 20000113 PARAMETER Experiment Name: At_42deg_Heat_cDNA_P Parameter: Timepoint (hr) Value: 8
  misc_feature: MA Experiment 20000113 PARAMETER Experiment Name: At_42deg_Heat_cDNA_P Parameter: Tissue Value: Aerial
  misc_feature: MA Experiment ID: 20000173 Result: Up-regulated in Transcription
  misc_feature: MA Experiment 20000173 PARAMETER Experiment Name: At_42deg_Heat_P Parameter: Age (day) Value: 14
  misc_feature: MA Experiment 20000173 PARAMETER Experiment Name: At_42deg_Heat_P Parameter: Organism Value: A. thaliana
  misc_feature: MA Experiment 20000173 PARAMETER Experiment Name: At_42deg_Heat_P Parameter: Plant Line Value: WS
  misc_feature: MA Experiment 20000173 PARAMETER Experiment Name: At_42deg_Heat_P Parameter: Temperature (deg C) Value: 42 vs. 22
  misc_feature: MA Experiment 20000173 PARAMETER Experiment Name: At_42deg_Heat_P Parameter: Timepoint (hr) Value: 6
  misc_feature: MA Experiment 20000173 PARAMETER Experiment Name: At_42deg_Heat_P Parameter: Tissue Value: Aerial
  misc_feature: MA Experiment ID: 20000184 Result: Down-regulated in Transcription
  misc_feature: MA Experiment 20000184 PARAMETER Experiment Name: At_Shoots__P Parameter: Age (day) Value: 7
  misc_feature: MA Experiment 20000184 PARAMETER Experiment Name: At_Shoots__P Parameter: Tissue Value: Shoots vs. Whole Plant
  misc_feature: MA Experiment ID: 20000214 Result: Down-regulated in Transcription
  misc_feature: MA Experiment 20000214 PARAMETER Experiment Name: At_4deg_Cold_P Parameter: Timepoint (hr) Value: 6
  misc_feature: MA Experiment ID: 20001248 Result: Up-regulated in Transcription
  misc_feature: MA Experiment 20001248 PARAMETER Experiment Name: At_Far-red-induction_P Parameter: Age (day) Value: 7
  misc_feature: MA Experiment 20001248 PARAMETER Experiment Name: At_Far-red-induction_P Parameter: Light Value: Far-red vs. White
  misc_feature: MA Experiment 20001248 PARAMETER Experiment Name: At_Far-red-induction_P Parameter: Organism Value: A. thaliana
  misc_feature: MA Experiment 20001248 PARAMETER Experiment Name: At_Far-red-induction_P Parameter: Plant Line Value: Columbia
  misc_feature: MA Experiment 20001248 PARAMETER Experiment Name: At_Far-red-induction_P Parameter: Timepoint (hr) Value: 4
  misc_feature: MA Experiment 20001248 PARAMETER Experiment Name: At_Far-red-induction_P Parameter: Tissue Value: Whole Plant
  misc_feature: MA Experiment ID: 20001450 Result: Up-regulated in Transcription
  misc_feature: MA Experiment 20001450 PARAMETER Experiment Name: At_Far-red-induction_P Parameter: Age (day) Value: 7
  misc_feature: MA Experiment 20001450 PARAMETER Experiment Name: At_Far-red-induction_P Parameter: Light Value: Far-red vs. White
  misc_feature: MA Experiment 20001450 PARAMETER Experiment Name: At_Far-red-induction_P Parameter: Organism Value: A. thaliana
  misc_feature: MA Experiment 20001450 PARAMETER Experiment Name: At_Far-red-induction_P Parameter: Plant Line Value: Columbia
  misc_feature: MA Experiment 20001450 PARAMETER Experiment Name: At_Far-red-induction_P Parameter: Timepoint (hr) Value: 8
  misc_feature: MA Experiment 20001450 PARAMETER Experiment Name: At_Far-red-induction_P Parameter: Tissue Value: Whole Plant
  misc_feature: MA Experiment ID: 20001911 Result: Up-regulated in Transcription
  misc_feature: MA Experiment 20001911 PARAMETER Experiment Name: At_Drought_Reproduction_P Parameter: Age (day) Value: 40
  misc_feature: MA Experiment 20001911 PARAMETER Experiment Name: At_Drought_Reproduction_P Parameter: Organism Value: A. thaliana
  misc_feature: MA Experiment 20001911 PARAMETER Experiment Name: At_Drought_Reproduction_P Parameter: Plant Line Value: WS
  misc_feature: MA Experiment 20001911 PARAMETER Experiment Name: At_Drought_Reproduction_P Parameter: Timepoint (day) Value: 10
  misc_feature: MA Experiment 20001911 PARAMETER Experiment Name: At_Drought_Reproduction_P Parameter: Tissue Value: Flowers
  misc_feature: MA Experiment 20001911 PARAMETER Experiment Name: At_Drought_Reproduction_P Parameter: Treatment Value: Drought vs. No Drought
ttttcactttgttctctctctctctcgtaacacgcctgagagttctcgtcgtccttatctcgatcttggttgattcgctctccgatcggaaattagggcttttgttttctgaagatgacgactgcagcacgaccaacctgggctccagctaagggaggtaacgagcaaggtggtgctcggatctttggtccatctcagaagtattcgtcccgtgatgtcgccgctcacacaactttaaagccaaggagggaagggcaacacactcaagaggaactccagaagataaatcttcgtgatgagcttgaagagcgtgagaggagacatttctcatcaaaagacaaatcatacaatgatgatagagatcgcagaagaggaagtcagcttttactggaagactcgaaaagggatcctgaagagcggattattcctcgcagtgtagatgctgatgattctgatgttgatatcaaaagtgacgatgatagtgatgacgaaagtgacgatgatgatgaggacgacactgaagctcttatggcggaactcgaccagataaagaaagaaagagtggaagagaggctcaggaaggaaaaagagcagcagatggaagagctaaacgctaaggaagaggaacttctcaaaggaaacccattgcttaatactccaacgtcttttagcgtcaaaaggaggtgggatgatgatgttgtattcaaaaaccaggcacgtggtgaaatgaaagctcctaagcgcttcatcaatgatacaatcaggaatgacttccacagaaaattcctgcatagatacatgaagtgattgtttgtcaagagtgttattgctacttctttgtatgatgattatgactaaaagcttttattctgtctggaattacgatgtctctgtactcaaacaacaaatgtttttaagctttatatcaaaaacttatgcatttgatttt

SEQ ID NO: 98571 - protein, 230 aa, Arabidopsis thaliana
  peptide (1)..(230): Ceres Seq. ID no. 13601031
  misc_feature (1)..(230): Pfam Name: Cwf15/Cwc15 cell cycle control protein Pfam Description: Cwf15/Cwc15 cell cycle control protein
  misc_feature (1)..(230): Homolog of NCBI NO: 18399903 NR Description: expressed protein [Arabidopsis thaliana]
  misc_feature (1)..(230): Homolog of NCBI NO: 15451186 NR Description: Unknown protein [Arabidopsis thaliana]
  misc_feature (1)..(230): Homolog of NCBI NO: 21592359 NR Description: unknown [Arabidopsis thaliana]
  misc_feature (1)..(230): Homolog of NCBI NO: 34897750 NR Description: ESTs AU032852(S15362),AU070591(S5037) correspond a region of the predicted gene.~Similar to Caenorhabditis elegans
  misc_feature (1)..(230): Homolog of NCBI NO: 12963537 NR Description: RIKEN cDNA 0610040D20 [Mus musculus] hypothetical protein [Mus musculus] >gi|12833160|dbj|BAB22414.1| protein product [Mus musculus] >gi|12833722|dbj|BAB22638.1|
  misc_feature (1)..(230): Homolog of NCBI NO: 6523797 NR Description: adrenal gland protein AD-002 [Homo sapiens] hypothetical protein [Homo sapiens] >gi|26454883|gb|AAH40946.1|
  misc_feature (1)..(230): Homolog of NCBI NO: 27719369 NR Description: similar to RIKEN cDNA 0610040D20 [Mus musculus]
  misc_feature (1)..(230): Homolog of NCBI NO: 7705475 NR Description: hypothetical protein HSPC148 [Homo sapiens]
  misc_feature (1)..(230): Homolog of NCBI NO: 27688663 NR Description: similar to RIKEN cDNA 0610040D20 [Mus musculus]
  misc_feature (1)..(230): Homolog of NCBI NO: 17564200 NR Description: Adrenal gland protein AD-002 like (26.1 kD)
MTTAARPTWAPAKGGNEQGGARIFGPSQKYSSRDVAAHTTLKPRREGQHTQEELQKINLRDELEERERRHFSSKDKSYNDDRDRRRGSQLLLEDSKRDPEERIIPRSVDADDSDVDIKSDDDSDDESDDDDEDDTEALMAELDQIKKERVEERLRKEKEQQMEELNAKEEELLKGNPLLNTPTSFSVKRRWDDDVVFKNQARGEMKAPKRFINDTIRNDFHRKFLHRYMK

SEQ ID NO: 98572 - DNA, 868 bp, Arabidopsis thaliana
  misc_feature (1)..(868): Ceres Seq. ID no. 13601044
  misc_feature: MA Experiment ID: 108434 Result: Up-regulated in Transcription
  misc_feature: MA Experiment 108434 PARAMETER Experiment Name: At_Root_Tips_cDNA_P Parameter: Tissue Value: Root Tips
  misc_feature: MA Experiment ID: 108461 Result: Down-regulated in Transcription
  misc_feature: MA Experiment 108461 PARAMETER Experiment Name: At_Germinating_Seeds_cDNA_P Parameter: Age (day) Value: 1 vs. 0
  misc_feature: MA Experiment 108461 PARAMETER Experiment Name: At_Germinating_Seeds_cDNA_P Parameter: Tissue Value: Germinating Seeds
  misc_feature: MA Experiment ID: 108462 Result: Down-regulated in Transcription
  misc_feature: MA Experiment 108462 PARAMETER Experiment Name: At_Germinating_Seeds_cDNA_P Parameter: Age (day) Value: 2 vs. 0
  misc_feature: MA Experiment 108462 PARAMETER Experiment Name: At_Germinating_Seeds_cDNA_P Parameter: Tissue Value: Germinating Seeds
  misc_feature: MA Experiment ID: 108463 Result: Down-regulated in Transcription
  misc_feature: MA Experiment 108463 PARAMETER Experiment Name: At_Germinating_Seeds_cDNA_P Parameter: Age (day) Value: 3 vs. 0
  misc_feature: MA Experiment 108463 PARAMETER Experiment Name: At_Germinating_Seeds_cDNA_P Parameter: Tissue Value: Germinating Seeds
  misc_feature: MA Experiment ID: 108464 Result: Down-regulated in Transcription
  misc_feature: MA Experiment 108464 PARAMETER Experiment Name: At_Germinating_Seeds_cDNA_P Parameter: Age (day) Value: 4 vs. 0
  misc_feature: MA Experiment 108464 PARAMETER Experiment Name: At_Germinating_Seeds_cDNA_P Parameter: Tissue Value: Germinating Seeds
  misc_feature: MA Experiment ID: 108489 Result: Up-regulated in Transcription
  misc_feature: MA Experiment ID: 108572 Result: Down-regulated in Transcription
  misc_feature: MA Experiment 108572 PARAMETER Experiment Name: At_Drought_cDNA_P Parameter: Timepoint (hr) Value: 1
  misc_feature: MA Experiment 108572 PARAMETER Experiment Name: At_Drought_cDNA_P Parameter: Tissue Value: Aerial
  misc_feature: MA Experiment 108572 PARAMETER Experiment Name: At_Drought_cDNA_P Parameter: Treatment Value: Drought vs. No Drought
  misc_feature: MA Experiment ID: 108573 Result: Down-regulated in Transcription
  misc_feature: MA Experiment 108573 PARAMETER Experiment Name: At_Drought_cDNA_P Parameter: Timepoint (hr) Value: 6
  misc_feature: MA Experiment 108573 PARAMETER Experiment Name: At_Drought_cDNA_P Parameter: Tissue Value: Aerial
  misc_feature: MA Experiment 108573 PARAMETER Experiment Name: At_Drought_cDNA_P Parameter: Treatment Value: Drought vs. No Drought
  misc_feature: MA Experiment ID: 20000179 Result: Down-regulated in Transcription
  misc_feature: MA Experiment 20000179 PARAMETER Experiment Name: At_Germinating_Seeds_P Parameter: Age (hr) Value: 6 vs. 0
  misc_feature: MA Experiment 20000179 PARAMETER Experiment Name: At_Germinating_Seeds_P Parameter: Tissue Value: Germinating Seeds
  misc_feature: MA Experiment ID: 20000180 Result: Down-regulated in Transcription
  misc_feature: MA Experiment 20000180 PARAMETER Experiment Name: At_Germinating_Seeds_P Parameter: Age (hr) Value: 24 vs. 0
  misc_feature: MA Experiment 20000180 PARAMETER Experiment Name: At_Germinating_Seeds_P Parameter: Tissue Value: Germinating Seeds
  misc_feature: MA Experiment ID: 20000794 Result: Down-regulated in Transcription
  misc_feature: MA Experiment 20000794 PARAMETER Experiment Name: At_Petals_P Parameter: Age (day) Value: 23-25 days
  misc_feature: MA Experiment 20000794 PARAMETER Experiment Name: At_Petals_P Parameter: Plant Line Value: WS
  misc_feature: MA Experiment 20000794 PARAMETER Experiment Name: At_Petals_P Parameter: Tissue Value: Petals vs. Whole plant
  misc_feature: MA Experiment ID: 20001458 Result: Up-regulated in Transcription
  misc_feature: MA Experiment 20001458 PARAMETER Experiment Name: At_50mM_NH4NO3_L-to-H_P Parameter: Age (day) Value: Undefined
  misc_feature: MA Experiment 20001458 PARAMETER Experiment Name: At_50mM_NH4NO3_L-to-H_P Parameter: Organism Value: Undefined
  misc_feature: MA Experiment 20001458 PARAMETER Experiment Name: At_50mM_NH4NO3_L-to-H_P Parameter: Plant Line Value: Undefined
  misc_feature: MA Experiment 20001458 PARAMETER Experiment Name: At_50mM_NH4NO3_L-to-H_P Parameter: Timepoint (hr) Value: 2
  misc_feature: MA Experiment 20001458 PARAMETER Experiment Name: At_50mM_NH4NO3_L-to-H_P Parameter: Tissue Value: Siliques
  misc_feature: MA Experiment 20001458 PARAMETER Experiment Name: At_50mM_NH4NO3_L-to-H_P Parameter: Treatment Value: 50mM NH4NO3 vs. 100mM Manitol
  misc_feature: MA Experiment ID: 20001557 Result: Up-regulated in Transcription
  misc_feature: MA Experiment 20001557 PARAMETER Experiment Name: At_Drought_Soil_Dry_P Parameter: Age (day) Value: 27
  misc_feature: MA Experiment 20001557 PARAMETER Experiment Name: At_Drought_Soil_Dry_P Parameter: Organism Value: A. thaliana
  misc_feature: MA Experiment 20001557 PARAMETER Experiment Name: At_Drought_Soil_Dry_P Parameter: Plant Line Value: WS
  misc_feature: MA Experiment 20001557 PARAMETER Experiment Name: At_Drought_Soil_Dry_P Parameter: Post Timepoint (hr) Value: 3
  misc_feature: MA Experiment 20001557 PARAMETER Experiment Name: At_Drought_Soil_Dry_P Parameter: Post-Treatment Value: Re-Water vs. No Drought
  misc_feature: MA Experiment 20001557 PARAMETER Experiment Name: At_Drought_Soil_Dry_P Parameter: Timepoint (day) Value: 13
  misc_feature: MA Experiment 20001557 PARAMETER Experiment Name: At_Drought_Soil_Dry_P Parameter: Treatment Value: Drought vs. No Drought
  misc_feature: MA Experiment ID: 20001558 Result: Up-regulated in Transcription
  misc_feature: MA Experiment 20001558 PARAMETER Experiment Name: At_Drought_Soil_Dry_P Parameter: Age (day) Value: 27
  misc_feature: MA Experiment 20001558 PARAMETER Experiment Name: At_Drought_Soil_Dry_P Parameter: Organism Value: A. thaliana
  misc_feature: MA Experiment 20001558 PARAMETER Experiment Name: At_Drought_Soil_Dry_P Parameter: Plant Line Value: WS
  misc_feature: MA Experiment 20001558 PARAMETER Experiment Name: At_Drought_Soil_Dry_P Parameter: Post Timepoint (hr) Value: 6
  misc_feature: MA Experiment 20001558 PARAMETER Experiment Name: At_Drought_Soil_Dry_P Parameter: Post-Treatment Value: Re-Water vs. No Drought
  misc_feature: MA Experiment 20001558 PARAMETER Experiment Name: At_Drought_Soil_Dry_P Parameter: Timepoint (day) Value: 13
  misc_feature: MA Experiment 20001558 PARAMETER Experiment Name: At_Drought_Soil_Dry_P Parameter: Treatment Value: Drought vs. No Drought
  misc_feature: MA Experiment ID: 20001560 Result: Up-regulated in Transcription
  misc_feature: MA Experiment 20001560 PARAMETER Experiment Name: At_Drought_Soil_Dry_P Parameter: Age (day) Value: 28
  misc_feature: MA Experiment 20001560 PARAMETER Experiment Name: At_Drought_Soil_Dry_P Parameter: Organism Value: A. thaliana
  misc_feature: MA Experiment 20001560 PARAMETER Experiment Name: At_Drought_Soil_Dry_P Parameter: Plant Line Value: WS
  misc_feature: MA Experiment 20001560 PARAMETER Experiment Name: At_Drought_Soil_Dry_P Parameter: Post Timepoint (hr) Value: None
  misc_feature: MA Experiment 20001560 PARAMETER Experiment Name: At_Drought_Soil_Dry_P Parameter: Post-Treatment Value: None
  misc_feature: MA Experiment 20001560 PARAMETER Experiment Name: At_Drought_Soil_Dry_P Parameter: Timepoint (day) Value: 14
  misc_feature: MA Experiment 20001560 PARAMETER Experiment Name: At_Drought_Soil_Dry_P Parameter: Treatment Value: Drought vs. No Drought
  misc_feature: MA Experiment ID: 20001757 Result: Up-regulated in Transcription
  misc_feature: MA Experiment 20001757 PARAMETER Experiment Name: At_50mM_NH4NO3_L-to-H_P Parameter: Timepoint (hr) Value: 6
  misc_feature: MA Experiment 20001757 PARAMETER Experiment Name: At_50mM_NH4NO3_L-to-H_P Parameter: Tissue Value: Leaf
  misc_feature: MA Experiment 20001757 PARAMETER Experiment Name: At_50mM_NH4NO3_L-to-H_P Parameter: Treatment Value: 50mM NH4NO3 vs 100mM Mannitol
ataaaacaaaaaacatcctccgaagcagctactcctcctcagttgttgttccgccgtcccgccatcagatcccaatcaaagatttaggtaataatttaccatagaagaaatggcagagtctactcagatggaagttgagacagcaacagaaggaactgtgccattgccgcctaaaccaaccttcaagcctttgaaagctcatgaaatgtctgatggtaaagtccagttcaggaaaatagctgtaccaccaaaccgatactcgcctctcaagaaagcatggttggatatctacacacccatttacgatcagatgaaggttgacataaggatgaatctcaaagcccgcaaagtcgagcttaaaacccgagctgacactcccgacatcagtaatcttcagaagtctgcggattttgtacacgctttcatgcttggttttgatatccctgatgctatctctcttttgagaatggacgagctttatgttgagtcttttgagatcaaggatgtgaagactcttaaaggtgagcatttgtctagagccattggtaggttgtctggtaaaggagggaagacaaagtttgctattgagaactcgaccaagacgaggattgtgattgcagacactaggattcatattttgggagctttctctaatattaaagtcgcaaggagttcactttgcagtcttattatgggatctcctgctgggaaagtttactctaagctcagatctgtctctgctagattgaacgaatagttttgaatggcgaaattttgaaacattaacttgcttttgttcggagtgatctttgtaatgaaattttgaagaaacaaatgttatggtgttctttataaaatttgttatggg

SEQ ID NO: 98573 - protein, 215 aa, Arabidopsis thaliana
  peptide (1)..(215): Ceres Seq. ID no. 13601045
  misc_feature (1)..(215): Homolog of NCBI NO: 18399930 NR Description: expressed protein [Arabidopsis thaliana] gb|AAF50915.1~gene_id:MDC11.5~similar to unknown protein
  misc_feature (1)..(215): Homolog of NCBI NO: 34908792 NR Description: P0415A04.33 [Oryza sativa (japonica
  misc_feature (22)..(215): Homolog of NCBI NO: 34902190 NR Description: Hypothetical protein [Oryza sativa (japonica group)] >gi|27476101|gb|AAO17032.1| Hypothetical protein [Oryza
  misc_feature (3)..(215): Homolog of NCBI NO: 20129085 NR Description: CG11738-PA [Drosophila melanogaster]
  misc_feature (1)..(215): Homolog of NCBI NO: 34147041 NR Description: putatative 28 kDa protein [Bos taurus]
  misc_feature (1)..(215): Homolog of NCBI NO: 33989460 NR Description: Unknown (protein for MGC:65782) [Danio rerio]
  misc_feature (2)..(215): Homolog of NCBI NO: 33669478 NR Description: partner of Nob1 [Oryzias latipes]
  misc_feature (13)..(212): Homolog of NCBI NO: 40018534 NR Description: putatative 28 kDa protein; partner of Nob1 norvegicus] >gi|33669474|gb|AAQ24834.1| partner of Nob1 [Rattus
  misc_feature (13)..(212): Homolog of NCBI NO: 13384846 NR Description: RIKEN cDNA 1810003N24 [Mus musculus] unnamed protein product [Mus musculus] unnamed protein product [Mus musculus]
  misc_feature (1)..(215): Homolog of NCBI NO: 33638117 NR Description: partner of Nob1 [Danio rerio]
MAESTQMEVETATEGTVPLPPKPTFKPLKAHEMSDGKVQFRKIAVPPNRYSPLKKAWLDIYTPIYDQMKVDIRMNLKARKVELKTRADTPDISNLQKSADFVHAFMLGFDIPDAISLLRMDELYVESFEIKDVKTLKGEHLSRAIGRLSGKGGKTKFAIENSTKTRIVIADTRIHILGAFSNIKVARSSLCSLIMGSPAGKVYSKLRSVSARLNE

SEQ ID NO: 98574 - protein, 209 aa, Arabidopsis thaliana
  peptide (1)..(209): Ceres Seq. ID no. 13601046
  misc_feature (1)..(209): Homolog of NCBI NO: 18399930 NR Description: expressed protein [Arabidopsis thaliana] gb|AAF50915.1~gene_id:MDC11.5~similar to unknown protein
  misc_feature (1)..(209): Homolog of NCBI NO: 34908792 NR Description: P0415A04.33 [Oryza sativa (japonica
  misc_feature (16)..(209): Homolog of NCBI NO: 34902190 NR Description: Hypothetical protein [Oryza sativa (japonica group)] >gi|27476101|gb|AAO17032.1| Hypothetical protein [Oryza
  misc_feature (1)..(209): Homolog of NCBI NO: 20129085 NR Description: CG11738-PA [Drosophila melanogaster]
  misc_feature (1)..(209): Homolog of NCBI NO: 34147041 NR Description: putatative 28 kDa protein [Bos taurus]
  misc_feature (1)..(209): Homolog of NCBI NO: 33989460 NR Description: Unknown (protein for MGC:65782) [Danio rerio]
  misc_feature (1)..(209): Homolog of NCBI NO: 33669478 NR Description: partner of Nob1 [Oryzias latipes]
  misc_feature (7)..(206): Homolog of NCBI NO: 40018534 NR Description: putatative 28 kDa protein; partner of Nob1 norvegicus] >gi|33669474|gb|AAQ24834.1| partner of Nob1 [Rattus
  misc_feature (7)..(206): Homolog of NCBI NO: 13384846 NR Description: RIKEN cDNA 1810003N24 [Mus musculus] unnamed protein product [Mus musculus] unnamed protein product [Mus musculus]
  misc_feature (1)..(209): Homolog of NCBI NO: 33638117 NR Description: partner of Nob1 [Danio rerio]
MEVETATEGTVPLPPKPTFKPLKAHEMSDGKVQFRKIAVPPNRYSPLKKAWLDIYTPIYDQMKVDIRMNLKARKVELKTRADTPDISNLQKSADFVHAFMLGFDIPDAISLLRMDELYVESFEIKDVKTLKGEHLSRAIGRLSGKGGKTKFAIENSTKTRIVIADTRIHILGAFSNIKVARSSLCSLIMGSPAGKVYSKLRSVSARLNE

SEQ ID NO: 98575 - protein, 183 aa, Arabidopsis thaliana
  peptide (1)..(183): Ceres Seq. ID no. 13601047
  misc_feature (1)..(183): Homolog of NCBI NO: 18399930 NR Description: expressed protein [Arabidopsis thaliana] gb|AAF50915.1~gene_id:MDC11.5~similar to unknown protein
  misc_feature (1)..(183): Homolog of NCBI NO: 34908792 NR Description: P0415A04.33 [Oryza sativa (japonica
  misc_feature (1)..(183): Homolog of NCBI NO: 34902190 NR Description: Hypothetical protein [Oryza sativa (japonica group)] >gi|27476101|gb|AAO17032.1| Hypothetical protein [Oryza
  misc_feature (1)..(183): Homolog of NCBI NO: 20129085 NR Description: CG11738-PA [Drosophila melanogaster]
  misc_feature (1)..(183): Homolog of NCBI NO: 34147041 NR Description: putatative 28 kDa protein [Bos taurus]
  misc_feature (1)..(183): Homolog of NCBI NO: 33989460 NR Description: Unknown (protein for MGC:65782) [Danio rerio]
  misc_feature (1)..(183): Homolog of NCBI NO: 33669478 NR Description: partner of Nob1 [Oryzias latipes]
  misc_feature (1)..(180): Homolog of NCBI NO: 40018534 NR Description: putatative 28 kDa protein; partner of Nob1 norvegicus] >gi|33669474|gb|AAQ24834.1| partner of Nob1 [Rattus
  misc_feature (1)..(180): Homolog of NCBI NO: 13384846 NR Description: RIKEN cDNA 1810003N24 [Mus musculus] unnamed protein product [Mus musculus] unnamed protein product [Mus musculus]
  misc_feature (1)..(183): Homolog of NCBI NO: 33638117 NR Description: partner of Nob1 [Danio rerio]
MSDGKVQFRKIAVPPNRYSPLKKAWLDIYTPIYDQMKVDIRMNLKARKVELKTRADTPDISNLQKSADFVHAFMLGFDIPDAISLLRMDELYVESFEIKDVKTLKGEHLSRAIGRLSGKGGKTKFAIENSTKTRIVIADTRIHILGAFSNIKVARSSLCSLIMGSPAGKVYSKLRSVSARLNE

SEQ ID NO: 98576 - DNA, 834 bp, Arabidopsis thaliana
  misc_feature (1)..(834): Ceres Seq. ID no. 13601052
  misc_feature: MA Experiment ID: 108434 Result: Down-regulated in Transcription
  misc_feature: MA Experiment 108434 PARAMETER Experiment Name: At_Root_Tips_cDNA_P Parameter: Tissue Value: Root Tips
  misc_feature: MA Experiment ID: 108462 Result: Up-regulated in Transcription
  misc_feature: MA Experiment 108462 PARAMETER Experiment Name: At_Germinating_Seeds_cDNA_P Parameter: Age (day) Value: 2 vs. 0
  misc_feature: MA Experiment 108462 PARAMETER Experiment Name: At_Germinating_Seeds_cDNA_P Parameter: Tissue Value: Germinating Seeds
  misc_feature: MA Experiment ID: 108463 Result: Up-regulated in Transcription
  misc_feature: MA Experiment 108463 PARAMETER Experiment Name: At_Germinating_Seeds_cDNA_P Parameter: Age (day) Value: 3 vs. 0
  misc_feature: MA Experiment 108463 PARAMETER Experiment Name: At_Germinating_Seeds_cDNA_P Parameter: Tissue Value: Germinating Seeds
  misc_feature: MA Experiment ID: 108464 Result: Up-regulated in Transcription
  misc_feature: MA Experiment 108464 PARAMETER Experiment Name: At_Germinating_Seeds_cDNA_P Parameter: Age (day) Value: 4 vs. 0
  misc_feature: MA Experiment 108464 PARAMETER Experiment Name: At_Germinating_Seeds_cDNA_P Parameter: Tissue Value: Germinating Seeds
  misc_feature: MA Experiment ID: 108501 Result: Down-regulated in Transcription
  misc_feature: MA Experiment 108501 PARAMETER Experiment Name: At_ap2_floral_buds_cDNA_P Parameter: Plant Line Value: ap2 (Ler.)
  misc_feature: MA Experiment 108501 PARAMETER Experiment Name: At_ap2_floral_buds_cDNA_P Parameter: Tissue Value: Closed Flower
  misc_feature: MA Experiment ID: 108667 Result: Up-regulated in Transcription
  misc_feature: MA Experiment 108667 PARAMETER Experiment Name: At_2mM_SA_cDNA_P Parameter: Plant Line Value: WS
  misc_feature: MA Experiment 108667 PARAMETER Experiment Name: At_2mM_SA_cDNA_P Parameter: Timepoint (hr) Value: 1
  misc_feature: MA Experiment 108667 PARAMETER Experiment Name: At_2mM_SA_cDNA_P Parameter: Treatment Value: 2mM SA vs. No Treatment
  misc_feature: MA Experiment ID: 20000093 Result: Up-regulated in Transcription
  misc_feature: MA Experiment 20000093 PARAMETER Experiment Name: At_42deg_Heat_cDNA_P Parameter: Temperature (deg C) Value: 42 vs. 22
  misc_feature: MA Experiment 20000093 PARAMETER Experiment Name: At_42deg_Heat_cDNA_P Parameter: Timepoint (hr) Value: 0.5
  misc_feature: MA Experiment 20000093 PARAMETER Experiment Name: At_42deg_Heat_cDNA_P Parameter: Tissue Value: Aerial
  misc_feature: MA Experiment ID: 20000111 Result: Down-regulated in Transcription
  misc_feature: MA Experiment 20000111 PARAMETER Experiment Name: At_42deg_Heat_cDNA_P Parameter: Temperature (deg C) Value: 42 vs. 22
  misc_feature: MA Experiment 20000111 PARAMETER Experiment Name: At_42deg_Heat_cDNA_P Parameter: Timepoint (hr) Value: 6
  misc_feature: MA Experiment 20000111 PARAMETER Experiment Name: At_42deg_Heat_cDNA_P Parameter: Tissue Value: Aerial
  misc_feature: MA Experiment ID: 20000144 Result: Up-regulated in Transcription
  misc_feature: MA Experiment 20000144 PARAMETER Experiment Name: At_42deg_Heat_cDNA_P Parameter: Temperature (deg C) Value: 42 vs. 22
  misc_feature: MA Experiment 20000144 PARAMETER Experiment Name: At_42deg_Heat_cDNA_P Parameter: Timepoint (hr) Value: 1
  misc_feature: MA Experiment 20000144 PARAMETER Experiment Name: At_42deg_Heat_cDNA_P Parameter: Tissue Value: Aerial
  misc_feature: MA Experiment ID: 20000171 Result: Up-regulated in Transcription
  misc_feature: MA Experiment 20000171 PARAMETER Experiment Name: At_42deg_Heat_P Parameter: Age (day) Value: 14
  misc_feature: MA Experiment 20000171 PARAMETER Experiment Name: At_42deg_Heat_P Parameter: Organism Value: A. thaliana
  misc_feature: MA Experiment 20000171 PARAMETER Experiment Name: At_42deg_Heat_P Parameter: Plant Line Value: WS
  misc_feature: MA Experiment 20000171 PARAMETER Experiment Name: At_42deg_Heat_P Parameter: Temperature (deg C) Value: 42 vs. 22
  misc_feature: MA Experiment 20000171 PARAMETER Experiment Name: At_42deg_Heat_P Parameter: Timepoint (hr) Value: 1
  misc_feature: MA Experiment 20000171 PARAMETER Experiment Name: At_42deg_Heat_P Parameter: Tissue Value: Aerial
  misc_feature: MA Experiment ID: 20000173 Result: Down-regulated in Transcription
  misc_feature: MA Experiment 20000173 PARAMETER Experiment Name: At_42deg_Heat_P Parameter: Age (day) Value: 14
  misc_feature: MA Experiment 20000173 PARAMETER Experiment Name: At_42deg_Heat_P Parameter: Organism Value: A. thaliana
  misc_feature: MA Experiment 20000173 PARAMETER Experiment Name: At_42deg_Heat_P Parameter: Plant Line Value: WS
  misc_feature: MA Experiment 20000173 PARAMETER Experiment Name: At_42deg_Heat_P Parameter: Temperature (deg C) Value: 42 vs. 22
  misc_feature: MA Experiment 20000173 PARAMETER Experiment Name: At_42deg_Heat_P Parameter: Timepoint (hr) Value: 6
  misc_feature: MA Experiment 20000173 PARAMETER Experiment Name: At_42deg_Heat_P Parameter: Tissue Value: Aerial
  misc_feature: MA Experiment ID: 20000185 Result: Up-regulated in Transcription
  misc_feature: MA Experiment 20000185 PARAMETER Experiment Name: At_Roots__P Parameter: Age (day) Value: 7 vs. 21
  misc_feature: MA Experiment 20000185 PARAMETER Experiment Name: At_Roots__P Parameter: Organism Value: A. thaliana
  misc_feature: MA Experiment 20000185 PARAMETER Experiment Name: At_Roots__P Parameter: Tissue Value: Roots vs. Whole Plant
  misc_feature: MA Experiment ID: 20000224 Result: Down-regulated in Transcription
  misc_feature: MA Experiment ID: 20000227 Result: Down-regulated in Transcription
  misc_feature: MA Experiment 20000227 PARAMETER Experiment Name: At_Root-Tips-vs-Tops_P Parameter: Tissue Value: Root Tips vs. Root Tops
  misc_feature: MA Experiment ID: 20000265 Result: Down-regulated in Transcription
  misc_feature: MA Experiment 20000265 PARAMETER Experiment Name: At_Open_Flower_P Parameter: Age (day) Value: 21
  misc_feature: MA Experiment 20000265 PARAMETER Experiment Name: At_Open_Flower_P Parameter: Plant Line Value: WS
  misc_feature: MA Experiment 20000265 PARAMETER Experiment Name: At_Open_Flower_P Parameter: Tissue Value: Closed Flower vs. Whole Plant
  misc_feature: MA Experiment ID: 20000286 Result: Down-regulated in Transcription
  misc_feature: MA Experiment 20000286 PARAMETER Experiment Name: At_Open_Flower_P Parameter: Age (day) Value: 21
  misc_feature: MA Experiment 20000286 PARAMETER Experiment Name: At_Open_Flower_P Parameter: Plant Line Value: WS
  misc_feature: MA Experiment 20000286 PARAMETER Experiment Name: At_Open_Flower_P Parameter: Tissue Value: Half Open vs. Whole Plant
  misc_feature: MA Experiment ID: 20000438 Result: Down-regulated in Transcription
  misc_feature: MA Experiment 20000438 PARAMETER Experiment Name: At_Shoots__P Parameter: Age (day) Value: 14
  misc_feature: MA Experiment 20000438 PARAMETER Experiment Name: At_Shoots__P Parameter: Tissue Value: Shoots vs. Whole Plant
  misc_feature: MA Experiment ID: 20000439 Result: Up-regulated in Transcription
  misc_feature: MA Experiment 20000439 PARAMETER Experiment Name: At_Roots__P Parameter: Age (day) Value: 14 vs. 21
  misc_feature: MA Experiment 20000439 PARAMETER Experiment Name: At_Roots__P Parameter: Organism Value: A. thaliana
  misc_feature: MA Experiment 20000439 PARAMETER Experiment Name: At_Roots__P Parameter: Tissue Value: Roots vs. Whole Plant
  misc_feature: MA Experiment ID: 20000496 Result: Up-regulated in Transcription
  misc_feature: MA Experiment 20000496 PARAMETER Experiment Name: At_Guard_Cells_P Parameter: Harvest Date Value: 7/19/2002
  misc_feature: MA Experiment 20000496 PARAMETER Experiment Name: At_Guard_Cells_P Parameter: Organism Value: Canola
  misc_feature: MA Experiment 20000496 PARAMETER Experiment Name: At_Guard_Cells_P Parameter: Tissue Value: Guard Cells vs. Leaves
  misc_feature: MA Experiment ID: 20000527 Result: Down-regulated in Transcription
  misc_feature: MA Experiment 20000527 PARAMETER Experiment Name: At_10percent_PEG_P Parameter: Age (day) Value: 20
  misc_feature: MA Experiment 20000527 PARAMETER Experiment Name: At_10percent_PEG_P Parameter: Organism Value: A. thaliana
  misc_feature: MA Experiment 20000527 PARAMETER Experiment Name: At_10percent_PEG_P Parameter: Plant Line Value: WS
  misc_feature: MA Experiment 20000527 PARAMETER Experiment Name: At_10percent_PEG_P Parameter: Timepoint (day) Value: 20
  misc_feature: MA Experiment 20000527 PARAMETER Experiment Name: At_10percent_PEG_P Parameter: Tissue Value: Whole Plant
  misc_feature: MA Experiment 20000527 PARAMETER Experiment Name: At_10percent_PEG_P Parameter: Treatment Value: 10percent PEG vs. No Treatment
  misc_feature: MA Experiment ID: 20000794 Result: Down-regulated in Transcription
  misc_feature: MA Experiment 20000794 PARAMETER Experiment Name: At_Petals_P Parameter: Age (day) Value: 23-25 days
  misc_feature: MA Experiment 20000794 PARAMETER Experiment Name: At_Petals_P Parameter: Plant Line Value: WS
  misc_feature: MA Experiment 20000794 PARAMETER Experiment Name: At_Petals_P Parameter: Tissue Value: Petals vs. Whole plant
  misc_feature: MA Experiment ID: 20001247 Result: Up-regulated in Transcription
  misc_feature: MA Experiment 20001247 PARAMETER Experiment Name: At_Far-red-induction_P Parameter: Age (day) Value: 7
  misc_feature: MA Experiment 20001247 PARAMETER Experiment Name: At_Far-red-induction_P Parameter: Light Value: Far-red vs. White
  misc_feature: MA Experiment 20001247 PARAMETER Experiment Name: At_Far-red-induction_P Parameter: Organism Value: A. thaliana
  misc_feature: MA Experiment 20001247 PARAMETER Experiment Name: At_Far-red-induction_P Parameter: Plant Line Value: Columbia
  misc_feature: MA Experiment 20001247 PARAMETER Experiment Name: At_Far-red-induction_P Parameter: Timepoint (hr) Value: 1
  misc_feature: MA Experiment 20001247 PARAMETER Experiment Name: At_Far-red-induction_P Parameter: Tissue Value: Whole Plant
  misc_feature: MA Experiment ID: 20001248 Result: Up-regulated in Transcription
  misc_feature: MA Experiment 20001248 PARAMETER Experiment Name: At_Far-red-induction_P Parameter: Age (day) Value: 7
  misc_feature: MA Experiment 20001248 PARAMETER Experiment Name: At_Far-red-induction_P Parameter: Light Value: Far-red vs. White
  misc_feature: MA Experiment 20001248 PARAMETER Experiment Name: At_Far-red-induction_P Parameter: Organism Value: A. thaliana
  misc_feature: MA Experiment 20001248 PARAMETER Experiment Name: At_Far-red-induction_P Parameter: Plant Line Value: Columbia
  misc_feature: MA Experiment 20001248 PARAMETER Experiment Name: At_Far-red-induction_P Parameter: Timepoint (hr) Value: 4
  misc_feature: MA Experiment 20001248 PARAMETER Experiment Name: At_Far-red-induction_P Parameter: Tissue Value: Whole Plant
  misc_feature: MA Experiment ID: 20001451 Result: Up-regulated in Transcription
  misc_feature: MA Experiment 20001451 PARAMETER Experiment Name: At_Far-red-induction_P Parameter: Age (day) Value: 7
  misc_feature: MA Experiment 20001451 PARAMETER Experiment Name: At_Far-red-induction_P Parameter: Light Value: Far-red vs. White
  misc_feature: MA Experiment 20001451 PARAMETER Experiment Name: At_Far-red-induction_P Parameter: Organism Value: A. thaliana
  misc_feature: MA Experiment 20001451 PARAMETER Experiment Name: At_Far-red-induction_P Parameter: Plant Line Value: Columbia
  misc_feature: MA Experiment 20001451 PARAMETER Experiment Name: At_Far-red-induction_P Parameter: Timepoint (hr) Value: 24
  misc_feature: MA Experiment 20001451 PARAMETER Experiment Name: At_Far-red-induction_P Parameter: Tissue Value: Whole Plant
  misc_feature: MA Experiment ID: 20001757 Result: Up-regulated in Transcription
  misc_feature: MA Experiment 20001757 PARAMETER Experiment Name: At_50mM_NH4NO3_L-to-H_P Parameter: Timepoint (hr) Value: 6
  misc_feature: MA Experiment 20001757 PARAMETER Experiment Name: At_50mM_NH4NO3_L-to-H_P Parameter: Tissue Value: Leaf
  misc_feature: MA Experiment 20001757 PARAMETER Experiment Name: At_50mM_NH4NO3_L-to-H_P Parameter: Treatment Value: 50mM NH4NO3 vs 100mM Mannitol
  misc_feature: MA Experiment ID: 20001904 Result: Down-regulated in Transcription
  misc_feature: MA Experiment 20001904 PARAMETER Experiment Name: At_Drought_Reproduction_P Parameter: Age (day) Value: 37
  misc_feature: MA Experiment 20001904 PARAMETER Experiment Name: At_Drought_Reproduction_P Parameter: Organism Value: A. thaliana
  misc_feature: MA Experiment 20001904 PARAMETER Experiment Name: At_Drought_Reproduction_P Parameter: Plant Line Value: WS
  misc_feature: MA Experiment 20001904 PARAMETER Experiment Name: At_Drought_Reproduction_P Parameter: Timepoint (day) Value: 7
  misc_feature: MA Experiment 20001904 PARAMETER Experiment Name: At_Drought_Reproduction_P Parameter: Tissue Value: Rosettes
  misc_feature: MA Experiment 20001904 PARAMETER Experiment Name: At_Drought_Reproduction_P Parameter: Treatment Value: Drought vs. No Drought
atataagtctttctcactccttctctttcctttgtgattcatatccttcttcttctccaagaacctctctctctttctgcttctctatattttaacactttcttccgaatttgcccctcaagttttattttaattgctaaaatggctggaaccctagttaactccgccgggagattctcaccgggaaattgtattcttcctcaacagagaacagccagattctacagcggaaccgcgagatttcccaccggagctccgtcgtttaaggcttcagctcagacgcttaacgccgagccagctgtaacggaatccgttcgtcggagagtttctagcctctacgaattactgaaagtgaatgaaacggcgtccttgacggagatcaagacggcgtaccggagcttagctaaagtatatcatccagatgcgtcggaatcggacggtcgagattttatggagattcacaaagcttacgcgacacttgcggatccgactacaagagcgatttacgactcgacgcttagagtaccacggagacgggtacacgccggagcgatgggtcggtcggggcgggtttacgctacgacccggagatgggagacggatcagtgttggtgattttaggcttcctatgattttgcagcagcgaaagggcactttttgacttactttcccctttgattacgtttttttttttccttgtcatatctttggaaaattaaggggaaattaagtttaatccgctctttttttttgtttttcttttaacttaagcagttaacaatgtataaagaagttatgagtagagaaatgtatatgattttagttttctccttt

SEQ ID NO: 98577 - protein, 157 aa, Arabidopsis thaliana; identical to SEQ ID NO: 21713
  peptide (1)..(157): Ceres Seq. ID no. 13601053
  misc_feature (64)..(126): Pfam Name: DnaJ domain Pfam Description: DnaJ domain
  misc_feature (1)..(157): Homolog of NCBI NO: 15231204 NR Description: DnaJ protein family [Arabidopsis thaliana]
  misc_feature (6)..(157): Homolog of NCBI NO: 7488763 NR Description: DnaJ protein homolog - kidney bean (fragment)
  misc_feature (29)..(157): Homolog of NCBI NO: 9843641 NR Description: J11 protein [Arabidopsis thaliana]
  misc_feature (29)..(157): Homolog of NCBI NO: 15233446 NR Description: DnaJ protein family [Arabidopsis thaliana]
  misc_feature (63)..(157): Homolog of NCBI NO: 15227919 NR Description: J11 protein, putative [Arabidopsis thaliana]
  misc_feature (64)..(127): Homolog of NCBI NO: 13507741 NR Description: similar to j-domain of DnaJ [Mycoplasma
  misc_feature (64)..(126): Homolog of NCBI NO: 34894012 NR Description: P0672D08.16 [Oryza sativa (japonica >gi|15128446|dbj|BAB62630.1| hypothetical protein [Oryza sativa
  misc_feature (64)..(128): Homolog of NCBI NO: 497646 NR Description: unknown
  misc_feature (64)..(128): Homolog of NCBI NO: 12044852 NR Description: dnaJ-like protein [Mycoplasma genitalium]
  misc_feature (64)..(126): Homolog of NCBI NO: 6691127 NR Description: DnaJ-like protein [Arabidopsis thaliana]

SEQ ID NO: 98578 - protein, 79 aa, Arabidopsis thaliana
  peptide (1)..(79): Ceres Seq. ID no. 13601054
MRRNRTVEILWRFTKLTRHLRIRLQERFTTRRLEYHGDGYTPERWVGRGGFTLRPGDGRRISVGDFRLPMILQQRKGTF

SEQ ID NO: 98579 - DNA, 2052 bp, Arabidopsis thaliana
  misc_feature (1)..(2052): Ceres Seq. ID no. 13601055
  misc_feature: MA Experiment ID: 108577 Result: Down-regulated in Transcription
  misc_feature: MA Experiment 108577 PARAMETER Experiment Name: At_42deg_Heat_cDNA_P Parameter: Temperature (deg C) Value: 42 vs. 22
  misc_feature: MA Experiment 108577 PARAMETER Experiment Name: At_42deg_Heat_cDNA_P Parameter: Timepoint (hr) Value: 6
  misc_feature: MA Experiment 108577 PARAMETER Experiment Name: At_42deg_Heat_cDNA_P Parameter: Tissue Value: Aerial
  misc_feature: MA Experiment ID: 20000111 Result: Down-regulated in Transcription
  misc_feature: MA Experiment 20000111 PARAMETER Experiment Name: At_42deg_Heat_cDNA_P Parameter: Temperature (deg C) Value: 42 vs. 22
  misc_feature: MA Experiment 20000111 PARAMETER Experiment Name: At_42deg_Heat_cDNA_P Parameter: Timepoint (hr) Value: 6
  misc_feature: MA Experiment 20000111 PARAMETER Experiment Name: At_42deg_Heat_cDNA_P Parameter: Tissue Value: Aerial
  misc_feature: MA Experiment ID: 20000113 Result: Down-regulated in Transcription
  misc_feature: MA Experiment 20000113 PARAMETER Experiment Name: At_42deg_Heat_cDNA_P Parameter: Temperature (deg C) Value: 42 vs. 22
  misc_feature: MA Experiment 20000113 PARAMETER Experiment Name: At_42deg_Heat_cDNA_P Parameter: Timepoint (hr) Value: 8
  misc_feature: MA Experiment 20000113 PARAMETER Experiment Name: At_42deg_Heat_cDNA_P Parameter: Tissue Value: Aerial
gttcctctcctctctctctctcttcccgttttcacttttgttcgttctctggcggccgatcccgtcgctcgctaccttttaagatattttttttatctaatgaacctgaaattgtaattaggcatataattggggattatttgctgaaattctcatttctagatcgaaaaaagcgaataattcgttttcatttgattcttgcctaatcttagggtgtctttatttatctaccaaaagaatgtctaattatcgaggagatgatgctgagtacatggaagacgtagatgatgagatggaagatgttgaagatgatatggatgaggagtttcgtggtgatgatcttggtgcttcagattctgacgttgaagaatttgactattcgaacaataaagtagctgataccacggctgagcaagctcggaaagggaaagatatccaggggattccgtgggacagacttaatatttctagagagaaatacagacaaactagattagaacagtataagaattatgaaaatgtccctaattctggagaatcatcagaaaaggtttgcaaggtcacacagaaaggaggactattttatgacttctggcggaattcacgatctattaagtctactatactacatttccagctgagaaatttggtatgggcaacttctaagcacgacgtgtatcttatgtcaaattttctggttacacattattcttctctaacgtctggaaagcatgaagttctcaatgtccgtggtcatgttgcgccatctgagaaacatcctggaagtttacttgaaggatttacgcagactcaagtaagtacacttgcagtaaaagatgactttctggttgctggcgggtttcaaggagaacttatttgcaagcatcttgatagaccgggtgtcagcttttgctctcgtatgacttatgatgataatgctataaccaatgctattgagatctacaacaaacccagtggtgcacttcattttactgcgtcaaataatgactgtggagttagagactttgacatggagagataccagcttgttaagcatttccgttttccttggccagtgaatcacgcatctttgagtcctgatggtaaattactggctattgttggagacaacccggagggccttattgtagaccccaacacaggaaagacgttggaaacactatcaggacacttggacttttcctttgcctctgcgtggcatccggatggagtcactttctctacaggaaaccaagataagacttgtcgtgtatgggacatccgtaacctatctcagtctgttactgtcttgaagggtaacctgggagcaatccggtcaatccgctacacatcagatggaaaatacatggccatggctgaaccggctgactttgtccatgtctatgatgtctcaaacgggtatgaaacagagcaggaaatcgacttctttggggaaatctctggaatatctttcagccctgacacagaggcgctatttattggggtatgggaccgcacttatggtagcctccttgagtttggtcggcgcaggaactattcctaccttgactcgtatctttaagctagaagagaagtatacacaaccctgtccaatgaagaaaagagagctcattcagcaaccagtgaacatgacagaagcaaagcatagatatatggatatctcaaagatgtaaatgatgtgttgtgcaaatgctagttagttagtgtcttttgtttccttctccggctggtgtgttattttccttatgtctggttatgtctggtctcaaaaggttcaagatgtgtacagaaagggctggttcagtggtggcacagactggattaggacttgagggtggctccgcagcgggttctggattcaaagtcgggaggatcattgttgttgtgtttggtggcttgtgatcttttctttttgttccttgtacttgtggttgttgtaggaactcgagtgtttagatcctgttctgagtttagaatttggagatacttaactaaattaaaataaattaataatagtcctttgttcgttat

SEQ ID NO: 98580 - protein, 447 aa, Arabidopsis thaliana; identical to SEQ ID NO: 40107
  peptide (1)..(447): Ceres Seq. ID no. 13601056
  misc_feature (1)..(447): Homolog of NCBI NO: 18399975 NR Description: WD-40 repeat protein family [Arabidopsis >gi|15081811|gb|AAK82560.1| AT3g13340/MDC11_13 [Arabidopsis >gi|22655036|gb|AAM98109.1| At3g13340/MDC11_13 [Arabidopsis
  misc_feature (1)..(447): Homolog of NCBI NO: 18405485 NR Description: WD-40 repeat protein family [Arabidopsis thaliana]
  misc_feature (1)..(447): Homolog of NCBI NO: 18423837 NR Description: WD-40 repeat protein family [Arabidopsis thaliana]
  misc_feature (1)..(447): Homolog of NCBI NO: 21536732 NR Description: WD-repeat protein-like [Arabidopsis thaliana]
  misc_feature (1)..(447): Homolog of NCBI NO: 9758639 NR Description: WD-repeat protein-like [Arabidopsis thaliana]
  misc_feature (7)..(447): Homolog of NCBI NO: 30696707 NR Description: WD-40 repeat protein family [Arabidopsis thaliana]
  misc_feature (1)..(447): Homolog of NCBI NO: 25405994 NR Description: protein F20N2.10 [imported] - Arabidopsis >gi|8778499|gb|AAF79507.1|AC002328_15 F20N2.10 [Arabidopsis
  misc_feature (30)..(447): Homolog of NCBI NO: 9294540 NR Description: WD domain protein-like [Arabidopsis thaliana]
  misc_feature (1)..(445): Homolog of NCBI NO: 13937195 NR Description: At1g78070/F28K19_28 [Arabidopsis thaliana]
  misc_feature (69)..(447): Homolog of NCBI NO: 27948448 NR Description: GAMYB-binding protein [Hordeum vulgare subsp.

SEQ ID NO: 98581 - protein, 436 aa, Arabidopsis thaliana; identical to SEQ ID NO: 40108
  peptide (1)..(436): Ceres Seq. ID no. 13601057
  misc_feature (1)..(436): Homolog of NCBI NO: 18399975 NR Description: WD-40 repeat protein family [Arabidopsis >gi|15081811|gb|AAK82560.1| AT3g13340/MDC11_13 [Arabidopsis >gi|22655036|gb|AAM98109.1| At3g13340/MDC11_13 [Arabidopsis
  misc_feature (1)..(436): Homolog of NCBI NO: 18405485 NR Description: WD-40 repeat protein family [Arabidopsis thaliana]
  misc_feature (1)..(436): Homolog of NCBI NO: 18423837 NR Description: WD-40 repeat protein family [Arabidopsis thaliana]
  misc_feature (1)..(436): Homolog of NCBI NO: 21536732 NR Description: WD-repeat protein-like [Arabidopsis thaliana]
  misc_feature (1)..(436): Homolog of NCBI NO: 9758639 NR Description: WD-repeat protein-like [Arabidopsis thaliana]
  misc_feature (1)..(436): Homolog of NCBI NO: 30696707 NR Description: WD-40 repeat protein family [Arabidopsis thaliana]
  misc_feature (1)..(436): Homolog of NCBI NO: 25405994 NR Description: protein F20N2.10 [imported] - Arabidopsis >gi|8778499|gb|AAF79507.1|AC002328_15 F20N2.10 [Arabidopsis
  misc_feature (19)..(436): Homolog of NCBI NO: 9294540 NR Description: WD domain protein-like [Arabidopsis thaliana]
  misc_feature (1)..(434): Homolog of NCBI NO: 13937195 NR Description: At1g78070/F28K19_28 [Arabidopsis thaliana]
  misc_feature (58)..(436): Homolog of NCBI NO: 27948448 NR Description: GAMYB-binding protein [Hordeum vulgare subsp.

SEQ ID NO: 98582 - protein, 429 aa, Arabidopsis thaliana; identical to SEQ ID NO: 40109
  peptide (1)..(429): Ceres Seq. ID no. 13601058
  misc_feature (1)..(429): Homolog of NCBI NO: 18399975 NR Description: WD-40 repeat protein family [Arabidopsis >gi|15081811|gb|AAK82560.1| AT3g13340/MDC11_13 [Arabidopsis >gi|22655036|gb|AAM98109.1| At3g13340/MDC11_13 [Arabidopsis
  misc_feature (1)..(429): Homolog of NCBI NO: 18405485 NR Description: WD-40 repeat protein family [Arabidopsis thaliana]
  misc_feature (1)..(429): Homolog of NCBI NO: 18423837 NR Description: WD-40 repeat protein family [Arabidopsis thaliana]
  misc_feature (1)..(429): Homolog of NCBI NO: 21536732 NR Description: WD-repeat protein-like [Arabidopsis thaliana]
  misc_feature (1)..(429): Homolog of NCBI NO: 9758639 NR Description: WD-repeat protein-like [Arabidopsis thaliana]
  misc_feature (1)..(429): Homolog of NCBI NO: 30696707 NR Description: WD-40 repeat protein family [Arabidopsis thaliana]
  misc_feature (1)..(429): Homolog of NCBI NO: 25405994 NR Description: protein F20N2.10 [imported] - Arabidopsis >gi|8778499|gb|AAF79507.1|AC002328_15 F20N2.10 [Arabidopsis
  misc_feature (12)..(429): Homolog of NCBI NO: 9294540 NR Description: WD domain protein-like [Arabidopsis thaliana]
  misc_feature (1)..(427): Homolog of NCBI NO: 13937195 NR Description: At1g78070/F28K19_28 [Arabidopsis thaliana]
  misc_feature (51)..(429): Homolog of NCBI NO: 27948448 NR Description: GAMYB-binding protein [Hordeum vulgare subsp.

SEQ ID NO: 98583 - DNA, 1365 bp, Arabidopsis thaliana
  misc_feature (1)..(1365): Ceres Seq. ID no. 13601063
  misc_feature: MA Experiment ID: 20001451 Result: Down-regulated in Transcription
  misc_feature: MA Experiment 20001451 PARAMETER Experiment Name: At_Far-red-induction_P Parameter: Age (day) Value: 7
  misc_feature: MA Experiment 20001451 PARAMETER Experiment Name: At_Far-red-induction_P Parameter: Light Value: Far-red vs. White
  misc_feature: MA Experiment 20001451 PARAMETER Experiment Name: At_Far-red-induction_P Parameter: Organism Value: A. thaliana
  misc_feature: MA Experiment 20001451 PARAMETER Experiment Name: At_Far-red-induction_P Parameter: Plant Line Value: Columbia
  misc_feature: MA Experiment 20001451 PARAMETER Experiment Name: At_Far-red-induction_P Parameter: Timepoint (hr) Value: 24
  misc_feature: MA Experiment 20001451 PARAMETER Experiment Name: At_Far-red-induction_P Parameter: Tissue Value: Whole Plant
gactactcatatgtgtcgcccagatttgaagatcggagatatgaatctcttctttctctggatttgaaagttcgataaaaatctactgatacatcgacttctggaagcgatctcgatctctctagaattgtttcgacgacgaagatgaagaagattcaaattggtgcggtggcgctattggtgtttctatctgtggcctctctctttgaaatcggattggcttctccgaacacagttcctgctttcctctggtctccgcatctccagtctgctaatggtgaattggatgaggctgtaaattatcaggtcatgtctgcaaaggatctagttggttctgttttcactcaaggaggttggtcaaactttctgtgctcagagaagaagcttgagcaacctgttgatgttgcacttgtgttcataggcagagagttactgtcttctgatgtttcttcaaaaaggaactcagatcctgcccttgttaacacattgaataatctatttacagcttccaacttctcattggcattcccatatattgctgctccagaggaagaaaggatggagaatttgttactttcagggcttaaagaagcttgtcccaacaatgtaggagtcagcaatatcgtgttctcagattcgtgctttgttgaggatggaacaattcagaaactttcagacttgcagtctttcaaagatcatttgcttgctagaagagaaacaaggaaagaaggagaaactgacttggttgtgctctgttccgagggttctgaatcgaatagtcaagctggacagtcacattcagagcgtgaaagcttcttggaacttgttagttctgtagaacaatccggcagtaaatatacagctctttatgtttctgatccttattggtacacatcttacaaaactctccaaaggtttctagctgaaactgctaaaggaaacagtactcctgaaattgctactggctgtgatgaactctgcaaatttaagtcatcacttttggagggcatactagtgggaatcgtttttcttctcatcttgatcagtggactttgctgtatggcgggtatcgatacaccgactagattcgagactcctcaagattcttaagctgttgaccttaagagccatccccaccttttgctttgcttttgacgagtcttttcttgtgcatagtgcgcattgtggaaggtacttcaatgtcgatttgttacattattacttcaaaacaaaatctgcatatgccataaaatccccttgtatcatttattcatcttgtttgtgagtctttcttaaacgtcataaattaataatggagaacgagtaaaaaaccagagatacatacactggagaacggattacatt

SEQ ID NO: 98584 - protein, 321 aa, Arabidopsis thaliana; identical to SEQ ID NO: 28682
  peptide (1)..(321): Ceres Seq. ID no. 13601064
  misc_feature (1)..(321): Homolog of NCBI NO: 30682651 NR Description: expressed protein [Arabidopsis thaliana] unknown protein [Arabidopsis thaliana] unknown protein [Arabidopsis thaliana]
  misc_feature (1)..(321): Homolog of NCBI NO: 24417230 NR Description: unknown [Arabidopsis thaliana]
  misc_feature (119)..(321): Homolog of NCBI NO: 21618303 NR Description: unknown [Arabidopsis thaliana]
  misc_feature (56)..(118): Homolog of NCBI NO: 25405838 NR Description: hypothetical protein T5A14.4 [imported] - thaliana >gi|4204260|gb|AAD10641.1| Hypothetical protein

SEQ ID NO: 98585 - protein, 266 aa, Arabidopsis thaliana; identical to SEQ ID NO: 28683
  peptide (1)..(266): Ceres Seq. ID no. 13601065
  misc_feature (1)..(266): Homolog of NCBI NO: 30682651 NR Description: expressed protein [Arabidopsis thaliana] unknown protein [Arabidopsis thaliana] unknown protein [Arabidopsis thaliana]
  misc_feature (1)..(266): Homolog of NCBI NO: 24417230 NR Description: unknown [Arabidopsis thaliana]
  misc_feature (64)..(266): Homolog of NCBI NO: 21618303 NR Description: unknown [Arabidopsis thaliana]
  misc_feature (1)..(63): Homolog of NCBI NO: 25405838 NR Description: hypothetical protein T5A14.4 [imported] - thaliana >gi|4204260|gb|AAD10641.1| Hypothetical protein

SEQ ID NO: 98586 - protein, 183 aa, Arabidopsis thaliana; identical to SEQ ID NO: 28684
  peptide (1)..(183): Ceres Seq. ID no. 13601066
  misc_feature (1)..(183): Homolog of NCBI NO: 30682651 NR Description: expressed protein [Arabidopsis thaliana] unknown protein [Arabidopsis thaliana] unknown protein [Arabidopsis thaliana]
  misc_feature (1)..(183): Homolog of NCBI NO: 24417230 NR Description: unknown [Arabidopsis thaliana]
  misc_feature (1)..(183): Homolog of NCBI NO: 21618303 NR Description: unknown [Arabidopsis thaliana]

SEQ ID NO: 98587 - DNA, 1052 bp, Arabidopsis thaliana
  misc_feature (1)..(1052): Ceres Seq. ID no. 13601075
  misc_feature: MA Experiment ID: 108434 Result: Up-regulated in Transcription
  misc_feature: MA Experiment 108434 PARAMETER Experiment Name: At_Root_Tips_cDNA_P Parameter: Tissue Value: Root Tips
  misc_feature: MA Experiment ID: 108462 Result: Down-regulated in Transcription
  misc_feature: MA Experiment 108462 PARAMETER Experiment Name: At_Germinating_Seeds_cDNA_P Parameter: Age (day) Value: 2 vs. 0
  misc_feature: MA Experiment 108462 PARAMETER Experiment Name: At_Germinating_Seeds_cDNA_P Parameter: Tissue Value: Germinating Seeds
  misc_feature: MA Experiment ID: 108463 Result: Down-regulated in Transcription
  misc_feature: MA Experiment 108463 PARAMETER Experiment Name: At_Germinating_Seeds_cDNA_P Parameter: Age (day) Value: 3 vs. 0
  misc_feature: MA Experiment 108463 PARAMETER Experiment Name: At_Germinating_Seeds_cDNA_P Parameter: Tissue Value: Germinating Seeds
  misc_feature: MA Experiment ID: 108573 Result: Down-regulated in Transcription
  misc_feature: MA Experiment 108573 PARAMETER Experiment Name: At_Drought_cDNA_P Parameter: Timepoint (hr) Value: 6
  misc_feature: MA Experiment 108573 PARAMETER Experiment Name: At_Drought_cDNA_P Parameter: Tissue Value: Aerial
  misc_feature: MA Experiment 108573 PARAMETER Experiment Name: At_Drought_cDNA_P Parameter: Treatment Value: Drought vs. No Drought
  misc_feature: MA Experiment ID: 108577 Result: Up-regulated in Transcription
  misc_feature: MA Experiment 108577 PARAMETER Experiment Name: At_42deg_Heat_cDNA_P Parameter: Temperature (deg C) Value: 42 vs. 22
  misc_feature: MA Experiment 108577 PARAMETER Experiment Name: At_42deg_Heat_cDNA_P Parameter: Timepoint (hr) Value: 6
  misc_feature: MA Experiment 108577 PARAMETER Experiment Name: At_42deg_Heat_cDNA_P Parameter: Tissue Value: Aerial
  misc_feature: MA Experiment ID: 20000173 Result: Up-regulated in Transcription
  misc_feature: MA Experiment 20000173 PARAMETER Experiment Name: At_42deg_Heat_P Parameter: Age (day) Value: 14
  misc_feature: MA Experiment 20000173 PARAMETER Experiment Name: At_42deg_Heat_P Parameter: Organism Value: A. thaliana
  misc_feature: MA Experiment 20000173 PARAMETER Experiment Name: At_42deg_Heat_P Parameter: Plant Line Value: WS
  misc_feature: MA Experiment 20000173 PARAMETER Experiment Name: At_42deg_Heat_P Parameter: Temperature (deg C) Value: 42 vs. 22
  misc_feature: MA Experiment 20000173 PARAMETER Experiment Name: At_42deg_Heat_P Parameter: Timepoint (hr) Value: 6
  misc_feature: MA Experiment 20000173 PARAMETER Experiment Name: At_42deg_Heat_P Parameter: Tissue Value: Aerial
  misc_feature: MA Experiment ID: 20000180 Result: Down-regulated in Transcription
  misc_feature: MA Experiment 20000180 PARAMETER Experiment Name: At_Germinating_Seeds_P Parameter: Age (hr) Value: 24 vs. 0
  misc_feature: MA Experiment 20000180 PARAMETER Experiment Name: At_Germinating_Seeds_P Parameter: Tissue Value: Germinating Seeds
  misc_feature: MA Experiment ID: 20000227 Result: Up-regulated in Transcription
  misc_feature: MA Experiment 20000227 PARAMETER Experiment Name: At_Root-Tips-vs-Tops_P Parameter: Tissue Value: Root Tips vs. Root Tops
  misc_feature: MA Experiment ID: 20000495 Result: Up-regulated in Transcription
  misc_feature: MA Experiment 20000495 PARAMETER Experiment Name: At_Guard_Cells_P Parameter: Harvest Date Value: 8/2/2002
  misc_feature: MA Experiment 20000495 PARAMETER Experiment Name: At_Guard_Cells_P Parameter: Organism Value: A. thaliana
  misc_feature: MA Experiment 20000495 PARAMETER Experiment Name: At_Guard_Cells_P Parameter: Tissue Value: Guard Cells vs. Leaves
  misc_feature: MA Experiment ID: 20000794 Result: Down-regulated in Transcription
  misc_feature: MA Experiment 20000794 PARAMETER Experiment Name: At_Petals_P Parameter: Age (day) Value: 23-25 days
  misc_feature: MA Experiment 20000794 PARAMETER Experiment Name: At_Petals_P Parameter: Plant Line Value: WS
  misc_feature: MA Experiment 20000794 PARAMETER Experiment Name: At_Petals_P Parameter: Tissue Value: Petals vs. Whole plant
  misc_feature: MA Experiment ID: 20001557 Result: Up-regulated in Transcription
  misc_feature: MA Experiment 20001557 PARAMETER Experiment Name: At_Drought_Soil_Dry_P Parameter: Age (day) Value: 27
  misc_feature: MA Experiment 20001557 PARAMETER Experiment Name: At_Drought_Soil_Dry_P Parameter: Organism Value: A. thaliana
  misc_feature: MA Experiment 20001557 PARAMETER Experiment Name: At_Drought_Soil_Dry_P Parameter: Plant Line Value: WS
  misc_feature: MA Experiment 20001557 PARAMETER Experiment Name: At_Drought_Soil_Dry_P Parameter: Post Timepoint (hr) Value: 3
  misc_feature: MA Experiment 20001557 PARAMETER Experiment Name: At_Drought_Soil_Dry_P Parameter: Post-Treatment Value: Re-Water vs. No Drought
  misc_feature: MA Experiment 20001557 PARAMETER Experiment Name: At_Drought_Soil_Dry_P Parameter: Timepoint (day) Value: 13
  misc_feature: MA Experiment 20001557 PARAMETER Experiment Name: At_Drought_Soil_Dry_P Parameter: Treatment Value: Drought vs. No Drought
  misc_feature: MA Experiment ID: 20001558 Result: Up-regulated in Transcription
  misc_feature: MA Experiment 20001558 PARAMETER Experiment Name: At_Drought_Soil_Dry_P Parameter: Age (day) Value: 27
  misc_feature: MA Experiment 20001558 PARAMETER Experiment Name: At_Drought_Soil_Dry_P Parameter: Organism Value: A. thaliana
  misc_feature: MA Experiment 20001558 PARAMETER Experiment Name: At_Drought_Soil_Dry_P Parameter: Plant Line Value: WS
  misc_feature: MA Experiment 20001558 PARAMETER Experiment Name: At_Drought_Soil_Dry_P Parameter: Post Timepoint (hr) Value: 6
  misc_feature: MA Experiment 20001558 PARAMETER Experiment Name: At_Drought_Soil_Dry_P Parameter: Post-Treatment Value: Re-Water vs. No Drought
  misc_feature: MA Experiment 20001558 PARAMETER Experiment Name: At_Drought_Soil_Dry_P Parameter: Timepoint (day) Value: 13
  misc_feature: MA Experiment 20001558 PARAMETER Experiment Name: At_Drought_Soil_Dry_P Parameter: Treatment Value: Drought vs. No Drought
cctagtccaaaaatttctcatactataaaatgatttttttttttgcttcgctccctctttttcacttcgttaacggccccgcctccactctatcctaccgccgacgtccgtgatcgccgaaatgactgaagcagagtccaagactgttgttcctgagtcagtgttgaagaagagaaagagggaggaagaatgggcacttgccaagaaacaggagcttgaggctgccaaaaagcagaatgctgagaagaggaaactcatatttaaccgggctaaacagtactccaaggagtaccaggagaaagaaagggaattaatccagctgaagcgtgaggcaaaattgaaaggaggcttttatgttgacccagaagctaaactgcttttcattatccgtatccgtggtatcaatgccattgacccaaagacaaagaagattttgcaacttttgcgtttaagacagattttcaatggtgtgttcttgaaggtcaacaaggcaaccattaacatgcttcgccgtgttgaaccctatgtaacctatggatacccgaacttaaaaagtgtgaaggaattgatttacaaacgaggttttggaaagcttaaccaccagaggactgccttaacagacaattctattgtagatcaggggctaggaaagcatggcatcatctgcgttgaggatctgatccatgagatcatgacggttgggccacatttcaaggaagccaataactttttgtggccattccagttgaaggctccattgggagggatgaagaagaagaggaaccattacgtggaaggaggagatgctggaaaccgcgagaacttcatcaacgagctcgttaggagaatgaactgaagcgtaagcgttattgctctgaaactccctaggaaacgttttgctataggtggaaaacttctgttcgcttgcttgtgttgccattgaggcgaagtaaacatttacggtgaaagactttgatattttataagtttgaaattgtaagaacacatcatttatttccttccacattacatcgtcacttgcattgcatttt

SEQ ID NO: 98588 - protein, 244 aa, Arabidopsis thaliana; identical to SEQ ID NO: 40188
  peptide (1)..(244): Ceres Seq. ID no. 13601076
  misc_feature (84)..(136): Pfam Name: Ribosomal protein L30p/L7e Pfam Description: Ribosomal protein L30p/L7e
  misc_feature (1)..(244): Homolog of NCBI NO: 15231288 NR Description: 60S ribosomal protein L7 (RPL7D) [Arabidopsis >gi|11994560|dbj|BAB02600.1| 60S ribosomal protein L7 thaliana] >gi|14532552|gb|AAK64004.1| AT3g13580/K20M4_2
  misc_feature (5)..(244): Homolog of NCBI NO: 15226212 NR Description: 60S ribosomal protein L7 (RPL7B) [Arabidopsis
  misc_feature (1)..(244): Homolog of NCBI NO: 30689623 NR Description: 60S ribosomal protein L7 (RPL7C) [Arabidopsis >gi|6174958|sp|Q42208|RL7_ARATH 60S ribosomal protein L7
  misc_feature (4)..(244): Homolog of NCBI NO: 30689617 NR Description: 60S ribosomal protein L7 (RPL7C) [Arabidopsis >gi|15450713|gb|AAK96628.1| At2g44120/F6E13.25 [Arabidopsis >gi|17386142|gb|AAL38617.1|AF446884_1 At2g44120/F6E13.25
  misc_feature (4)..(244): Homolog of NCBI NO: 27311547 NR Description: Unknown protein [Arabidopsis thaliana]
  misc_feature (5)..(244): Homolog of NCBI NO: 445613 NR Description: ribosomal protein L7
  misc_feature (1)..(244): Homolog of NCBI NO: 38346542 NR Description: OSJNBa0035M09.3 [Oryza sativa (japonica
  misc_feature (3)..(244): Homolog of NCBI NO: 38637548 NR Description: putative 60S ribosomal protein L7 [Oryza sativa
  misc_feature (10)..(243): Homolog of NCBI NO: 28630259 NR Description: ribosomal protein L7 [Branchiostoma lanceolatum]
  misc_feature (1)..(244): Homolog of NCBI NO: 307388 NR Description: ribosomal protein L7

SEQ ID NO: 98589 - DNA, 837 bp, Arabidopsis thaliana
  misc_feature (1)..(837): Ceres Seq. ID no. 13601081
  misc_feature: MA Experiment ID: 108434 Result: Up-regulated in Transcription
  misc_feature: MA Experiment 108434 PARAMETER Experiment Name: At_Root_Tips_cDNA_P Parameter: Tissue Value: Root Tips
  misc_feature: MA Experiment ID: 108462 Result: Down-regulated in Transcription
  misc_feature: MA Experiment 108462 PARAMETER Experiment Name: At_Germinating_Seeds_cDNA_P Parameter: Age (day) Value: 2 vs. 0
  misc_feature: MA Experiment 108462 PARAMETER Experiment Name: At_Germinating_Seeds_cDNA_P Parameter: Tissue Value: Germinating Seeds
  misc_feature: MA Experiment ID: 108463 Result: Down-regulated in Transcription
  misc_feature: MA Experiment 108463 PARAMETER Experiment Name: At_Germinating_Seeds_cDNA_P Parameter: Age (day) Value: 3 vs. 0
  misc_feature: MA Experiment 108463 PARAMETER Experiment Name: At_Germinating_Seeds_cDNA_P Parameter: Tissue Value: Germinating Seeds
  misc_feature: MA Experiment ID: 108464 Result: Down-regulated in Transcription
  misc_feature: MA Experiment 108464 PARAMETER Experiment Name: At_Germinating_Seeds_cDNA_P Parameter: Age (day) Value: 4 vs. 0
  misc_feature: MA Experiment 108464 PARAMETER Experiment Name: At_Germinating_Seeds_cDNA_P Parameter: Tissue Value: Germinating Seeds
  misc_feature: MA Experiment ID: 20000234 Result: Down-regulated in Transcription
  misc_feature: MA Experiment 20000234 PARAMETER Experiment Name: At_Siliques_P Parameter: Age (day) Value: 21
  misc_feature: MA Experiment 20000234 PARAMETER Experiment Name: At_Siliques_P Parameter: Organism Value: A. thaliana
  misc_feature: MA Experiment 20000234 PARAMETER Experiment Name: At_Siliques_P Parameter: Plant Line Value: WS
  misc_feature: MA Experiment 20000234 PARAMETER Experiment Name: At_Siliques_P Parameter: Tissue Value: Less Than 5mm Siliques vs. Whole Plant
  misc_feature: MA Experiment ID: 20000235 Result: Down-regulated in Transcription
  misc_feature: MA Experiment 20000235 PARAMETER Experiment Name: At_Siliques_P Parameter: Age (day) Value: 21
  misc_feature: MA Experiment 20000235 PARAMETER Experiment Name: At_Siliques_P Parameter: Organism Value: A. thaliana
  misc_feature: MA Experiment 20000235 PARAMETER Experiment Name: At_Siliques_P Parameter: Plant Line Value: WS
  misc_feature: MA Experiment 20000235 PARAMETER Experiment Name: At_Siliques_P Parameter: Tissue Value: 5-10mm Siliques vs. Whole Plant
  misc_feature: MA Experiment ID: 20000264 Result: Down-regulated in Transcription
  misc_feature: MA Experiment 20000264 PARAMETER Experiment Name: At_Open_Flower_P Parameter: Age (day) Value: 21
  misc_feature: MA Experiment 20000264 PARAMETER Experiment Name: At_Open_Flower_P Parameter: Plant Line Value: WS
  misc_feature: MA Experiment 20000264 PARAMETER Experiment Name: At_Open_Flower_P Parameter: Tissue Value: Open Flower vs. Whole Plant
  misc_feature: MA Experiment ID: 20000265 Result: Down-regulated in Transcription
  misc_feature: MA Experiment 20000265 PARAMETER Experiment Name: At_Open_Flower_P Parameter: Age (day) Value: 21
  misc_feature: MA Experiment 20000265 PARAMETER Experiment Name: At_Open_Flower_P Parameter: Plant Line Value: WS
  misc_feature: MA Experiment 20000265 PARAMETER Experiment Name: At_Open_Flower_P Parameter: Tissue Value: Closed Flower vs. Whole Plant
ctatagattattcaaaaagatgttctgaagacagattttcctcactttgatctcgtggttgcaaatattccttacaacatatcttcccctcttgtggccaagcttgtatacggctccaatacttttcgaagcgccacactcttgcttcaaaaggaattctcccgccggctcctggcaaatccaggagattccgatttcaatagattggcggtgaacgttaagttagtagctgatgttaaatttgtgatggatgtaagtaaaagagagtttgttccacctcctaaagttgattcatctgtaattaggattacaccaaaggagataataccggatgttaatgttcaagaatggttggcattcactcgcacgtgtttcgggaagaagaataagacgcttggttccatgtttaggcagaagaaaaaggtcatggaattgcagagtttgtctgcagggaggcatggctcgaatgttgaggttatgaatcagacaggtggtgattctgacagtgatgttgaagaagatgggaaagatgatttgttgtgtttggatacagatgcaagtatgttcaaggaaagggtaattgaaattctgagaacaaatgggttcgaagagaagagaccatccaagctttcacatcgtgagttgttacatttgctttctttgtttaaccaagctggaatttttttccatgatattacatcattacaaatggatctacacgaataatgataagttttctttaatgttttatgtttttggtcgaaccctttgaatttatttttcttacaaattggaagattacagtaaaagctacttaatgcagtaatttcggaaggg

SEQ ID NO: 98590 - protein, 159 aa, Arabidopsis thaliana
  peptide (1)..(159): Ceres Seq. ID no. 13601082
  misc_feature (19)..(159): Homolog of NCBI NO: 30698221 NR Description: dimethyladenosine transferase-related protein
  misc_feature (1)..(147): Homolog of NCBI NO: 34394642 NR Description: Ribosomal RNA adenine dimethylase-like protein
  misc_feature (1)..(123): Homolog of NCBI NO: 15226591 NR Description: dimethyladenosine transferase -related
  misc_feature (1)..(91): Homolog of NCBI NO: 2500510 NR Description: DIMETHYLADENOSINE TRANSFERASE
  misc_feature (1)..(91): Homolog of NCBI NO: 7433481 NR Description: rRNA (adenine-N6,N6-)-dimethyltransferase (EC
  misc_feature (108)..(147): Homolog of NCBI NO: 2500510 NR Description: DIMETHYLADENOSINE TRANSFERASE
  misc_feature (108)..(147): Homolog of NCBI NO: 7433481 NR Description: rRNA (adenine-N6,N6-)-dimethyltransferase (EC
  misc_feature (1)..(55): Homolog of NCBI NO: 25146882 NR Description: Ribosomal RNA adenine dimethylase (34.6 kD) elegans] >gi|27808654|sp|Q09522|DIMI_CAEEL Probable
  misc_feature (1)..(55): Homolog of NCBI NO: 39589178 NR Description: Hypothetical protein CBG00961 [Caenorhabditis
  misc_feature (1)..(64): Homolog of NCBI NO: 31209593 NR Description: ENSANGP00000016944 [Anopheles gambiae]
MDVSKREFVPPPKVDSSVIRITPKEIIPDVNVQEWLAFTRTCFGKKNKTLGSMFRQKKKVMELQSLSAGRHGSNVEVMNQTGGDSDSDVEEDGKDDLLCLDTDASMFKERVIEILRTNGFEEKRPSKLSHRELLHLLSLFNQAGIFFHDITSLQMDLHE

SEQ ID NO: 98591 - protein, 107 aa, Arabidopsis thaliana
  peptide (1)..(107): Ceres Seq. ID no. 13601083
  misc_feature (1)..(107): Homolog of NCBI NO: 30698221 NR Description: dimethyladenosine transferase-related protein
  misc_feature (1)..(95): Homolog of NCBI NO: 34394642 NR Description: Ribosomal RNA adenine dimethylase-like protein
  misc_feature (1)..(71): Homolog of NCBI NO: 15226591 NR Description: dimethyladenosine transferase -related
  misc_feature (1)..(39): Homolog of NCBI NO: 2500510 NR Description: DIMETHYLADENOSINE TRANSFERASE
  misc_feature (1)..(39): Homolog of NCBI NO: 7433481 NR Description: rRNA (adenine-N6,N6-)-dimethyltransferase (EC
  misc_feature (56)..(95): Homolog of NCBI NO: 2500510 NR Description: DIMETHYLADENOSINE TRANSFERASE
  misc_feature (56)..(95): Homolog of NCBI NO: 7433481 NR Description: rRNA (adenine-N6,N6-)-dimethyltransferase (EC
  misc_feature (1)..(12): Homolog of NCBI NO: 31209593 NR Description: ENSANGP00000016944 [Anopheles gambiae]
  misc_feature (1)..(11): Homolog of NCBI NO: 21358017 NR Description: CG11837-PA [Drosophila melanogaster]
  misc_feature (1)..(13): Homolog of NCBI NO: 19074123 NR Description: DIMETHYLADENOSINE TRANSFERASE [Encephalitozoon >gi|19068765|emb|CAD25233.1| DIMETHYLADENOSINE TRANSFERASE
MFRQKKKVMELQSLSAGRHGSNVEVMNQTGGDSDSDVEEDGKDDLLCLDTDASMFKERVIEILRTNGFEEKRPSKLSHRELLHLLSLFNQAGIFFHDITSLQMDLHE

SEQ ID NO: 98592 - protein, 99 aa, Arabidopsis thaliana
  peptide (1)..(99): Ceres Seq. ID no. 13601084
  misc_feature (1)..(99): Homolog of NCBI NO: 30698221 NR Description: dimethyladenosine transferase-related protein
  misc_feature (1)..(87): Homolog of NCBI NO: 34394642 NR Description: Ribosomal RNA adenine dimethylase-like protein
  misc_feature (1)..(63): Homolog of NCBI NO: 15226591 NR Description: dimethyladenosine transferase -related
  misc_feature (1)..(31): Homolog of NCBI NO: 2500510 NR Description: DIMETHYLADENOSINE TRANSFERASE
  misc_feature (1)..(31): Homolog of NCBI NO: 7433481 NR Description: rRNA (adenine-N6,N6-)-dimethyltransferase (EC
  misc_feature (48)..(87): Homolog of NCBI NO: 2500510 NR Description: DIMETHYLADENOSINE TRANSFERASE
  misc_feature (48)..(87): Homolog of NCBI NO: 7433481 NR Description: rRNA (adenine-N6,N6-)-dimethyltransferase (EC
  misc_feature (1)..(43): Homolog of NCBI NO: 6324989 NR Description: Dimethyladenosine transferase,
  misc_feature (1)..(87): Homolog of NCBI NO: 29246610 NR Description: GLP_13_6796_7746 [Giardia lamblia ATCC 50803]
  misc_feature (1)..(16): Homolog of NCBI NO: 15828486 NR Description: DIMETHYLADENOSINE TRANSFERASE
MELQSLSAGRHGSNVEVMNQTGGDSDSDVEEDGKDDLLCLDTDASMFKERVIEILRTNGFEEKRPSKLSHRELLHLLSLFNQAGIFFHDITSLQMDLHE

SEQ ID NO: 98593 - DNA, 1046 bp, Arabidopsis thaliana
  misc_feature (1)..(1046): Ceres Seq. ID no. 13601085
  misc_feature: MA Experiment ID: 20000111 Result: Down-regulated in Transcription
  misc_feature: MA Experiment 20000111 PARAMETER Experiment Name: At_42deg_Heat_cDNA_P Parameter: Temperature (deg C) Value: 42 vs. 22
  misc_feature: MA Experiment 20000111 PARAMETER Experiment Name: At_42deg_Heat_cDNA_P Parameter: Timepoint (hr) Value: 6
  misc_feature: MA Experiment 20000111 PARAMETER Experiment Name: At_42deg_Heat_cDNA_P Parameter: Tissue Value: Aerial
gattagtccggattgcatctaaggattcgttgatggcggcgtcgtggcagtgggaaaatgccaccgccggcgccgtcgctggattcgccaccgtagctgctatgcactctcttgatgttgttcgtacgagattccaagtcaacgacggaagagggtcaagtctgccgacgtacaagaacactgctcacgctgtcttcaccattgcccgtctcgagggtttgagagggctttatgcaggcttcttccctgcagttatcggttctactgtttcctggggcttatacttctttttttatggaagagccaagcagaggtacgctagaggcagggacgatgagaaactcagccctgctctccaccttgcttctgctgctgaagcaggggccttggtctgtttatgcacaaatcctatttggcttgtcaaaacaaggttacagcttcagacacctcttcatcaaactcaaccatactcagggctattagatgcctttagaaccatagtgaaagaggaaggacccagggcgctctacaagggtattgtccctggtcttgtactggtttctcatggtgctattcagttcacagcttatgaggaactccgtaaaatcattgtggatttgaaagaaaggagaagaaagtccgaatccactgacaatctattgaactcagcagattatgctgcacttggtggctcctccaaagtcgctgcagttcttcttacgtatccatttcaagttatacgagcacgattacagcaacgacctagtaccaacggaatcccaagatatatagacagcttacatgtcatcagagaaaccgcgagatatgaaggtctcaggggtttctacaggggactaacggctaatcttttgaaaaatgtacctgcgtcttccatcacattcatcgtctatgaaaacgttctgaaattgctaaaacagcatccaacaacaaaagattagactcttcctcttcctttaccgttatttcttagactcaacacgcacgcggttgacttgtcactcccaatactagagaattattctttg

SEQ ID NO: 98594 - protein, 318 aa, Arabidopsis thaliana
  peptide (1)..(318): Ceres Seq. ID no. 13601086
  misc_feature (11)..(318): Homolog of NCBI NO: 18425065 NR Description: mitochondrial carrier protein family [Arabidopsis
  misc_feature (11)..(318): Homolog of NCBI NO: 21537040 NR Description: contains similarity to peroxisomal membrane
  misc_feature (11)..(318): Homolog of NCBI NO: 10177519 NR Description: contains similarity to peroxisomal membrane
  misc_feature (16)..(294): Homolog of NCBI NO: 24652037 NR Description: CG8026-PA [Drosophila melanogaster]
  misc_feature (275)..(310): Homolog of NCBI NO: 24652037 NR Description: CG8026-PA [Drosophila melanogaster]
  misc_feature (16)..(310): Homolog of NCBI NO: 27369517 NR Description: mitochondrial folate transporter/carrier [Mus
  misc_feature (16)..(310): Homolog of NCBI NO: 34222668 NR Description: Mitochondrial folate transporter/carrier
  misc_feature (16)..(310): Homolog of NCBI NO: 34866087 NR Description: similar to mitochondrial folate
  misc_feature (16)..(310): Homolog of NCBI NO: 14042724 NR Description: unnamed protein product [Homo sapiens]
  misc_feature (16)..(310): Homolog of NCBI NO: 34222684 NR Description: Mitochondrial folate transporter/carrier hypothetical protein [Macaca fascicularis]
LVRIASKDSLMAASWQWENATAGAVAGFATVAAMHSLDVVRTRFQVNDGRGSSLPTYKNTAHAVFTIARLEGLRGLYAGFFPAVIGSTVSWGLYFFFYGRAKQRYARGRDDEKLSPALHLASAAEAGALVCLCTNPIWLVKTRLQLQTPLHQTQPYSGLLDAFRTIVKEEGPRALYKGIVPGLVLVSHGAIQFTAYEELRKIIVDLKERRRKSESTDNLLNSADYAALGGSSKVAAVLLTYPFQVIRARLQQRPSTNGIPRYIDSLHVIRETARYEGLRGFYRGLTANLLKNVPASSITFIVYENVLKLLKQHPTTKD

SEQ ID NO: 98595 - protein, 308 aa, Arabidopsis thaliana
  peptide (1)..(308): Ceres Seq. ID no. 13601087
  misc_feature (1)..(308): Homolog of NCBI NO: 18425065 NR Description: mitochondrial carrier protein family [Arabidopsis
  misc_feature (1)..(308): Homolog of NCBI NO: 21537040 NR Description: contains similarity to peroxisomal membrane
  misc_feature (1)..(308): Homolog of NCBI NO: 10177519 NR Description: contains similarity to peroxisomal membrane
  misc_feature (6)..(284): Homolog of NCBI NO: 24652037 NR Description: CG8026-PA [Drosophila melanogaster]
  misc_feature (265)..(300): Homolog of NCBI NO: 24652037 NR Description: CG8026-PA [Drosophila melanogaster]
  misc_feature (6)..(300): Homolog of NCBI NO: 27369517 NR Description: mitochondrial folate transporter/carrier [Mus
  misc_feature (6)..(300): Homolog of NCBI NO: 34222668 NR Description: Mitochondrial folate transporter/carrier
  misc_feature (6)..(300): Homolog of NCBI NO: 34866087 NR Description: similar to mitochondrial folate
  misc_feature (6)..(300): Homolog of NCBI NO: 14042724 NR Description: unnamed protein product [Homo sapiens]
  misc_feature (6)..(300): Homolog of NCBI NO: 34222684 NR Description: Mitochondrial folate transporter/carrier hypothetical protein [Macaca fascicularis]
MAASWQWENATAGAVAGFATVAAMHSLDVVRTRFQVNDGRGSSLPTYKNTAHAVFTIARLEGLRGLYAGFFPAVIGSTVSWGLYFFFYGRAKQRYARGRDDEKLSPALHLASAAEAGALVCLCTNPIWLVKTRLQLQTPLHQTQPYSGLLDAFRTIVKEEGPRALYKGIVPGLVLVSHGAIQFTAYEELRKIIVDLKERRRKSESTDNLLNSADYAALGGSSKVAAVLLTYPFQVIRARLQQRPSTNGIPRYIDSLHVIRETARYEGLRGFYRGLTANLLKNVPASSITFIVYENVLKLLKQHPTTKD

SEQ ID NO: 98596 - protein, 285 aa, Arabidopsis thaliana
  peptide (1)..(285): Ceres Seq. ID no. 13601088
  misc_feature (1)..(285): Homolog of NCBI NO: 18425065 NR Description: mitochondrial carrier protein family [Arabidopsis
  misc_feature (1)..(285): Homolog of NCBI NO: 21537040 NR Description: contains similarity to peroxisomal membrane
  misc_feature (1)..(285): Homolog of NCBI NO: 10177519 NR Description: contains similarity to peroxisomal membrane
  misc_feature (1)..(261): Homolog of NCBI NO: 24652037 NR Description: CG8026-PA [Drosophila melanogaster]
  misc_feature (242)..(277): Homolog of NCBI NO: 24652037 NR Description: CG8026-PA [Drosophila melanogaster]
  misc_feature (1)..(277): Homolog of NCBI NO: 27369517 NR Description: mitochondrial folate transporter/carrier [Mus
  misc_feature (1)..(277): Homolog of NCBI NO: 34222668 NR Description: Mitochondrial folate transporter/carrier
  misc_feature (1)..(277): Homolog of NCBI NO: 34866087 NR Description: similar to mitochondrial folate
  misc_feature (1)..(277): Homolog of NCBI NO: 14042724 NR Description: unnamed protein product [Homo sapiens]
  misc_feature (1)..(277): Homolog of NCBI NO: 34222684 NR Description: Mitochondrial folate transporter/carrier hypothetical protein [Macaca fascicularis]
MHSLDVVRTRFQVNDGRGSSLPTYKNTAHAVFTIARLEGLRGLYAGFFPAVIGSTVSWGLYFFFYGRAKQRYARGRDDEKLSPALHLASAAEAGALVCLCTNPIWLVKTRLQLQTPLHQTQPYSGLLDAFRTIVKEEGPRALYKGIVPGLVLVSHGAIQFTAYEELRKIIVDLKERRRKSESTDNLLNSADYAALGGSSKVAAVLLTYPFQVIRARLQQRPSTNGIPRYIDSLHVIRETARYEGLRGFYRGLTANLLKNVPASSITFIVYENVLKLLKQHPTTKD

SEQ ID NO: 98597 - DNA, 1846 bp, Arabidopsis thaliana
  misc_feature (1)..(1846): Ceres Seq. ID no. 13601089
  misc_feature: MA Experiment ID: 108461 Result: Down-regulated in Transcription
  misc_feature: MA Experiment 108461 PARAMETER Experiment Name: At_Germinating_Seeds_cDNA_P Parameter: Age (day) Value: 1 vs. 0
  misc_feature: MA Experiment 108461 PARAMETER Experiment Name: At_Germinating_Seeds_cDNA_P Parameter: Tissue Value: Germinating Seeds
  misc_feature: MA Experiment ID: 108462 Result: Down-regulated in Transcription
  misc_feature: MA Experiment 108462 PARAMETER Experiment Name: At_Germinating_Seeds_cDNA_P Parameter: Age (day) Value: 2 vs. 0
  misc_feature: MA Experiment 108462 PARAMETER Experiment Name: At_Germinating_Seeds_cDNA_P Parameter: Tissue Value: Germinating Seeds
  misc_feature: MA Experiment ID: 108463 Result: Down-regulated in Transcription
  misc_feature: MA Experiment 108463 PARAMETER Experiment Name: At_Germinating_Seeds_cDNA_P Parameter: Age (day) Value: 3 vs. 0
  misc_feature: MA Experiment 108463 PARAMETER Experiment Name: At_Germinating_Seeds_cDNA_P Parameter: Tissue Value: Germinating Seeds
  misc_feature: MA Experiment ID: 108464 Result: Down-regulated in Transcription
  misc_feature: MA Experiment 108464 PARAMETER Experiment Name: At_Germinating_Seeds_cDNA_P Parameter: Age (day) Value: 4 vs. 0
  misc_feature: MA Experiment 108464 PARAMETER Experiment Name: At_Germinating_Seeds_cDNA_P Parameter: Tissue Value: Germinating Seeds
  misc_feature: MA Experiment ID: 108572 Result: Up-regulated in Transcription
  misc_feature: MA Experiment 108572 PARAMETER Experiment Name: At_Drought_cDNA_P Parameter: Timepoint (hr) Value: 1
  misc_feature: MA Experiment 108572 PARAMETER Experiment Name: At_Drought_cDNA_P Parameter: Tissue Value: Aerial
  misc_feature: MA Experiment 108572 PARAMETER Experiment Name: At_Drought_cDNA_P Parameter: Treatment Value: Drought vs. No Drought
  misc_feature: MA Experiment ID: 108573 Result: Up-regulated in Transcription
  misc_feature: MA Experiment 108573 PARAMETER Experiment Name: At_Drought_cDNA_P Parameter: Timepoint (hr) Value: 6
  misc_feature: MA Experiment 108573 PARAMETER Experiment Name: At_Drought_cDNA_P Parameter: Tissue Value: Aerial
  misc_feature: MA Experiment 108573 PARAMETER Experiment Name: At_Drought_cDNA_P Parameter: Treatment Value: Drought vs. No Drought
  misc_feature: MA Experiment ID: 108595 Result: Up-regulated in Transcription
  misc_feature: MA Experiment 108595 PARAMETER Experiment Name: At_Ler-pi_Ovule_cDNA_P Parameter: Plant Line Value: null
  misc_feature: MA Experiment ID: 108607 Result: Up-regulated in Transcription
  misc_feature: MA Experiment 108607 PARAMETER Experiment Name: At_100uM_ABA_cDNA_P Parameter: Timepoint (hr) Value: 4
  misc_feature: MA Experiment 108607 PARAMETER Experiment Name: At_100uM_ABA_cDNA_P Parameter: Tissue Value: Aerial
  misc_feature: MA Experiment 108607 PARAMETER Experiment Name: At_100uM_ABA_cDNA_P Parameter: Treatment Value: 100uM ABA vs. No Treatment
  misc_feature: MA Experiment ID: 108608 Result: Up-regulated in Transcription
  misc_feature: MA Experiment 108608 PARAMETER Experiment Name: At_100uM_ABA_cDNA_P Parameter: Timepoint (hr) Value: 1
  misc_feature: MA Experiment 108608 PARAMETER Experiment Name: At_100uM_ABA_cDNA_P Parameter: Tissue Value: Aerial
  misc_feature: MA Experiment 108608 PARAMETER Experiment Name: At_100uM_ABA_cDNA_P Parameter: Treatment Value: 100uM ABA vs. No Treatment
  misc_feature: MA Experiment ID: 20000070 Result: Up-regulated in Transcription
  misc_feature: MA Experiment 20000070 PARAMETER Experiment Name: At_100uM_ABA_Mutants_cDNA_P Parameter: Plant Line Value: CS24
  misc_feature: MA Experiment 20000070 PARAMETER Experiment Name: At_100uM_ABA_Mutants_cDNA_P Parameter: Timepoint (hr) Value: 6
  misc_feature: MA Experiment 20000070 PARAMETER Experiment Name: At_100uM_ABA_Mutants_cDNA_P Parameter: Tissue Value: Aerial
  misc_feature: MA Experiment 20000070 PARAMETER Experiment Name: At_100uM_ABA_Mutants_cDNA_P Parameter: Treatment Value: 100uM ABA vs. No Treatment
  misc_feature: MA Experiment ID: 20000224 Result: Up-regulated in Transcription
acaagaacaacaaaacagaggaagaagaagaagaagatgaagcttctggctctgtttccatttctagcgatcgtgatccaactcagctgttgggagctaggaacagatgcattaccgagcggtgggttcgtgaggacgaaaggtgttcagtttagtctcaatggctatccatattacgctaatggcttcaatgcctactggctcatgtacgtagcctccgatccatcccaacggtctaagatctccaccgctttccaagatgcttctcgccatggattgaccgttgctcgaacctgggctttcagcgatggcggttacagggctcttcagtattcccctggctcctacaacgaggatatgtttcagggtttggattttgcgttagctgaggcaagaaggcatggtataaagataatactcagctttgccaataactacgagagcttcggagggaggaagcaatatgtggattgggctcgaagcagaggccgtcccgtttcttctgaagacgacttcttcactgactctcttgttaaagatttctacaagaaccatatcaaggctgtgctgaacagattcaatacctttaccaaagttcattacaaagatgacccaaccattatggcttgggagctcatgaacgagccccgttgcccctctgatccttccggaagagccattcaggcttggattactgaaatggctgctcatgtgaaatcactagacagaaaccatctgcttgaagctggcctcgaaggtttctatggtcagtcttcacctcaaagcaagactcttaacccacctggccagtttggaaccgatttcatcgccaataaccgcattcccggcattgatttcgtcacggttcactcttaccctgatgaatggtttccagactcaagcgagcaatcccaaatggatttcttgaacaaatggctagacgcacacatccaagacgcacagaacgttcttcacaaaccaataatattagcagagtttggtaaatcaatgaagaaaccaggttataccccagcgcagagagacatcgtcttcaacaccgtgtacagcaagatttacgggtctgcaaaacgaggaggtgcagcagcaggaggattgttctggcaacttctggtaaacggaattgataattttcaagatgggtatgggatcatacttagccaaagctcgtcgaccgttaacgtcatttcacagcaatcgcggaagttgactttgattaggaaaatcttcgctaggatgatcaatgtggagaaatggaagagagcgagaggtcagggacaagttgggaaacgaggtcacaaaatcaataactgaaatgatactaattaaaccacttttttatagcgaatggaacgatctcagctcgtccacgaaagttatagtgatagatttcataatatatagttttttggccggaatgaatgaactttattagtgcgacgaaaattattagtaataacccgtcaaaactcaaaaggttggttatttagtaatgggctttacttattaggcccactatgaaatacaagggcctagaatttctccagccacatgtgagttataacatgggcaaaaccattcaacaatgtttgttttggattctgtgaaagagatgactatcgttgataatttgaaggatgaagaagattcagaacaataaaacgtcgtcggcgtttgatttcagacatcgccggagagaacaagactctccatttgttacttccatggcttatgtgggtaggtcttggcgtaaacttgtattttatattctcgatttgtacggtttaatgattaaagaagaaaatagacaaaaaaaaattatttagct

SEQ ID NO: 98598 - protein, 443 aa, Arabidopsis thaliana
  peptide (1)..(443): Ceres Seq. ID no. 13601090
  misc_feature (48)..(387): Pfam Name: Cellulase (glycosyl hydrolase family 5) Pfam Description: Cellulase (glycosyl hydrolase family 5)
  misc_feature (13)..(443): Homolog of NCBI NO: 15239973 NR Description: glycosyl hydrolase family 5/cellulase
  misc_feature (22)..(433): Homolog of NCBI NO: 34912090 NR Description: putative mannan endo-1,4-beta-mannosidase [Oryza
  misc_feature (13)..(413): Homolog of NCBI NO: 15228393 NR Description: glycosyl hydrolase family 5/cellulase endohydrolase) [Arabidopsis thaliana]
  misc_feature (16)..(410): Homolog of NCBI NO: 10178872 NR Description: (1-4)-beta-mannan endohydrolase [Coffea arabica]
  misc_feature (13)..(412): Homolog of NCBI NO: 15228394 NR Description: glycosyl hydrolase family 5/cellulase endohydrolase) [Arabidopsis thaliana]
  misc_feature (21)..(433): Homolog of NCBI NO: 10129675 NR Description: (1-4)-beta-mannan endohydrolase [Coffea arabica]
  misc_feature (42)..(412): Homolog of NCBI NO: 37544517 NR Description: mannan endo-1,4-beta-mannosidase precursor
  misc_feature (21)..(410): Homolog of NCBI NO: 15529113 NR Description: endo-beta-mannanase [Lycopersicon esculentum]
  misc_feature (21)..(409): Homolog of NCBI NO: 21307619 NR Description: mannan endo-1,4-beta-mannosidase [Lycopersicon
  misc_feature (21)..(409): Homolog of NCBI NO: 22382040 NR Description: inactive endo-beta-mannanase [Lycopersicon
TRTTKQRKKKKKMKLLALFPFLAIVIQLSCWELGTDALPSGGFVRTKGVQFSLNGYPYYANGFNAYWLMYVASDPSQRSKISTAFQDASRHGLTVARTWAFSDGGYRALQYSPGSYNEDMFQGLDFALAEARRHGIKIILSFANNYESFGGRKQYVDWARSRGRPVSSEDDFFTDSLVKDFYKNHIKAVLNRFNTFTKVHYKDDPTIMAWELMNEPRCPSDPSGRAIQAWITEMAAHVKSLDRNHLLEAGLEGFYGQSSPQSKTLNPPGQFGTDFIANNRIPGIDFVTVHSYPDEWFPDSSEQSQMDFLNKWLDAHIQDAQNVLHKPIILAEFGKSMKKPGYTPAQRDIVFNTVYSKIYGSAKRGGAAAGGLFWQLLVNGIDNFQDGYGIILSQSSSTVNVISQQSRKLTLIRKIFARMINVEKWKRARGQGQVGKRGHKINN

SEQ ID NO: 98599 - protein, 431 aa, Arabidopsis thaliana; identical to SEQ ID NO: 24290
  peptide (1)..(431): Ceres Seq. ID no. 13601091
  misc_feature (36)..(375): Pfam Name: Cellulase (glycosyl hydrolase family 5) Pfam Description: Cellulase (glycosyl hydrolase family 5)
  misc_feature (1)..(431): Homolog of NCBI NO: 15239973 NR Description: glycosyl hydrolase family 5/cellulase
  misc_feature (10)..(421): Homolog of NCBI NO: 34912090 NR Description: putative mannan endo-1,4-beta-mannosidase [Oryza
  misc_feature (1)..(401): Homolog of NCBI NO: 15228393 NR Description: glycosyl hydrolase family 5/cellulase endohydrolase) [Arabidopsis thaliana]
  misc_feature (4)..(398): Homolog of NCBI NO: 10178872 NR Description: (1-4)-beta-mannan endohydrolase [Coffea arabica]
  misc_feature (1)..(400): Homolog of NCBI NO: 15228394 NR Description: glycosyl hydrolase family 5/cellulase endohydrolase) [Arabidopsis thaliana]
  misc_feature (9)..(421): Homolog of NCBI NO: 10129675 NR Description: (1-4)-beta-mannan endohydrolase [Coffea arabica]
  misc_feature (30)..(400): Homolog of NCBI NO: 37544517 NR Description: mannan endo-1,4-beta-mannosidase precursor
  misc_feature (9)..(398): Homolog of NCBI NO: 15529113 NR Description: endo-beta-mannanase [Lycopersicon esculentum]
  misc_feature (9)..(397): Homolog of NCBI NO: 21307619 NR Description: mannan endo-1,4-beta-mannosidase [Lycopersicon
  misc_feature (9)..(397): Homolog of NCBI NO: 22382040 NR Description: inactive endo-beta-mannanase [Lycopersicon

SEQ ID NO: 98600 - protein, 375 aa, Arabidopsis thaliana; identical to SEQ ID NO: 24291
  peptide (1)..(375): Ceres Seq. ID no. 13601092
  misc_feature (1)..(319): Pfam Name: Cellulase (glycosyl hydrolase family 5) Pfam Description: Cellulase (glycosyl hydrolase family 5)
  misc_feature (1)..(375): Homolog of NCBI NO: 15239973 NR Description: glycosyl hydrolase family 5/cellulase
  misc_feature (1)..(365): Homolog of NCBI NO: 34912090 NR Description: putative mannan endo-1,4-beta-mannosidase [Oryza
  misc_feature (1)..(345): Homolog of NCBI NO: 15228393 NR Description: glycosyl hydrolase family 5/cellulase endohydrolase) [Arabidopsis thaliana]
  misc_feature (1)..(342): Homolog of NCBI NO: 10178872 NR Description: (1-4)-beta-mannan endohydrolase [Coffea arabica]
  misc_feature (1)..(344): Homolog of NCBI NO: 15228394 NR Description: glycosyl hydrolase family 5/cellulase endohydrolase) [Arabidopsis thaliana]
  misc_feature (1)..(365): Homolog of NCBI NO: 10129675 NR Description: (1-4)-beta-mannan endohydrolase [Coffea arabica]
  misc_feature (1)..(344): Homolog of NCBI NO: 37544517 NR Description: mannan endo-1,4-beta-mannosidase precursor
  misc_feature (1)..(342): Homolog of NCBI NO: 15529113 NR Description: endo-beta-mannanase [Lycopersicon esculentum]
  misc_feature (1)..(341): Homolog of NCBI NO: 21307619 NR Description: mannan endo-1,4-beta-mannosidase [Lycopersicon
  misc_feature (1)..(341): Homolog of NCBI NO: 22382040 NR Description: inactive endo-beta-mannanase [Lycopersicon

SEQ ID NO: 98601 - DNA, 1202 bp, Arabidopsis thaliana
  misc_feature (1)..(1202): Ceres Seq. ID no. 13601096
  misc_feature: MA Experiment ID: 108434 Result: Down-regulated in Transcription
  misc_feature: MA Experiment 108434 PARAMETER Experiment Name: At_Root_Tips_cDNA_P Parameter: Tissue Value: Root Tips
  misc_feature: MA Experiment ID: 108462 Result: Up-regulated in Transcription
  misc_feature: MA Experiment 108462 PARAMETER Experiment Name: At_Germinating_Seeds_cDNA_P Parameter: Age (day) Value: 2 vs. 0
  misc_feature: MA Experiment 108462 PARAMETER Experiment Name: At_Germinating_Seeds_cDNA_P Parameter: Tissue Value: Germinating Seeds
  misc_feature: MA Experiment ID: 108464 Result: Up-regulated in Transcription
  misc_feature: MA Experiment 108464 PARAMETER Experiment Name: At_Germinating_Seeds_cDNA_P Parameter: Age (day) Value: 4 vs. 0
  misc_feature: MA Experiment 108464 PARAMETER Experiment Name: At_Germinating_Seeds_cDNA_P Parameter: Tissue Value: Germinating Seeds
  misc_feature: MA Experiment ID: 108488 Result: Up-regulated in Transcription
  misc_feature: MA Experiment ID: 108595 Result: Down-regulated in Transcription
  misc_feature: MA Experiment 108595 PARAMETER Experiment Name: At_Ler-pi_Ovule_cDNA_P Parameter: Plant Line Value: null
  misc_feature: MA Experiment ID: 20000072 Result: Down-regulated in Transcription
  misc_feature: MA Experiment 20000072 PARAMETER Experiment Name: At_100uM_ABA_Mutants_cDNA_P Parameter: Plant Line Value: CS8105
  misc_feature: MA Experiment 20000072 PARAMETER Experiment Name: At_100uM_ABA_Mutants_cDNA_P Parameter: Timepoint (hr) Value: 6
  misc_feature: MA Experiment 20000072 PARAMETER Experiment Name: At_100uM_ABA_Mutants_cDNA_P Parameter: Tissue Value: Aerial
  misc_feature: MA Experiment 20000072 PARAMETER Experiment Name: At_100uM_ABA_Mutants_cDNA_P Parameter: Treatment Value: 100uM ABA vs. No Treatment
  misc_feature: MA Experiment ID: 20000087 Result: Down-regulated in Transcription
  misc_feature: MA Experiment 20000087 PARAMETER Experiment Name: At_100uM_ABA_Mutants_cDNA_P Parameter: Plant Line Value: WS
  misc_feature: MA Experiment 20000087 PARAMETER Experiment Name: At_100uM_ABA_Mutants_cDNA_P Parameter: Timepoint (hr) Value: 6
  misc_feature: MA Experiment 20000087 PARAMETER Experiment Name: At_100uM_ABA_Mutants_cDNA_P Parameter: Tissue Value: Aerial
  misc_feature: MA Experiment 20000087 PARAMETER Experiment Name: At_100uM_ABA_Mutants_cDNA_P Parameter: Treatment Value: 100uM ABA vs. No Treatment
  misc_feature: MA Experiment ID: 20000179 Result: Up-regulated in Transcription
  misc_feature: MA Experiment 20000179 PARAMETER Experiment Name: At_Germinating_Seeds_P Parameter: Age (hr) Value: 6 vs. 0
  misc_feature: MA Experiment 20000179 PARAMETER Experiment Name: At_Germinating_Seeds_P Parameter: Tissue Value: Germinating Seeds
  misc_feature: MA Experiment ID: 20000180 Result: Up-regulated in Transcription
  misc_feature: MA Experiment 20000180 PARAMETER Experiment Name: At_Germinating_Seeds_P Parameter: Age (hr) Value: 24 vs. 0
  misc_feature: MA Experiment 20000180 PARAMETER Experiment Name: At_Germinating_Seeds_P Parameter: Tissue Value: Germinating Seeds
  misc_feature: MA Experiment ID: 20000185 Result: Down-regulated in Transcription
  misc_feature: MA Experiment 20000185 PARAMETER Experiment Name: At_Roots__P Parameter: Age (day) Value: 7 vs. 21
  misc_feature: MA Experiment 20000185 PARAMETER Experiment Name: At_Roots__P Parameter: Organism Value: A. thaliana
  misc_feature: MA Experiment 20000185 PARAMETER Experiment Name: At_Roots__P Parameter: Tissue Value: Roots vs. Whole Plant
  misc_feature: MA Experiment ID: 20000227 Result: Down-regulated in Transcription
  misc_feature: MA Experiment 20000227 PARAMETER Experiment Name: At_Root-Tips-vs-Tops_P Parameter: Tissue Value: Root Tips vs. Root Tops
  misc_feature: MA Experiment ID: 20000234 Result: Down-regulated in Transcription
  misc_feature: MA Experiment 20000234 PARAMETER Experiment Name: At_Siliques_P Parameter: Age (day) Value: 21
  misc_feature: MA Experiment 20000234 PARAMETER Experiment Name: At_Siliques_P Parameter: Organism Value: A. thaliana
  misc_feature: MA Experiment 20000234 PARAMETER Experiment Name: At_Siliques_P Parameter: Plant Line Value: WS
  misc_feature: MA Experiment 20000234 PARAMETER Experiment Name: At_Siliques_P Parameter: Tissue Value: Less Than 5mm Siliques vs. Whole Plant
  misc_feature: MA Experiment ID: 20000264 Result: Down-regulated in Transcription
  misc_feature: MA Experiment 20000264 PARAMETER Experiment Name: At_Open_Flower_P Parameter: Age (day) Value: 21
  misc_feature: MA Experiment 20000264 PARAMETER Experiment Name: At_Open_Flower_P Parameter: Plant Line Value: WS
  misc_feature: MA Experiment 20000264 PARAMETER Experiment Name: At_Open_Flower_P Parameter: Tissue Value: Open Flower vs. Whole Plant
  misc_feature: MA Experiment ID: 20000265 Result: Down-regulated in Transcription
  misc_feature: MA Experiment 20000265 PARAMETER Experiment Name: At_Open_Flower_P Parameter: Age (day) Value: 21
  misc_feature: MA Experiment 20000265 PARAMETER Experiment Name: At_Open_Flower_P Parameter: Plant Line Value: WS
  misc_feature: MA Experiment 20000265 PARAMETER Experiment Name: At_Open_Flower_P Parameter: Tissue Value: Closed Flower vs. Whole Plant
  misc_feature: MA Experiment ID: 20000269 Result: Down-regulated in Transcription
  misc_feature: MA Experiment 20000269 PARAMETER Experiment Name: At_1mM_KNO3_L-vs-H_Roots_P Parameter: Age (day) Value: 7,10,12
  misc_feature: MA Experiment 20000269 PARAMETER Experiment Name: At_1mM_KNO3_L-vs-H_Roots_P Parameter: Organism Value: A. thaliana
  misc_feature: MA Experiment 20000269 PARAMETER Experiment Name: At_1mM_KNO3_L-vs-H_Roots_P Parameter: Plant Line Value: WS
  misc_feature: MA Experiment 20000269 PARAMETER Experiment Name: At_1mM_KNO3_L-vs-H_Roots_P Parameter: Timepoint (day) Value: 7,10,12
  misc_feature: MA Experiment 20000269 PARAMETER Experiment Name: At_1mM_KNO3_L-vs-H_Roots_P Parameter: Tissue Value: Roots
  misc_feature: MA Experiment 20000269 PARAMETER Experiment Name: At_1mM_KNO3_L-vs-H_Roots_P Parameter: Treatment Value: 1mM KNO3 vs. 50mM KNO3
  misc_feature: MA Experiment ID: 20000286 Result: Down-regulated in Transcription
  misc_feature: MA Experiment 20000286 PARAMETER Experiment Name: At_Open_Flower_P Parameter: Age (day) Value: 21
  misc_feature: MA Experiment 20000286 PARAMETER Experiment Name: At_Open_Flower_P Parameter: Plant Line Value: WS
  misc_feature: MA Experiment 20000286 PARAMETER Experiment Name: At_Open_Flower_P Parameter: Tissue Value: Half Open vs. Whole Plant
  misc_feature: MA Experiment ID: 20000437 Result: Down-regulated in Transcription
  misc_feature: MA Experiment 20000437 PARAMETER Experiment Name: At_Drought_P Parameter: Age (day) Value: 8
  misc_feature: MA Experiment 20000437 PARAMETER Experiment Name: At_Drought_P Parameter: Organism Value: A. thaliana
  misc_feature: MA Experiment 20000437 PARAMETER Experiment Name: At_Drought_P Parameter: Plant Line Value: WS
  misc_feature: MA Experiment 20000437 PARAMETER Experiment Name: At_Drought_P Parameter: Timepoint (hr) Value: 24
  misc_feature: MA Experiment 20000437 PARAMETER Experiment Name: At_Drought_P Parameter: Tissue Value: Whole Plant
  misc_feature: MA Experiment 20000437 PARAMETER Experiment Name: At_Drought_P Parameter: Treatment Value: Drought vs. No Drought
  misc_feature: MA Experiment ID: 20000438 Result: Up-regulated in Transcription
  misc_feature: MA Experiment 20000438 PARAMETER Experiment Name: At_Shoots__P Parameter: Age (day) Value: 14
  misc_feature: MA Experiment 20000438 PARAMETER Experiment Name: At_Shoots__P Parameter: Tissue Value: Shoots vs. Whole Plant
  misc_feature: MA Experiment ID: 20000439 Result: Down-regulated in Transcription
  misc_feature: MA Experiment 20000439 PARAMETER Experiment Name: At_Roots__P Parameter: Age (day) Value: 14 vs. 21
  misc_feature: MA Experiment 20000439 PARAMETER Experiment Name: At_Roots__P Parameter: Organism Value: A. thaliana
  misc_feature: MA Experiment 20000439 PARAMETER Experiment Name: At_Roots__P Parameter: Tissue Value: Roots vs. Whole Plant
  misc_feature: MA Experiment ID: 20000495 Result: Down-regulated in Transcription
  misc_feature: MA Experiment 20000495 PARAMETER Experiment Name: At_Guard_Cells_P Parameter: Harvest Date Value: 8/2/2002
  misc_feature: MA Experiment 20000495 PARAMETER Experiment Name: At_Guard_Cells_P Parameter: Organism Value: A. thaliana
  misc_feature: MA Experiment 20000495 PARAMETER Experiment Name: At_Guard_Cells_P Parameter: Tissue Value: Guard Cells vs. Leaves
  misc_feature: MA Experiment ID: 20000496 Result: Down-regulated in Transcription
  misc_feature: MA Experiment 20000496 PARAMETER Experiment Name: At_Guard_Cells_P Parameter: Harvest Date Value: 7/19/2002
  misc_feature: MA Experiment 20000496 PARAMETER Experiment Name: At_Guard_Cells_P Parameter: Organism Value: Canola
  misc_feature: MA Experiment 20000496 PARAMETER Experiment Name: At_Guard_Cells_P Parameter: Tissue Value: Guard Cells vs. Leaves
  misc_feature: MA Experiment ID: 20000794 Result: Down-regulated in Transcription
  misc_feature: MA Experiment 20000794 PARAMETER Experiment Name: At_Petals_P Parameter: Age (day) Value: 23-25 days
  misc_feature: MA Experiment 20000794 PARAMETER Experiment Name: At_Petals_P Parameter: Plant Line Value: WS
  misc_feature: MA Experiment 20000794 PARAMETER Experiment Name: At_Petals_P Parameter: Tissue Value: Petals vs. Whole plant
  misc_feature: MA Experiment ID: 20001451 Result: Down-regulated in Transcription
  misc_feature: MA Experiment 20001451 PARAMETER Experiment Name: At_Far-red-induction_P Parameter: Age (day) Value: 7
  misc_feature: MA Experiment 20001451 PARAMETER Experiment Name: At_Far-red-induction_P Parameter: Light Value: Far-red vs. White
  misc_feature: MA Experiment 20001451 PARAMETER Experiment Name: At_Far-red-induction_P Parameter: Organism Value: A. thaliana
  misc_feature: MA Experiment 20001451 PARAMETER Experiment Name: At_Far-red-induction_P Parameter: Plant Line Value: Columbia
  misc_feature: MA Experiment 20001451 PARAMETER Experiment Name: At_Far-red-induction_P Parameter: Timepoint (hr) Value: 24
  misc_feature: MA Experiment 20001451 PARAMETER Experiment Name: At_Far-red-induction_P Parameter: Tissue Value: Whole Plant
  misc_feature: MA Experiment ID: 20001557 Result: Down-regulated in Transcription
  misc_feature: MA Experiment 20001557 PARAMETER Experiment Name: At_Drought_Soil_Dry_P Parameter: Age (day) Value: 27
  misc_feature: MA Experiment 20001557 PARAMETER Experiment Name: At_Drought_Soil_Dry_P Parameter: Organism Value: A. thaliana
  misc_feature: MA Experiment 20001557 PARAMETER Experiment Name: At_Drought_Soil_Dry_P Parameter: Plant Line Value: WS
  misc_feature: MA Experiment 20001557 PARAMETER Experiment Name: At_Drought_Soil_Dry_P Parameter: Post Timepoint (hr) Value: 3
  misc_feature: MA Experiment 20001557 PARAMETER Experiment Name: At_Drought_Soil_Dry_P Parameter: Post-Treatment Value: Re-Water vs. No Drought
  misc_feature: MA Experiment 20001557 PARAMETER Experiment Name: At_Drought_Soil_Dry_P Parameter: Timepoint (day) Value: 13
  misc_feature: MA Experiment 20001557 PARAMETER Experiment Name: At_Drought_Soil_Dry_P Parameter: Treatment Value: Drought vs. No Drought
  misc_feature: MA Experiment ID: 20001558 Result: Down-regulated in Transcription
  misc_feature: MA Experiment 20001558 PARAMETER Experiment Name: At_Drought_Soil_Dry_P Parameter: Age (day) Value: 27
  misc_feature: MA Experiment 20001558 PARAMETER Experiment Name: At_Drought_Soil_Dry_P Parameter: Organism Value: A. thaliana
  misc_feature: MA Experiment 20001558 PARAMETER Experiment Name: At_Drought_Soil_Dry_P Parameter: Plant Line Value: WS
  misc_feature: MA Experiment 20001558 PARAMETER Experiment Name: At_Drought_Soil_Dry_P Parameter: Post Timepoint (hr) Value: 6
  misc_feature: MA Experiment 20001558 PARAMETER Experiment Name: At_Drought_Soil_Dry_P Parameter: Post-Treatment Value: Re-Water vs. No Drought
  misc_feature: MA Experiment 20001558 PARAMETER Experiment Name: At_Drought_Soil_Dry_P Parameter: Timepoint (day) Value: 13
  misc_feature: MA Experiment 20001558 PARAMETER Experiment Name: At_Drought_Soil_Dry_P Parameter: Treatment Value: Drought vs. No Drought
  misc_feature: MA Experiment ID: 20001560 Result: Down-regulated in Transcription
  misc_feature: MA Experiment 20001560 PARAMETER Experiment Name: At_Drought_Soil_Dry_P Parameter: Age (day) Value: 28
  misc_feature: MA Experiment 20001560 PARAMETER Experiment Name: At_Drought_Soil_Dry_P Parameter: Organism Value: A. thaliana
  misc_feature: MA Experiment 20001560 PARAMETER Experiment Name: At_Drought_Soil_Dry_P Parameter: Plant Line Value: WS
  misc_feature: MA Experiment 20001560 PARAMETER Experiment Name: At_Drought_Soil_Dry_P Parameter: Post Timepoint (hr) Value: None
  misc_feature: MA Experiment 20001560 PARAMETER Experiment Name: At_Drought_Soil_Dry_P Parameter: Post-Treatment Value: None
  misc_feature: MA Experiment 20001560 PARAMETER Experiment Name: At_Drought_Soil_Dry_P Parameter: Timepoint (day) Value: 14
  misc_feature: MA Experiment 20001560 PARAMETER Experiment Name: At_Drought_Soil_Dry_P Parameter: Treatment Value: Drought vs. No Drought
  misc_feature: MA Experiment ID: 20001904 Result: Down-regulated in Transcription
  misc_feature: MA Experiment 20001904 PARAMETER Experiment Name: At_Drought_Reproduction_P Parameter: Age (day) Value: 37
  misc_feature: MA Experiment 20001904 PARAMETER Experiment Name: At_Drought_Reproduction_P Parameter: Organism Value: A. thaliana
  misc_feature: MA Experiment 20001904 PARAMETER Experiment Name: At_Drought_Reproduction_P Parameter: Plant Line Value: WS
  misc_feature: MA Experiment 20001904 PARAMETER Experiment Name: At_Drought_Reproduction_P Parameter: Timepoint (day) Value: 7
  misc_feature: MA Experiment 20001904 PARAMETER Experiment Name: At_Drought_Reproduction_P Parameter: Tissue Value: Rosettes
  misc_feature: MA Experiment 20001904 PARAMETER Experiment Name: At_Drought_Reproduction_P Parameter: Treatment Value: Drought vs. No Drought
  misc_feature: MA Experiment ID: 20001905 Result: Down-regulated in Transcription
  misc_feature: MA Experiment 20001905 PARAMETER Experiment Name: At_Drought_Reproduction_P Parameter: Age (day) Value: 40
  misc_feature: MA Experiment 20001905 PARAMETER Experiment Name: At_Drought_Reproduction_P Parameter: Organism Value: A. thaliana
  misc_feature: MA Experiment 20001905 PARAMETER Experiment Name: At_Drought_Reproduction_P Parameter: Plant Line Value: WS
  misc_feature: MA Experiment 20001905 PARAMETER Experiment Name: At_Drought_Reproduction_P Parameter: Timepoint (day) Value: 10
  misc_feature: MA Experiment 20001905 PARAMETER Experiment Name: At_Drought_Reproduction_P Parameter: Tissue Value: Rosettes
  misc_feature: MA Experiment 20001905 PARAMETER Experiment Name: At_Drought_Reproduction_P Parameter: Treatment Value: Drought vs. No Drought
  misc_feature: MA Experiment ID: 20001906 Result: Down-regulated in Transcription
  misc_feature: MA Experiment 20001906 PARAMETER Experiment Name: At_Drought_Reproduction_P Parameter: Age (day) Value: 35
  misc_feature: MA Experiment 20001906 PARAMETER Experiment Name: At_Drought_Reproduction_P Parameter: Organism Value: A. thaliana
  misc_feature: MA Experiment 20001906 PARAMETER Experiment Name: At_Drought_Reproduction_P Parameter: Plant Line Value: WS
  misc_feature: MA Experiment 20001906 PARAMETER Experiment Name: At_Drought_Reproduction_P Parameter: Timepoint (day) Value: 5
  misc_feature: MA Experiment 20001906 PARAMETER Experiment Name: At_Drought_Reproduction_P Parameter: Tissue Value: Siliques
  misc_feature: MA Experiment 20001906 PARAMETER Experiment Name: At_Drought_Reproduction_P Parameter: Treatment Value: Drought vs. No Drought
agcccttttgattattactctttagtctttactttgctcacagctttggatcaccaaaaaaaaaactcaagagagactttgtggccatggcagcctctctccaatccaccgctacattcctccagtcggcgaagatcgccaccgctccttctcgcggaagttctcacctccgatcgactcaagccgtcggcaaatcttttgggctcgaaacttcctcggctcgcctcacttgctccttccagtctgactttaaggacttcaccggtaaatgctccgacgctgtcaaaatcgccggattcgctcttgccacctctgctctcgtcgtctcgggagcaagtgcggagggagctccaaagagattgacctatgatgagattcagagcaagacatacatggaagtgaaaggaactggaacggctaaccagtgccctactattgacggtggctctgagactttctcgttcaaacccggaaagtatgcaggaaagaagttctgcttcgagcctacttccttcaccgtcaaggcagacagtgtaagcaagaacgctcctccagagttccagaacacaaagctcatgacccgtcttacctacacccttgacgagatcgaaggacccttcgaggttgcttcagacggaagcgtcaatttcaaggaagaagatggaatcgactatgctgcagtcacagtccaacttccaggaggtgaacgtgtgccattccttttcacagtcaaacagcttgacgcctcaggcaaaccagacagcttcaccggaaaattcttggttccatcgtaccgtggctcttccttcttggacccaaagggccgtggtggatccacaggatatgacaacgccgtggcattgccagctggaggcagaggagacgaggaggagcttgtaaaggagaacgtgaagaacactgccgcttcagtgggagagatcactctgaaagtgacaaagagcaagccggagacaggagaggtgatcggagtgttcgagagtcttcagccgtcggatactgacttgggtgctaaggtaccaaaggatgtgaagatccaaggggtgtggtatggtcaacttgagtgatcatgttattatattttccgttgattgtgtttgatgataatgataacatcttttgatgctttcttcgtttatctctcttatataaaatgcacatgcctaagatcttgaattttctgt

SEQ ID NO: 98602 - protein, 332 aa, Arabidopsis thaliana
  peptide (1)..(332): Ceres Seq. ID no. 13601097
  misc_feature (96)..(332): Pfam Name: Manganese-stabilising protein / photosystem II Pfam Description: Manganese-stabilising protein / photosystem II
  misc_feature (1)..(332): Homolog of NCBI NO: 15240013 NR Description: photosystem II oxygen-evolving complex 33 (OEC33)
  misc_feature (1)..(332): Homolog of NCBI NO: 21593220 NR Description: 33 kDa polypeptide of oxygen-evolving complex
  misc_feature (1)..(332): Homolog of NCBI NO: 13926291 NR Description: AT5g66570/K1F13_25 [Arabidopsis thaliana]
  misc_feature (1)..(332): Homolog of NCBI NO: 15912247 NR Description: AT5g66570/K1F13_25 [Arabidopsis thaliana]
  misc_feature (1)..(332): Homolog of NCBI NO: 22530906 NR Description: 33 kDa polypeptide of oxygen-evolving complex in photosystem II [Arabidopsis thaliana]
  misc_feature (1)..(332): Homolog of NCBI NO: 15451006 NR Description: 33 kDa polypeptide of oxygen-evolving complex
  misc_feature (1)..(332): Homolog of NCBI NO: 99745 NR Description: photosystem II oxygen-evolving complex protein 1
  misc_feature (1)..(332): Homolog of NCBI NO: 15230324 NR Description: photosystem II oxygen-evolving complex 33 (OEC33)
  misc_feature (1)..(332): Homolog of NCBI NO: 30013657 NR Description: oxygen evolving complex 33 kDa photosystem II
  misc_feature (1)..(332): Homolog of NCBI NO: 11134054 NR Description: Oxygen-evolving enhancer protein 1, chloroplast (OEE1) (33 kDa subunit of oxygen evolving system of photosystem
MAASLQSTATFLQSAKIATAPSRGSSHLRSTQAVGKSFGLETSSARLTCSFQSDFKDFTGKCSDAVKIAGFALATSALVVSGASAEGAPKRLTYDEIQSKTYMEVKGTGTANQCPTIDGGSETFSFKPGKYAGKKFCFEPTSFTVKADSVSKNAPPEFQNTKLMTRLTYTLDEIEGPFEVASDGSVNFKEEDGIDYAAVTVQLPGGERVPFLFTVKQLDASGKPDSFTGKFLVPSYRGSSFLDPKGRGGSTGYDNAVALPAGGRGDEEELVKENVKNTAASVGEITLKVTKSKPETGEVIGVFESLQPSDTDLGAKVPKDVKIQGVWYGQLE

SEQ ID NO: 98603 - protein, 230 aa, Arabidopsis thaliana; identical to SEQ ID NO: 23855
  peptide (1)..(230): Ceres Seq. ID no. 13601098
  misc_feature (1)..(230): Pfam Name: Manganese-stabilising protein / photosystem II Pfam Description: Manganese-stabilising protein / photosystem II
  misc_feature (1)..(230): Homolog of NCBI NO: 15240013 NR Description: photosystem II oxygen-evolving complex 33 (OEC33)
  misc_feature (1)..(230): Homolog of NCBI NO: 21593220 NR Description: 33 kDa polypeptide of oxygen-evolving complex
  misc_feature (1)..(230): Homolog of NCBI NO: 13926291 NR Description: AT5g66570/K1F13_25 [Arabidopsis thaliana]
  misc_feature (1)..(230): Homolog of NCBI NO: 15912247 NR Description: AT5g66570/K1F13_25 [Arabidopsis thaliana]
  misc_feature (1)..(230): Homolog of NCBI NO: 22530906 NR Description: 33 kDa polypeptide of oxygen-evolving complex in photosystem II [Arabidopsis thaliana]
  misc_feature (1)..(230): Homolog of NCBI NO: 15451006 NR Description: 33 kDa polypeptide of oxygen-evolving complex
  misc_feature (1)..(230): Homolog of NCBI NO: 99745 NR Description: photosystem II oxygen-evolving complex protein 1
  misc_feature (1)..(230): Homolog of NCBI NO: 15230324 NR Description: photosystem II oxygen-evolving complex 33 (OEC33)
  misc_feature (1)..(230): Homolog of NCBI NO: 30013657 NR Description: oxygen evolving complex 33 kDa photosystem II
  misc_feature (1)..(230): Homolog of NCBI NO: 11134054 NR Description: Oxygen-evolving enhancer protein 1, chloroplast (OEE1) (33 kDa subunit of oxygen evolving system of photosystem

SEQ ID NO: 98604 - protein, 169 aa, Arabidopsis thaliana; identical to SEQ ID NO: 23856
  peptide (1)..(169): Ceres Seq. ID no. 13601099
  misc_feature (1)..(169): Pfam Name: Manganese-stabilising protein / photosystem II Pfam Description: Manganese-stabilising protein / photosystem II
  misc_feature (1)..(169): Homolog of NCBI NO: 15240013 NR Description: photosystem II oxygen-evolving complex 33 (OEC33)
  misc_feature (1)..(169): Homolog of NCBI NO: 21593220 NR Description: 33 kDa polypeptide of oxygen-evolving complex
  misc_feature (1)..(169): Homolog of NCBI NO: 13926291 NR Description: AT5g66570/K1F13_25 [Arabidopsis thaliana]
  misc_feature (1)..(169): Homolog of NCBI NO: 15912247 NR Description: AT5g66570/K1F13_25 [Arabidopsis thaliana]
  misc_feature (1)..(169): Homolog of NCBI NO: 22530906 NR Description: 33 kDa polypeptide of oxygen-evolving complex in photosystem II [Arabidopsis thaliana]
  misc_feature (1)..(169): Homolog of NCBI NO: 15451006 NR Description: 33 kDa polypeptide of oxygen-evolving complex
  misc_feature (1)..(169): Homolog of NCBI NO: 99745 NR Description: photosystem II oxygen-evolving complex protein 1
  misc_feature (1)..(169): Homolog of NCBI NO: 15230324 NR Description: photosystem II oxygen-evolving complex 33 (OEC33)
  misc_feature (1)..(169): Homolog of NCBI NO: 30013657 NR Description: oxygen evolving complex 33 kDa photosystem II
  misc_feature (1)..(169): Homolog of NCBI NO: 11134054 NR Description: Oxygen-evolving enhancer protein 1, chloroplast (OEE1) (33 kDa subunit of oxygen evolving system of photosystem

SEQ ID NO: 98605 - DNA, 2350 bp, Arabidopsis thaliana
  misc_feature (1)..(2350): Ceres Seq. ID no. 13601100
  misc_feature: MA Experiment ID: 108434 Result: Up-regulated in Transcription
  misc_feature: MA Experiment 108434 PARAMETER Experiment Name: At_Root_Tips_cDNA_P Parameter: Tissue Value: Root Tips
  misc_feature: MA Experiment ID: 108462 Result: Down-regulated in Transcription
  misc_feature: MA Experiment 108462 PARAMETER Experiment Name: At_Germinating_Seeds_cDNA_P Parameter: Age (day) Value: 2 vs. 0
  misc_feature: MA Experiment 108462 PARAMETER Experiment Name: At_Germinating_Seeds_cDNA_P Parameter: Tissue Value: Germinating Seeds
  misc_feature: MA Experiment ID: 108463 Result: Down-regulated in Transcription
  misc_feature: MA Experiment 108463 PARAMETER Experiment Name: At_Germinating_Seeds_cDNA_P Parameter: Age (day) Value: 3 vs. 0
  misc_feature: MA Experiment 108463 PARAMETER Experiment Name: At_Germinating_Seeds_cDNA_P Parameter: Tissue Value: Germinating Seeds
  misc_feature: MA Experiment ID: 108464 Result: Down-regulated in Transcription
  misc_feature: MA Experiment 108464 PARAMETER Experiment Name: At_Germinating_Seeds_cDNA_P Parameter: Age (day) Value: 4 vs. 0
  misc_feature: MA Experiment 108464 PARAMETER Experiment Name: At_Germinating_Seeds_cDNA_P Parameter: Tissue Value: Germinating Seeds
  misc_feature: MA Experiment ID: 20000086 Result: Up-regulated in Transcription
  misc_feature: MA Experiment 20000086 PARAMETER Experiment Name: At_100uM_ABA_Mutants_cDNA_P Parameter: Plant Line Value: CS22
  misc_feature: MA Experiment 20000086 PARAMETER Experiment Name: At_100uM_ABA_Mutants_cDNA_P Parameter: Timepoint (hr) Value: 6
  misc_feature: MA Experiment 20000086 PARAMETER Experiment Name: At_100uM_ABA_Mutants_cDNA_P Parameter: Tissue Value: Aerial
  misc_feature: MA Experiment 20000086 PARAMETER Experiment Name: At_100uM_ABA_Mutants_cDNA_P Parameter: Treatment Value: 100uM ABA vs. No Treatment
  misc_feature: MA Experiment ID: 20000088 Result: Up-regulated in Transcription
  misc_feature: MA Experiment 20000088 PARAMETER Experiment Name: At_100uM_ABA_Mutants_cDNA_P Parameter: Plant Line Value: Landsberg
  misc_feature: MA Experiment 20000088 PARAMETER Experiment Name: At_100uM_ABA_Mutants_cDNA_P Parameter: Timepoint (hr) Value: 6
  misc_feature: MA Experiment 20000088 PARAMETER Experiment Name: At_100uM_ABA_Mutants_cDNA_P Parameter: Tissue Value: Aerial
  misc_feature: MA Experiment 20000088 PARAMETER Experiment Name: At_100uM_ABA_Mutants_cDNA_P Parameter: Treatment Value: 100uM ABA vs. No Treatment
  misc_feature: MA Experiment ID: 20000179 Result: Down-regulated in Transcription
  misc_feature: MA Experiment 20000179 PARAMETER Experiment Name: At_Germinating_Seeds_P Parameter: Age (hr) Value: 6 vs. 0
  misc_feature: MA Experiment 20000179 PARAMETER Experiment Name: At_Germinating_Seeds_P Parameter: Tissue Value: Germinating Seeds
  misc_feature: MA Experiment ID: 20000180 Result: Down-regulated in Transcription
  misc_feature: MA Experiment 20000180 PARAMETER Experiment Name: At_Germinating_Seeds_P Parameter: Age (hr) Value: 24 vs. 0
  misc_feature: MA Experiment 20000180 PARAMETER Experiment Name: At_Germinating_Seeds_P Parameter: Tissue Value: Germinating Seeds
  misc_feature: MA Experiment ID: 20001248 Result: Up-regulated in Transcription
  misc_feature: MA Experiment 20001248 PARAMETER Experiment Name: At_Far-red-induction_P Parameter: Age (day) Value: 7
  misc_feature: MA Experiment 20001248 PARAMETER Experiment Name: At_Far-red-induction_P Parameter: Light Value: Far-red vs. White
  misc_feature: MA Experiment 20001248 PARAMETER Experiment Name: At_Far-red-induction_P Parameter: Organism Value: A. thaliana
  misc_feature: MA Experiment 20001248 PARAMETER Experiment Name: At_Far-red-induction_P Parameter: Plant Line Value: Columbia
  misc_feature: MA Experiment 20001248 PARAMETER Experiment Name: At_Far-red-induction_P Parameter: Timepoint (hr) Value: 4
  misc_feature: MA Experiment 20001248 PARAMETER Experiment Name: At_Far-red-induction_P Parameter: Tissue Value: Whole Plant
  misc_feature: MA Experiment ID: 20001458 Result: Up-regulated in Transcription
  misc_feature: MA Experiment 20001458 PARAMETER Experiment Name: At_50mM_NH4NO3_L-to-H_P Parameter: Age (day) Value: Undefined
  misc_feature: MA Experiment 20001458 PARAMETER Experiment Name: At_50mM_NH4NO3_L-to-H_P Parameter: Organism Value: Undefined
  misc_feature: MA Experiment 20001458 PARAMETER Experiment Name: At_50mM_NH4NO3_L-to-H_P Parameter: Plant Line Value: Undefined
  misc_feature: MA Experiment 20001458 PARAMETER Experiment Name: At_50mM_NH4NO3_L-to-H_P Parameter: Timepoint (hr) Value: 2
  misc_feature: MA Experiment 20001458 PARAMETER Experiment Name: At_50mM_NH4NO3_L-to-H_P Parameter: Tissue Value: Siliques
  misc_feature: MA Experiment 20001458 PARAMETER Experiment Name: At_50mM_NH4NO3_L-to-H_P Parameter: Treatment Value: 50mM NH4NO3 vs. 100mM Manitol
  misc_feature: MA Experiment ID: 20001555 Result: Up-regulated in Transcription
  misc_feature: MA Experiment 20001555 PARAMETER Experiment Name: At_Drought_Soil_Dry_P Parameter: Age (day) Value: 24
  misc_feature: MA Experiment 20001555 PARAMETER Experiment Name: At_Drought_Soil_Dry_P Parameter: Organism Value: A. thaliana
  misc_feature: MA Experiment 20001555 PARAMETER Experiment Name: At_Drought_Soil_Dry_P Parameter: Plant Line Value: WS
  misc_feature: MA Experiment 20001555 PARAMETER Experiment Name: At_Drought_Soil_Dry_P Parameter: Post Timepoint (hr) Value: None
  misc_feature: MA Experiment 20001555 PARAMETER Experiment Name: At_Drought_Soil_Dry_P Parameter: Post-Treatment Value: None
  misc_feature: MA Experiment 20001555 PARAMETER Experiment Name: At_Drought_Soil_Dry_P Parameter: Timepoint (day) Value: 10
  misc_feature: MA Experiment 20001555 PARAMETER Experiment Name: At_Drought_Soil_Dry_P Parameter: Treatment Value: Drought vs. No Drought
  misc_feature: MA Experiment ID: 20001556 Result: Up-regulated in Transcription
  misc_feature: MA Experiment 20001556 PARAMETER Experiment Name: At_Drought_Soil_Dry_P Parameter: Age (day) Value: 26
  misc_feature: MA Experiment 20001556 PARAMETER Experiment Name: At_Drought_Soil_Dry_P Parameter: Organism Value: A. thaliana
  misc_feature: MA Experiment 20001556 PARAMETER Experiment Name: At_Drought_Soil_Dry_P Parameter: Plant Line Value: WS
  misc_feature: MA Experiment 20001556 PARAMETER Experiment Name: At_Drought_Soil_Dry_P Parameter: Post Timepoint (hr) Value: None
  misc_feature: MA Experiment 20001556 PARAMETER Experiment Name: At_Drought_Soil_Dry_P Parameter: Post-Treatment Value: None
  misc_feature: MA Experiment 20001556 PARAMETER Experiment Name: At_Drought_Soil_Dry_P Parameter: Timepoint (day) Value: 12
  misc_feature: MA Experiment 20001556 PARAMETER Experiment Name: At_Drought_Soil_Dry_P Parameter: Treatment Value: Drought vs. No Drought
  misc_feature: MA Experiment ID: 20001557 Result: Up-regulated in Transcription
  misc_feature: MA Experiment 20001557 PARAMETER Experiment Name: At_Drought_Soil_Dry_P Parameter: Age (day) Value: 27
  misc_feature: MA Experiment 20001557 PARAMETER Experiment Name: At_Drought_Soil_Dry_P Parameter: Organism Value: A. thaliana
  misc_feature: MA Experiment 20001557 PARAMETER Experiment Name: At_Drought_Soil_Dry_P Parameter: Plant Line Value: WS
  misc_feature: MA Experiment 20001557 PARAMETER Experiment Name: At_Drought_Soil_Dry_P Parameter: Post Timepoint (hr) Value: 3
  misc_feature: MA Experiment 20001557 PARAMETER Experiment Name: At_Drought_Soil_Dry_P Parameter: Post-Treatment Value: Re-Water vs. No Drought
  misc_feature: MA Experiment 20001557 PARAMETER Experiment Name: At_Drought_Soil_Dry_P Parameter: Timepoint (day) Value: 13
  misc_feature: MA Experiment 20001557 PARAMETER Experiment Name: At_Drought_Soil_Dry_P Parameter: Treatment Value: Drought vs. No Drought
  misc_feature: MA Experiment ID: 20001558 Result: Up-regulated in Transcription
  misc_feature: MA Experiment 20001558 PARAMETER Experiment Name: At_Drought_Soil_Dry_P Parameter: Age (day) Value: 27
  misc_feature: MA Experiment 20001558 PARAMETER Experiment Name: At_Drought_Soil_Dry_P Parameter: Organism Value: A. thaliana
  misc_feature: MA Experiment 20001558 PARAMETER Experiment Name: At_Drought_Soil_Dry_P Parameter: Plant Line Value: WS
  misc_feature: MA Experiment 20001558 PARAMETER Experiment Name: At_Drought_Soil_Dry_P Parameter: Post Timepoint (hr) Value: 6
  misc_feature: MA Experiment 20001558 PARAMETER Experiment Name: At_Drought_Soil_Dry_P Parameter: Post-Treatment Value: Re-Water vs. No Drought
  misc_feature: MA Experiment 20001558 PARAMETER Experiment Name: At_Drought_Soil_Dry_P Parameter: Timepoint (day) Value: 13
  misc_feature: MA Experiment 20001558 PARAMETER Experiment Name: At_Drought_Soil_Dry_P Parameter: Treatment Value: Drought vs. No Drought
  misc_feature: MA Experiment ID: 20001559 Result: Up-regulated in Transcription
  misc_feature: MA Experiment 20001559 PARAMETER Experiment Name: At_Drought_Soil_Dry_P Parameter: Age (day) Value: 28
  misc_feature: MA Experiment 20001559 PARAMETER Experiment Name: At_Drought_Soil_Dry_P Parameter: Organism Value: A. thaliana
  misc_feature: MA Experiment 20001559 PARAMETER Experiment Name: At_Drought_Soil_Dry_P Parameter: Plant Line Value: WS
  misc_feature: MA Experiment 20001559 PARAMETER Experiment Name: At_Drought_Soil_Dry_P Parameter: Post Timepoint (hr) Value: 29
  misc_feature: MA Experiment 20001559 PARAMETER Experiment Name: At_Drought_Soil_Dry_P Parameter: Post-Treatment Value: Re-Water vs. No Drought
  misc_feature: MA Experiment 20001559 PARAMETER Experiment Name: At_Drought_Soil_Dry_P Parameter: Timepoint (day) Value: 14
  misc_feature: MA Experiment 20001559 PARAMETER Experiment Name: At_Drought_Soil_Dry_P Parameter: Treatment Value: Drought vs. No Drought
gtcctcttttgtcgtctctccctgctttcgcacttcatagcctcaatctctcaacaagcagaagagattcgattctccattatcttccttctaaatgccttccctaatgttatctgataagaaagaggagaagaagatgaagaagaagatggctttggataccccagagcttgattctaagaaggggaagaaggagcagaagctgaaactatctgattcggatgaagaagagtcggagaagaagaagagtaagaagaaggataagaagcgtaaggcttccgaggaggaggatgaagtgaagagcgattcaagctcggagaagaagaagagcagcaagaaggttaagttgggcgttgaggatgttgaagttgataaccctaatgctgtttctaagtttcggatttctgcgcctttgagggagaagcttaaggcgaatggtattgaagctcttttcccgattcaggcttccacgtttgatatggttctcgatggtgctgatttagttggacgggctcgtactggtcagggtaaaacattggcttttgtgttgcctatattggaatctttggttaatggacctgccaaaagcaaaaggaagatgggatatggcaggtcaccaagtgttttggtccttttaccgaccagagaattggccaagcaggtggctgctgactttgatgcatatggaggatcacttgggttaagttcatgttgtctctatggaggtgatagctatccagttcaggagggtaaattaaagagaggtgttgacattgtagttggaacccctggtcgtattaaggatcatattgaaagacaaaaccttgatttcagctatttacaattccgtgttcttgatgaagctgatgaaatgttgaggatgggatttgttgaggatgttgaacttattttagggaaagtggaggattctactaaagtccagactcttctcttcagtgctactttgccatcatgggtgaaaaatatctctaacaggtttcttaaaagagaccagaagactattgatcttgttggtaatgataaaatgaaggccagtaatagtgttcgacacattgctattccttgtaataaggcagccatggctcggttgattcctgatattatcagttgctatagcagtggaggccaaactattattttcgctgaaactaaagttcaagtttctgagctttctggtttgttggatggatcaagagccttgcatggtgaaatacctcaatcacaacgtgaggttactcttgctggatttaggaatggcaagtttgcaacattggtggctacaaatgttgctgctcgtggtctagatatcaatgatgtgcagttaattatccagtgtgagcctccacgtgaagttgaagcatatattcatcgttcaggccgaacaggaagagctggcaacacaggagttgcggttacactctacgattctagaaagtcgagtgtatccaggatcgaaaaagaagctggtatcaaatttgagcaccttgctgcacctcaacctgatgaaattgccagatctggtggtatggaagctgctgagaaagttaaacaagtgtgtgacagtgtggttcctgcattccttgaagctgccaaggaattattagaaacttctggtttatcagctgaagtactcctcgcaaaagctcttgcaaaaactgcgggcttcactgagataaagaaaaggtcacttcttacatcaatggagaactatgtgacactacatcttgaagcagggaaaccaatatactcgccatcatttgtttatggactgctaaggagagttttaccggatgacaaggtggaaatgattgaagggttatctctaacagcagataaaacaggagctgtgttcgatgttaagcaatcagatctagacttgttcattgcaggagcacaaaagagtgctggaagtatgagtttggaagtggttaaggtgatgcctaaactccaggagagagaaccattgccacaaaaaagattcggtggtggtggcagaggaaatcggtttggtggtggtggaggaaatcggtttggcggtggtggtggcagaggaagaggaggcagtggtggtagaggccagagatattgaaaactggaacccaacttctcctttctatataaaaagaaactaaactccgtcttataatttcattactatcttcttccgctgatgttttctacactataataggtggcttttctgtgttttccattttctttccttgaacaaacttatggaggctctcttgtaccctcttatcaattttgtgtaatgttggatgataatgatgattaaattataacttcgtcactcattggaattgttttg

SEQ ID NO: 98606 - protein, 671 aa, Arabidopsis thaliana; identical to SEQ ID NO: 27774
  peptide (1)..(671): Ceres Seq. ID no. 13601101
  misc_feature (109)..(327): Pfam Name: DEAD/DEAH box helicase Pfam Description: DEAD/DEAH box helicase
  misc_feature (6)..(667): Homolog of NCBI NO: 7211427 NR Description: RNA helicase [Vigna radiata]
  misc_feature (1)..(671): Homolog of NCBI NO: 7484683 NR Description: RNA helicase prh75 - spinach
  misc_feature (12)..(670): Homolog of NCBI NO: 13959325 NR Description: Nucleolar RNA helicase II (Nucleolar RNA helicase
  misc_feature (12)..(670): Homolog of NCBI NO: 10092595 NR Description: DEAD/H (Asp-Glu-Ala-Asp/His) box polypeptide 21 helicase II/Gu); RH II/Gu; DNA segment, Chr 10, ERATO Doi 645, DNA segment, Chr 10, Wayne State University 42, expressed;
  misc_feature (12)..(670): Homolog of NCBI NO: 21410145 NR Description: Ddx21 protein [Mus musculus]
  misc_feature (12)..(670): Homolog of NCBI NO: 26368308 NR Description: unnamed protein product [Mus musculus]
  misc_feature (1)..(670): Homolog of NCBI NO: 2135315 NR Description: RNA helicase Gu - human (fragment)
  misc_feature (1)..(670): Homolog of NCBI NO: 31455230 NR Description: DDX21 protein [Homo sapiens]
  misc_feature (23)..(669): Homolog of NCBI NO: 10764780 NR Description: RNA helicase II/Gu [Xenopus laevis]
  misc_feature (1)..(669): Homolog of NCBI NO: 16975508 NR Description: RNA helicase II/Gu [Xenopus laevis]

SEQ ID NO: 98607 - protein, 667 aa, Arabidopsis thaliana; identical to SEQ ID NO: 27775
  peptide (1)..(667): Ceres Seq. ID no. 13601102
  misc_feature (105)..(323): Pfam Name: DEAD/DEAH box helicase Pfam Description: DEAD/DEAH box helicase
  misc_feature (2)..(663): Homolog of NCBI NO: 7211427 NR Description: RNA helicase [Vigna radiata]
  misc_feature (1)..(667): Homolog of NCBI NO: 7484683 NR Description: RNA helicase prh75 - spinach
  misc_feature (8)..(666): Homolog of NCBI NO: 13959325 NR Description: Nucleolar RNA helicase II (Nucleolar RNA helicase
  misc_feature (8)..(666): Homolog of NCBI NO: 10092595 NR Description: DEAD/H (Asp-Glu-Ala-Asp/His) box polypeptide 21 helicase II/Gu); RH II/Gu; DNA segment, Chr 10, ERATO Doi 645, DNA segment, Chr 10, Wayne State University 42, expressed;
  misc_feature (8)..(666): Homolog of NCBI NO: 21410145 NR Description: Ddx21 protein [Mus musculus]
  misc_feature (8)..(666): Homolog of NCBI NO: 26368308 NR Description: unnamed protein product [Mus musculus]
  misc_feature (1)..(666): Homolog of NCBI NO: 2135315 NR Description: RNA helicase Gu - human (fragment)
  misc_feature (1)..(666): Homolog of NCBI NO: 31455230 NR Description: DDX21 protein [Homo sapiens]
  misc_feature (19)..(665): Homolog of NCBI NO: 10764780 NR Description: RNA helicase II/Gu [Xenopus laevis]
  misc_feature (1)..(665): Homolog of NCBI NO: 16975508 NR Description: RNA helicase II/Gu [Xenopus laevis]

SEQ ID NO: 98608 - protein, 657 aa, Arabidopsis thaliana; identical to SEQ ID NO: 27776
  peptide (1)..(657): Ceres Seq. ID no. 13601103
  misc_feature (95)..(313): Pfam Name: DEAD/DEAH box helicase Pfam Description: DEAD/DEAH box helicase
  misc_feature (1)..(653): Homolog of NCBI NO: 7211427 NR Description: RNA helicase [Vigna radiata]
  misc_feature (1)..(657): Homolog of NCBI NO: 7484683 NR Description: RNA helicase prh75 - spinach
  misc_feature (1)..(656): Homolog of NCBI NO: 13959325 NR Description: Nucleolar RNA helicase II (Nucleolar RNA helicase
  misc_feature (1)..(656): Homolog of NCBI NO: 10092595 NR Description: DEAD/H (Asp-Glu-Ala-Asp/His) box polypeptide 21 helicase II/Gu); RH II/Gu; DNA segment, Chr 10, ERATO Doi 645, DNA segment, Chr 10, Wayne State University 42, expressed;
  misc_feature (1)..(656): Homolog of NCBI NO: 21410145 NR Description: Ddx21 protein [Mus musculus]
  misc_feature (1)..(656): Homolog of NCBI NO: 26368308 NR Description: unnamed protein product [Mus musculus]
  misc_feature (1)..(656): Homolog of NCBI NO: 2135315 NR Description: RNA helicase Gu - human (fragment)
  misc_feature (1)..(656): Homolog of NCBI NO: 31455230 NR Description: DDX21 protein [Homo sapiens]
  misc_feature (9)..(655): Homolog of NCBI NO: 10764780 NR Description: RNA helicase II/Gu [Xenopus laevis]
  misc_feature (1)..(655): Homolog of NCBI NO: 16975508 NR Description: RNA helicase II/Gu [Xenopus laevis]

SEQ ID NO: 98609 - DNA, 812 bp, Arabidopsis thaliana
  misc_feature (1)..(812): Ceres Seq. ID no. 13601104
  misc_feature: MA Experiment ID: 108435 Result: Up-regulated in Transcription
  misc_feature: MA Experiment 108435 PARAMETER Experiment Name: At_stm_Mutants_cDNA_P Parameter: Plant Line Value: wt Landsburg vs stm
  misc_feature: MA Experiment 108435 PARAMETER Experiment Name: At_stm_Mutants_cDNA_P Parameter: Tissue Value: Shoot Apical Meristem Region
  misc_feature: MA Experiment ID: 108473 Result: Down-regulated in Transcription
  misc_feature: MA Experiment 108473 PARAMETER Experiment Name: At_Drought_Flowers_cDNA_P Parameter: Timepoint (hr) Value: 7 d
  misc_feature: MA Experiment 108473 PARAMETER Experiment Name: At_Drought_Flowers_cDNA_P Parameter: Tissue Value: Flower
  misc_feature: MA Experiment 108473 PARAMETER Experiment Name: At_Drought_Flowers_cDNA_P Parameter: Treatment Value: Drought vs. No Drought
  misc_feature: MA Experiment ID: 108501 Result: Up-regulated in Transcription
  misc_feature: MA Experiment 108501 PARAMETER Experiment Name: At_ap2_floral_buds_cDNA_P Parameter: Plant Line Value: ap2 (Ler.)
  misc_feature: MA Experiment 108501 PARAMETER Experiment Name: At_ap2_floral_buds_cDNA_P Parameter: Tissue Value: Closed Flower
  misc_feature: MA Experiment ID: 108561 Result: Down-regulated in Transcription
  misc_feature: MA Experiment 108561 PARAMETER Experiment Name: At_100uM_ABA_cDNA_P Parameter: Timepoint (hr) Value: 6
  misc_feature: MA Experiment 108561 PARAMETER Experiment Name: At_100uM_ABA_cDNA_P Parameter: Tissue Value: Aerial
  misc_feature: MA Experiment 108561 PARAMETER Experiment Name: At_100uM_ABA_cDNA_P Parameter: Treatment Value: 100uM ABA vs. No Treatment
  misc_feature: MA Experiment ID: 108595 Result: Up-regulated in Transcription
  misc_feature: MA Experiment 108595 PARAMETER Experiment Name: At_Ler-pi_Ovule_cDNA_P Parameter: Plant Line Value: null
  misc_feature: MA Experiment ID: 20000069 Result: Down-regulated in Transcription
  misc_feature: MA Experiment 20000069 PARAMETER Experiment Name: At_100uM_ABA_Mutants_cDNA_P Parameter: Plant Line Value: CS23
  misc_feature: MA Experiment 20000069 PARAMETER Experiment Name: At_100uM_ABA_Mutants_cDNA_P Parameter: Timepoint (hr) Value: 6
  misc_feature: MA Experiment 20000069 PARAMETER Experiment Name: At_100uM_ABA_Mutants_cDNA_P Parameter: Tissue Value: Aerial
  misc_feature: MA Experiment 20000069 PARAMETER Experiment Name: At_100uM_ABA_Mutants_cDNA_P Parameter: Treatment Value: 100uM ABA vs. No Treatment
  misc_feature: MA Experiment ID: 20000071 Result: Down-regulated in Transcription
  misc_feature: MA Experiment 20000071 PARAMETER Experiment Name: At_100uM_ABA_Mutants_cDNA_P Parameter: Plant Line Value: CS8104
  misc_feature: MA Experiment 20000071 PARAMETER Experiment Name: At_100uM_ABA_Mutants_cDNA_P Parameter: Timepoint (hr) Value: 6
  misc_feature: MA Experiment 20000071 PARAMETER Experiment Name: At_100uM_ABA_Mutants_cDNA_P Parameter: Tissue Value: Aerial
  misc_feature: MA Experiment 20000071 PARAMETER Experiment Name: At_100uM_ABA_Mutants_cDNA_P Parameter: Treatment Value: 100uM ABA vs. No Treatment
  misc_feature: MA Experiment ID: 20000089 Result: Down-regulated in Transcription
  misc_feature: MA Experiment ID: 20000093 Result: Down-regulated in Transcription
  misc_feature: MA Experiment 20000093 PARAMETER Experiment Name: At_42deg_Heat_cDNA_P Parameter: Temperature (deg C) Value: 42 vs. 22
  misc_feature: MA Experiment 20000093 PARAMETER Experiment Name: At_42deg_Heat_cDNA_P Parameter: Timepoint (hr) Value: 0.5
  misc_feature: MA Experiment 20000093 PARAMETER Experiment Name: At_42deg_Heat_cDNA_P Parameter: Tissue Value: Aerial
  misc_feature: MA Experiment ID: 20000112 Result: Down-regulated in Transcription
  misc_feature: MA Experiment 20000112 PARAMETER Experiment Name: At_42deg_Heat_cDNA_P Parameter: Temperature (deg C) Value: 42 vs. 22
  misc_feature: MA Experiment 20000112 PARAMETER Experiment Name: At_42deg_Heat_cDNA_P Parameter: Timepoint (hr) Value: 2
  misc_feature: MA Experiment 20000112 PARAMETER Experiment Name: At_42deg_Heat_cDNA_P Parameter: Tissue Value: Aerial
  misc_feature: MA Experiment ID: 20000117 Result: Down-regulated in Transcription
  misc_feature: MA Experiment 20000117 PARAMETER Experiment Name: At_100uM_ABA_Mutants_cDNA_P Parameter: Plant Line Value: Columbia
  misc_feature: MA Experiment 20000117 PARAMETER Experiment Name: At_100uM_ABA_Mutants_cDNA_P Parameter: Timepoint (hr) Value: 6
  misc_feature: MA Experiment 20000117 PARAMETER Experiment Name: At_100uM_ABA_Mutants_cDNA_P Parameter: Tissue Value: Aerial
  misc_feature: MA Experiment 20000117 PARAMETER Experiment Name: At_100uM_ABA_Mutants_cDNA_P Parameter: Treatment Value: 100uM ABA vs. No Treatment
  misc_feature: MA Experiment ID: 20000144 Result: Down-regulated in Transcription
  misc_feature: MA Experiment 20000144 PARAMETER Experiment Name: At_42deg_Heat_cDNA_P Parameter: Temperature (deg C) Value: 42 vs. 22
  misc_feature: MA Experiment 20000144 PARAMETER Experiment Name: At_42deg_Heat_cDNA_P Parameter: Timepoint (hr) Value: 1
  misc_feature: MA Experiment 20000144 PARAMETER Experiment Name: At_42deg_Heat_cDNA_P Parameter: Tissue Value: Aerial
  misc_feature: MA Experiment ID: 20000234 Result: Up-regulated in Transcription
  misc_feature: MA Experiment 20000234 PARAMETER Experiment Name: At_Siliques_P Parameter: Age (day) Value: 21
  misc_feature: MA Experiment 20000234 PARAMETER Experiment Name: At_Siliques_P Parameter: Organism Value: A. thaliana
  misc_feature: MA Experiment 20000234 PARAMETER Experiment Name: At_Siliques_P Parameter: Plant Line Value: WS
  misc_feature: MA Experiment 20000234 PARAMETER Experiment Name: At_Siliques_P Parameter: Tissue Value: Less Than 5mm Siliques vs. Whole Plant
  misc_feature: MA Experiment ID: 20000264 Result: Up-regulated in Transcription
  misc_feature: MA Experiment 20000264 PARAMETER Experiment Name: At_Open_Flower_P Parameter: Age (day) Value: 21
  misc_feature: MA Experiment 20000264 PARAMETER Experiment Name: At_Open_Flower_P Parameter: Plant Line Value: WS
  misc_feature: MA Experiment 20000264 PARAMETER Experiment Name: At_Open_Flower_P Parameter: Tissue Value: Open Flower vs. Whole Plant
  misc_feature: MA Experiment ID: 20000265 Result: Up-regulated in Transcription
  misc_feature: MA Experiment 20000265 PARAMETER Experiment Name: At_Open_Flower_P Parameter: Age (day) Value: 21
  misc_feature: MA Experiment 20000265 PARAMETER Experiment Name: At_Open_Flower_P Parameter: Plant Line Value: WS
  misc_feature: MA Experiment 20000265 PARAMETER Experiment Name: At_Open_Flower_P Parameter: Tissue Value: Closed Flower vs. Whole Plant
  misc_feature: MA Experiment ID: 20000286 Result: Up-regulated in Transcription
  misc_feature: MA Experiment 20000286 PARAMETER Experiment Name: At_Open_Flower_P Parameter: Age (day) Value: 21
  misc_feature: MA Experiment 20000286 PARAMETER Experiment Name: At_Open_Flower_P Parameter: Plant Line Value: WS
  misc_feature: MA Experiment 20000286 PARAMETER Experiment Name: At_Open_Flower_P Parameter: Tissue Value: Half Open vs. Whole Plant
  misc_feature: MA Experiment ID: 20000439 Result: Down-regulated in Transcription
  misc_feature: MA Experiment 20000439 PARAMETER Experiment Name: At_Roots__P Parameter: Age (day) Value: 14 vs. 21
  misc_feature: MA Experiment 20000439 PARAMETER Experiment Name: At_Roots__P Parameter: Organism Value: A. thaliana
  misc_feature: MA Experiment 20000439 PARAMETER Experiment Name: At_Roots__P Parameter: Tissue Value: Roots vs. Whole Plant
  misc_feature: MA Experiment ID: 20000441 Result: Down-regulated in Transcription
  misc_feature: MA Experiment 20000441 PARAMETER Experiment Name: At_1uM_BR-BRZ__P Parameter: Tissue Value: Shoot Apices
  misc_feature: MA Experiment 20000441 PARAMETER Experiment Name: At_1uM_BR-BRZ__P Parameter: Treatment Value: 1uM BR vs. No Treatment
  misc_feature: MA Experiment ID: 20000443 Result: Down-regulated in Transcription
  misc_feature: MA Experiment 20000443 PARAMETER Experiment Name: At_1uM_BR-BRZ__P Parameter: Tissue Value: Shoot Apices
  misc_feature: MA Experiment 20000443 PARAMETER Experiment Name: At_1uM_BR-BRZ__P Parameter: Treatment Value: 1uM BRZ vs. No Treatment
  misc_feature: MA Experiment ID: 20000451 Result: Up-regulated in Transcription
  misc_feature: MA Experiment 20000451 PARAMETER Experiment Name: At_CS6879_Shoots-Roots_P Parameter: Age (day) Value: 14
  misc_feature: MA Experiment 20000451 PARAMETER Experiment Name: At_CS6879_Shoots-Roots_P Parameter: Organism Value: A. thaliana
  misc_feature: MA Experiment 20000451 PARAMETER Experiment Name: At_CS6879_Shoots-Roots_P Parameter: Plant Line Value: CS6879 vs. WS
  misc_feature: MA Experiment 20000451 PARAMETER Experiment Name: At_CS6879_Shoots-Roots_P Parameter: Tissue Value: Roots
  misc_feature: MA Experiment ID: 20001248 Result: Down-regulated in Transcription
  misc_feature: MA Experiment 20001248 PARAMETER Experiment Name: At_Far-red-induction_P Parameter: Age (day) Value: 7
  misc_feature: MA Experiment 20001248 PARAMETER Experiment Name: At_Far-red-induction_P Parameter: Light Value: Far-red vs. White
  misc_feature: MA Experiment 20001248 PARAMETER Experiment Name: At_Far-red-induction_P Parameter: Organism Value: A. thaliana
  misc_feature: MA Experiment 20001248 PARAMETER Experiment Name: At_Far-red-induction_P Parameter: Plant Line Value: Columbia
  misc_feature: MA Experiment 20001248 PARAMETER Experiment Name: At_Far-red-induction_P Parameter: Timepoint (hr) Value: 4
  misc_feature: MA Experiment 20001248 PARAMETER Experiment Name: At_Far-red-induction_P Parameter: Tissue Value: Whole Plant
  misc_feature: MA Experiment ID: 20001504 Result: Up-regulated in Transcription
  misc_feature: MA Experiment 20001504 PARAMETER Experiment Name: At_Far-red-enriched_P Parameter: Age (day) Value: 10
  misc_feature: MA Experiment 20001504 PARAMETER Experiment Name: At_Far-red-enriched_P Parameter: Light Value: Far-red enriched vs. White
  misc_feature: MA Experiment 20001504 PARAMETER Experiment Name: At_Far-red-enriched_P Parameter: Organism Value: A. thaliana
  misc_feature: MA Experiment 20001504 PARAMETER Experiment Name: At_Far-red-enriched_P Parameter: Plant Line Value: Columbia
  misc_feature: MA Experiment 20001504 PARAMETER Experiment Name: At_Far-red-enriched_P Parameter: Timepoint (day) Value: 6
  misc_feature: MA Experiment 20001504 PARAMETER Experiment Name: At_Far-red-enriched_P Parameter: Tissue Value: Whole Plant
  misc_feature: MA Experiment ID: 20001554 Result: Up-regulated in Transcription
  misc_feature: MA Experiment 20001554 PARAMETER Experiment Name: At_Drought_Soil_Dry_P Parameter: Age (day) Value: 21
  misc_feature: MA Experiment 20001554 PARAMETER Experiment Name: At_Drought_Soil_Dry_P Parameter: Organism Value: A. thaliana
  misc_feature: MA Experiment 20001554 PARAMETER Experiment Name: At_Drought_Soil_Dry_P Parameter: Plant Line Value: WS
  misc_feature: MA Experiment 20001554 PARAMETER Experiment Name: At_Drought_Soil_Dry_P Parameter: Post Timepoint (hr) Value: None
  misc_feature: MA Experiment 20001554 PARAMETER Experiment Name: At_Drought_Soil_Dry_P Parameter: Post-Treatment Value: None
  misc_feature: MA Experiment 20001554 PARAMETER Experiment Name: At_Drought_Soil_Dry_P Parameter: Timepoint (day) Value: 7
  misc_feature: MA Experiment 20001554 PARAMETER Experiment Name: At_Drought_Soil_Dry_P Parameter: Treatment Value: Drought vs. No Drought
  misc_feature: MA Experiment ID: 20001555 Result: Up-regulated in Transcription
  misc_feature: MA Experiment 20001555 PARAMETER Experiment Name: At_Drought_Soil_Dry_P Parameter: Age (day) Value: 24
  misc_feature: MA Experiment 20001555 PARAMETER Experiment Name: At_Drought_Soil_Dry_P Parameter: Organism Value: A. thaliana
  misc_feature: MA Experiment 20001555 PARAMETER Experiment Name: At_Drought_Soil_Dry_P Parameter: Plant Line Value: WS
  misc_feature: MA Experiment 20001555 PARAMETER Experiment Name: At_Drought_Soil_Dry_P Parameter: Post Timepoint (hr) Value: None
  misc_feature: MA Experiment 20001555 PARAMETER Experiment Name: At_Drought_Soil_Dry_P Parameter: Post-Treatment Value: None
  misc_feature: MA Experiment 20001555 PARAMETER Experiment Name: At_Drought_Soil_Dry_P Parameter: Timepoint (day) Value: 10
  misc_feature: MA Experiment 20001555 PARAMETER Experiment Name: At_Drought_Soil_Dry_P Parameter: Treatment Value: Drought vs. No Drought
  misc_feature: MA Experiment ID: 20001556 Result: Up-regulated in Transcription
  misc_feature: MA Experiment 20001556 PARAMETER Experiment Name: At_Drought_Soil_Dry_P Parameter: Age (day) Value: 26
  misc_feature: MA Experiment 20001556 PARAMETER Experiment Name: At_Drought_Soil_Dry_P Parameter: Organism Value: A. thaliana
  misc_feature: MA Experiment 20001556 PARAMETER Experiment Name: At_Drought_Soil_Dry_P Parameter: Plant Line Value: WS
  misc_feature: MA Experiment 20001556 PARAMETER Experiment Name: At_Drought_Soil_Dry_P Parameter: Post Timepoint (hr) Value: None
  misc_feature: MA Experiment 20001556 PARAMETER Experiment Name: At_Drought_Soil_Dry_P Parameter: Post-Treatment Value: None
  misc_feature: MA Experiment 20001556 PARAMETER Experiment Name: At_Drought_Soil_Dry_P Parameter: Timepoint (day) Value: 12
  misc_feature: MA Experiment 20001556 PARAMETER Experiment Name: At_Drought_Soil_Dry_P Parameter: Treatment Value: Drought vs. No Drought
  misc_feature: MA Experiment ID: 20001557 Result: Up-regulated in Transcription
  misc_feature: MA Experiment 20001557 PARAMETER Experiment Name: At_Drought_Soil_Dry_P Parameter: Age (day) Value: 27
  misc_feature: MA Experiment 20001557 PARAMETER Experiment Name: At_Drought_Soil_Dry_P Parameter: Organism Value: A. thaliana
  misc_feature: MA Experiment 20001557 PARAMETER Experiment Name: At_Drought_Soil_Dry_P Parameter: Plant Line Value: WS
  misc_feature: MA Experiment 20001557 PARAMETER Experiment Name: At_Drought_Soil_Dry_P Parameter: Post Timepoint (hr) Value: 3
  misc_feature: MA Experiment 20001557 PARAMETER Experiment Name: At_Drought_Soil_Dry_P Parameter: Post-Treatment Value: Re-Water vs. No Drought
  misc_feature: MA Experiment 20001557 PARAMETER Experiment Name: At_Drought_Soil_Dry_P Parameter: Timepoint (day) Value: 13
  misc_feature: MA Experiment 20001557 PARAMETER Experiment Name: At_Drought_Soil_Dry_P Parameter: Treatment Value: Drought vs. No Drought
  misc_feature: MA Experiment ID: 20001558 Result: Up-regulated in Transcription
  misc_feature: MA Experiment 20001558 PARAMETER Experiment Name: At_Drought_Soil_Dry_P Parameter: Age (day) Value: 27
  misc_feature: MA Experiment 20001558 PARAMETER Experiment Name: At_Drought_Soil_Dry_P Parameter: Organism Value: A. thaliana
  misc_feature: MA Experiment 20001558 PARAMETER Experiment Name: At_Drought_Soil_Dry_P Parameter: Plant Line Value: WS
  misc_feature: MA Experiment 20001558 PARAMETER Experiment Name: At_Drought_Soil_Dry_P Parameter: Post Timepoint (hr) Value: 6
  misc_feature: MA Experiment 20001558 PARAMETER Experiment Name: At_Drought_Soil_Dry_P Parameter: Post-Treatment Value: Re-Water vs. No Drought
  misc_feature: MA Experiment 20001558 PARAMETER Experiment Name: At_Drought_Soil_Dry_P Parameter: Timepoint (day) Value: 13
  misc_feature: MA Experiment 20001558 PARAMETER Experiment Name: At_Drought_Soil_Dry_P Parameter: Treatment Value: Drought vs. No Drought
  misc_feature: MA Experiment ID: 20001559 Result: Up-regulated in Transcription
  misc_feature: MA Experiment 20001559 PARAMETER Experiment Name: At_Drought_Soil_Dry_P Parameter: Age (day) Value: 28
  misc_feature: MA Experiment 20001559 PARAMETER Experiment Name: At_Drought_Soil_Dry_P Parameter: Organism Value: A. thaliana
  misc_feature: MA Experiment 20001559 PARAMETER Experiment Name: At_Drought_Soil_Dry_P Parameter: Plant Line Value: WS
  misc_feature: MA Experiment 20001559 PARAMETER Experiment Name: At_Drought_Soil_Dry_P Parameter: Post Timepoint (hr) Value: 29
  misc_feature: MA Experiment 20001559 PARAMETER Experiment Name: At_Drought_Soil_Dry_P Parameter: Post-Treatment Value: Re-Water vs. No Drought
  misc_feature: MA Experiment 20001559 PARAMETER Experiment Name: At_Drought_Soil_Dry_P Parameter: Timepoint (day) Value: 14
  misc_feature: MA Experiment 20001559 PARAMETER Experiment Name: At_Drought_Soil_Dry_P Parameter: Treatment Value: Drought vs. No Drought
  misc_feature: MA Experiment ID: 20001761 Result: Down-regulated in Transcription
  misc_feature: MA Experiment 20001761 PARAMETER Experiment Name: At_50mM_NH4NO3_L-to-H_P Parameter: Timepoint (hr) Value: 4
  misc_feature: MA Experiment 20001761 PARAMETER Experiment Name: At_50mM_NH4NO3_L-to-H_P Parameter: Tissue Value: Siliques
  misc_feature: MA Experiment 20001761 PARAMETER Experiment Name: At_50mM_NH4NO3_L-to-H_P Parameter: Treatment Value: 50mM NH4NO3 vs 100mM Mannitol
  misc_feature: MA Experiment ID: 20001905 Result: Up-regulated in Transcription
  misc_feature: MA Experiment 20001905 PARAMETER Experiment Name: At_Drought_Reproduction_P Parameter: Age (day) Value: 40
  misc_feature: MA Experiment 20001905 PARAMETER Experiment Name: At_Drought_Reproduction_P Parameter: Organism Value: A. thaliana
  misc_feature: MA Experiment 20001905 PARAMETER Experiment Name: At_Drought_Reproduction_P Parameter: Plant Line Value: WS
  misc_feature: MA Experiment 20001905 PARAMETER Experiment Name: At_Drought_Reproduction_P Parameter: Timepoint (day) Value: 10
  misc_feature: MA Experiment 20001905 PARAMETER Experiment Name: At_Drought_Reproduction_P Parameter: Tissue Value: Rosettes
  misc_feature: MA Experiment 20001905 PARAMETER Experiment Name: At_Drought_Reproduction_P Parameter: Treatment Value: Drought vs. No Drought
  misc_feature: MA Experiment ID: 20001911 Result: Down-regulated in Transcription
  misc_feature: MA Experiment 20001911 PARAMETER Experiment Name: At_Drought_Reproduction_P Parameter: Age (day) Value: 40
  misc_feature: MA Experiment 20001911 PARAMETER Experiment Name: At_Drought_Reproduction_P Parameter: Organism Value: A. thaliana
  misc_feature: MA Experiment 20001911 PARAMETER Experiment Name: At_Drought_Reproduction_P Parameter: Plant Line Value: WS
  misc_feature: MA Experiment 20001911 PARAMETER Experiment Name: At_Drought_Reproduction_P Parameter: Timepoint (day) Value: 10
  misc_feature: MA Experiment 20001911 PARAMETER Experiment Name: At_Drought_Reproduction_P Parameter: Tissue Value: Flowers
  misc_feature: MA Experiment 20001911 PARAMETER Experiment Name: At_Drought_Reproduction_P Parameter: Treatment Value: Drought vs. No Drought
aagaagacaacaatggagtgctctctctcatccatcctccttctccttgtactctgcttcactcatcccattccttctctaaccttcgagccactaatctcttctcttgatcttcatgaagaagaaagctgcccttacactgtaattgttaccacaagctgtttctctcctgattggtctagagatcaggtcactatcgctttgggtgacgccgacgataaccaggtggtcgcaccgagactagacaaaccgctaagtggaggaggtggttttgagaaatgttcatcggacacattccaagtcaaaggtaaatgtctcaacactatctgctccgtctacatctaccgttccggtaccgacggctggatcccggagaccgtcgagatatacaaggaaggttccaaatccgtgaaattcgatttcaacaagaacgtccctgaaaacatttggtacggaaacaactattgtaacaacaccgatttgccaccgccttccccggatttccctccgttttctccatccatcccaccgccttcaccaccttattttcctcctgaaccaccttcaatcccgccgccaccaccaccatcaccgccgtctgctgcctctggacgtggaagtggtcagagtttggttgttgcgtttgctgcgtttgtgtttgcgtttgcggctgtggttgtttgagttattttgttaagaattaagagttgtctcaataagtaacgagtatcgtgtaatccctctgttttgtctttgactctttgtagttgaacattgacaatttcatattgtggtaacattaattagttaac

SEQ ID NO: 98610 - protein, 227 aa, Arabidopsis thaliana
  peptide (1)..(227): Ceres Seq. ID no. 13601105
  misc_feature (27)..(156): Pfam Name: Embryo-specific protein 3, (ATS3) Pfam Description: Embryo-specific protein 3, (ATS3)
  misc_feature (2)..(227): Homolog of NCBI NO: 26450767 NR Description: embryo-specific protein like [Arabidopsis
  misc_feature (5)..(227): Homolog of NCBI NO: 15241758 NR Description: embryo-specific protein - like [Arabidopsis
  misc_feature (40)..(226): Homolog of NCBI NO: 3335171 NR Description: embryo-specific protein 3 [Arabidopsis thaliana]
  misc_feature (40)..(226): Homolog of NCBI NO: 15240721 NR Description: embryo-specific protein 3 (ATS3) [Arabidopsis
  misc_feature (40)..(226): Homolog of NCBI NO: 13877521 NR Description: embryo-specific protein 3; ATS3 [Arabidopsis
  misc_feature (43)..(158): Homolog of NCBI NO: 8809633 NR Description: contains similarity to embryo-specific protein
  misc_feature (43)..(158): Homolog of NCBI NO: 15241727 NR Description: expressed protein [Arabidopsis thaliana]
  misc_feature (21)..(157): Homolog of NCBI NO: 15227355 NR Description: hypothetical protein [Arabidopsis thaliana]
  misc_feature (23)..(156): Homolog of NCBI NO: 34910236 NR Description: OSJNBa0089K24.2 [Oryza sativa (japonica
  misc_feature (155)..(220): Homolog of NCBI NO: 38344072 NR Description: OSJNBa0006B20.16 [Oryza sativa (japonica
KKTTMECSLSSILLLLVLCFTHPIPSLTFEPLISSLDLHEEESCPYTVIVTTSCFSPDWSRDQVTIALGDADDNQVVAPRLDKPLSGGGGFEKCSSDTFQVKGKCLNTICSVYIYRSGTDGWIPETVEIYKEGSKSVKFDFNKNVPENIWYGNNYCNNTDLPPPSPDFPPFSPSIPPPSPPYFPPEPPSIPPPPPPSPPSAASGRGSGQSLVVAFAAFVFAFAAVVV

SEQ ID NO: 98611 - protein, 223 aa, Arabidopsis thaliana; identical to SEQ ID NO: 21019
  peptide (1)..(223): Ceres Seq. ID no. 13601106
  misc_feature (23)..(152): Pfam Name: Embryo-specific protein 3, (ATS3) Pfam Description: Embryo-specific protein 3, (ATS3)
  misc_feature (1)..(223): Homolog of NCBI NO: 26450767 NR Description: embryo-specific protein like [Arabidopsis
  misc_feature (1)..(223): Homolog of NCBI NO: 15241758 NR Description: embryo-specific protein - like [Arabidopsis
  misc_feature (36)..(222): Homolog of NCBI NO: 3335171 NR Description: embryo-specific protein 3 [Arabidopsis thaliana]
  misc_feature (36)..(222): Homolog of NCBI NO: 15240721 NR Description: embryo-specific protein 3 (ATS3) [Arabidopsis
  misc_feature (36)..(222): Homolog of NCBI NO: 13877521 NR Description: embryo-specific protein 3; ATS3 [Arabidopsis
  misc_feature (39)..(154): Homolog of NCBI NO: 8809633 NR Description: contains similarity to embryo-specific protein
  misc_feature (39)..(154): Homolog of NCBI NO: 15241727 NR Description: expressed protein [Arabidopsis thaliana]
  misc_feature (17)..(153): Homolog of NCBI NO: 15227355 NR Description: hypothetical protein [Arabidopsis thaliana]
  misc_feature (19)..(152): Homolog of NCBI NO: 34910236 NR Description: OSJNBa0089K24.2 [Oryza sativa (japonica
  misc_feature (151)..(216): Homolog of NCBI NO: 38344072 NR Description: OSJNBa0006B20.16 [Oryza sativa (japonica

SEQ ID NO: 98612 - DNA, 1317 bp, Arabidopsis thaliana
  misc_feature (1)..(1317): Ceres Seq. ID no. 13601118
  misc_feature: MA Experiment ID: 108488 Result: Down-regulated in Transcription
  misc_feature: MA Experiment ID: 108489 Result: Up-regulated in Transcription
  misc_feature: MA Experiment ID: 108573 Result: Up-regulated in Transcription
  misc_feature: MA Experiment 108573 PARAMETER Experiment Name: At_Drought_cDNA_P Parameter: Timepoint (hr) Value: 6
  misc_feature: MA Experiment 108573 PARAMETER Experiment Name: At_Drought_cDNA_P Parameter: Tissue Value: Aerial
  misc_feature: MA Experiment 108573 PARAMETER Experiment Name: At_Drought_cDNA_P Parameter: Treatment Value: Drought vs. No Drought
  misc_feature: MA Experiment ID: 108574 Result: Up-regulated in Transcription
  misc_feature: MA Experiment 108574 PARAMETER Experiment Name: At_Wounding__cDNA_P Parameter: Timepoint (hr) Value: 1
  misc_feature: MA Experiment 108574 PARAMETER Experiment Name: At_Wounding__cDNA_P Parameter: Tissue Value: Aerial
  misc_feature: MA Experiment 108574 PARAMETER Experiment Name: At_Wounding__cDNA_P Parameter: Treatment Value: Wounding vs. No Wounding
  misc_feature: MA Experiment ID: 108577 Result: Up-regulated in Transcription
  misc_feature: MA Experiment 108577 PARAMETER Experiment Name: At_42deg_Heat_cDNA_P Parameter: Temperature (deg C) Value: 42 vs. 22
  misc_feature: MA Experiment 108577 PARAMETER Experiment Name: At_42deg_Heat_cDNA_P Parameter: Timepoint (hr) Value: 6
  misc_feature: MA Experiment 108577 PARAMETER Experiment Name: At_42deg_Heat_cDNA_P Parameter: Tissue Value: Aerial
  misc_feature: MA Experiment ID: 108579 Result: Up-regulated in Transcription
  misc_feature: MA Experiment 108579 PARAMETER Experiment Name: At_4deg_Cold_cDNA_P Parameter: Temperature (deg C) Value: 4 vs. 22
  misc_feature: MA Experiment 108579 PARAMETER Experiment Name: At_4deg_Cold_cDNA_P Parameter: Timepoint (hr) Value: 6
  misc_feature: MA Experiment 108579 PARAMETER Experiment Name: At_4deg_Cold_cDNA_P Parameter: Tissue Value: Aerial
  misc_feature: MA Experiment ID: 108595 Result: Up-regulated in Transcription
  misc_feature: MA Experiment 108595 PARAMETER Experiment Name: At_Ler-pi_Ovule_cDNA_P Parameter: Plant Line Value: null
  misc_feature: MA Experiment ID: 20000087 Result: Up-regulated in Transcription
  misc_feature: MA Experiment 20000087 PARAMETER Experiment Name: At_100uM_ABA_Mutants_cDNA_P Parameter: Plant Line Value: WS
  misc_feature: MA Experiment 20000087 PARAMETER Experiment Name: At_100uM_ABA_Mutants_cDNA_P Parameter: Timepoint (hr) Value: 6
  misc_feature: MA Experiment 20000087 PARAMETER Experiment Name: At_100uM_ABA_Mutants_cDNA_P Parameter: Tissue Value: Aerial
  misc_feature: MA Experiment 20000087 PARAMETER Experiment Name: At_100uM_ABA_Mutants_cDNA_P Parameter: Treatment Value: 100uM ABA vs. No Treatment
  misc_feature: MA Experiment ID: 20000111 Result: Up-regulated in Transcription
  misc_feature: MA Experiment 20000111 PARAMETER Experiment Name: At_42deg_Heat_cDNA_P Parameter: Temperature (deg C) Value: 42 vs. 22
  misc_feature: MA Experiment 20000111 PARAMETER Experiment Name: At_42deg_Heat_cDNA_P Parameter: Timepoint (hr) Value: 6
  misc_feature: MA Experiment 20000111 PARAMETER Experiment Name: At_42deg_Heat_cDNA_P Parameter: Tissue Value: Aerial
  misc_feature: MA Experiment ID: 20000112 Result: Up-regulated in Transcription
  misc_feature: MA Experiment 20000112 PARAMETER Experiment Name: At_42deg_Heat_cDNA_P Parameter: Temperature (deg C) Value: 42 vs. 22
  misc_feature: MA Experiment 20000112 PARAMETER Experiment Name: At_42deg_Heat_cDNA_P Parameter: Timepoint (hr) Value: 2
  misc_feature: MA Experiment 20000112 PARAMETER Experiment Name: At_42deg_Heat_cDNA_P Parameter: Tissue Value: Aerial
  misc_feature: MA Experiment ID: 20000113 Result: Up-regulated in Transcription
  misc_feature: MA Experiment 20000113 PARAMETER Experiment Name: At_42deg_Heat_cDNA_P Parameter: Temperature (deg C) Value: 42 vs. 22
  misc_feature: MA Experiment 20000113 PARAMETER Experiment Name: At_42deg_Heat_cDNA_P Parameter: Timepoint (hr) Value: 8
  misc_feature: MA Experiment 20000113 PARAMETER Experiment Name: At_42deg_Heat_cDNA_P Parameter: Tissue Value: Aerial
  misc_feature: MA Experiment ID: 20000144 Result: Up-regulated in Transcription
  misc_feature: MA Experiment 20000144 PARAMETER Experiment Name: At_42deg_Heat_cDNA_P Parameter: Temperature (deg C) Value: 42 vs. 22
  misc_feature: MA Experiment 20000144 PARAMETER Experiment Name: At_42deg_Heat_cDNA_P Parameter: Timepoint (hr) Value: 1
  misc_feature: MA Experiment 20000144 PARAMETER Experiment Name: At_42deg_Heat_cDNA_P Parameter: Tissue Value: Aerial
  misc_feature: MA Experiment ID: 20000171 Result: Up-regulated in Transcription
  misc_feature: MA Experiment 20000171 PARAMETER Experiment Name: At_42deg_Heat_P Parameter: Age (day) Value: 14
  misc_feature: MA Experiment 20000171 PARAMETER Experiment Name: At_42deg_Heat_P Parameter: Organism Value: A. thaliana
  misc_feature: MA Experiment 20000171 PARAMETER Experiment Name: At_42deg_Heat_P Parameter: Plant Line Value: WS
  misc_feature: MA Experiment 20000171 PARAMETER Experiment Name: At_42deg_Heat_P Parameter: Temperature (deg C) Value: 42 vs. 22
  misc_feature: MA Experiment 20000171 PARAMETER Experiment Name: At_42deg_Heat_P Parameter: Timepoint (hr) Value: 1
  misc_feature: MA Experiment 20000171 PARAMETER Experiment Name: At_42deg_Heat_P Parameter: Tissue Value: Aerial
  misc_feature: MA Experiment ID: 20000173 Result: Up-regulated in Transcription
  misc_feature: MA Experiment 20000173 PARAMETER Experiment Name: At_42deg_Heat_P Parameter: Age (day) Value: 14
  misc_feature: MA Experiment 20000173 PARAMETER Experiment Name: At_42deg_Heat_P Parameter: Organism Value: A. thaliana
  misc_feature: MA Experiment 20000173 PARAMETER Experiment Name: At_42deg_Heat_P Parameter: Plant Line Value: WS
  misc_feature: MA Experiment 20000173 PARAMETER Experiment Name: At_42deg_Heat_P Parameter: Temperature (deg C) Value: 42 vs. 22
  misc_feature: MA Experiment 20000173 PARAMETER Experiment Name: At_42deg_Heat_P Parameter: Timepoint (hr) Value: 6
  misc_feature: MA Experiment 20000173 PARAMETER Experiment Name: At_42deg_Heat_P Parameter: Tissue Value: Aerial
  misc_feature: MA Experiment ID: 20000180 Result: Down-regulated in Transcription
  misc_feature: MA Experiment 20000180 PARAMETER Experiment Name: At_Germinating_Seeds_P Parameter: Age (hr) Value: 24 vs. 0
  misc_feature: MA Experiment 20000180 PARAMETER Experiment Name: At_Germinating_Seeds_P Parameter: Tissue Value: Germinating Seeds
  misc_feature: MA Experiment ID: 20000182 Result: Up-regulated in Transcription
  misc_feature: MA Experiment 20000182 PARAMETER Experiment Name: At_2mM_SA_P Parameter: Age (day) Value: 14
  misc_feature: MA Experiment 20000182 PARAMETER Experiment Name: At_2mM_SA_P Parameter: Organism Value: A. thaliana
  misc_feature: MA Experiment 20000182 PARAMETER Experiment Name: At_2mM_SA_P Parameter: Plant Line Value: WS
  misc_feature: MA Experiment 20000182 PARAMETER Experiment Name: At_2mM_SA_P Parameter: Timepoint (hr) Value: 6
  misc_feature: MA Experiment 20000182 PARAMETER Experiment Name: At_2mM_SA_P Parameter: Tissue Value: Aerial
  misc_feature: MA Experiment 20000182 PARAMETER Experiment Name: At_2mM_SA_P Parameter: Treatment Value: 2mM SA vs. No Treatment
  misc_feature: MA Experiment ID: 20000184 Result: Down-regulated in Transcription
  misc_feature: MA Experiment 20000184 PARAMETER Experiment Name: At_Shoots__P Parameter: Age (day) Value: 7
  misc_feature: MA Experiment 20000184 PARAMETER Experiment Name: At_Shoots__P Parameter: Tissue Value: Shoots vs. Whole Plant
  misc_feature: MA Experiment ID: 20000185 Result: Down-regulated in Transcription
  misc_feature: MA Experiment 20000185 PARAMETER Experiment Name: At_Roots__P Parameter: Age (day) Value: 7 vs. 21
  misc_feature: MA Experiment 20000185 PARAMETER Experiment Name: At_Roots__P Parameter: Organism Value: A. thaliana
  misc_feature: MA Experiment 20000185 PARAMETER Experiment Name: At_Roots__P Parameter: Tissue Value: Roots vs. Whole Plant
  misc_feature: MA Experiment ID: 20000234 Result: Down-regulated in Transcription
  misc_feature: MA Experiment 20000234 PARAMETER Experiment Name: At_Siliques_P Parameter: Age (day) Value: 21
  misc_feature: MA Experiment 20000234 PARAMETER Experiment Name: At_Siliques_P Parameter: Organism Value: A. thaliana
  misc_feature: MA Experiment 20000234 PARAMETER Experiment Name: At_Siliques_P Parameter: Plant Line Value: WS
  misc_feature: MA Experiment 20000234 PARAMETER Experiment Name: At_Siliques_P Parameter: Tissue Value: Less Than 5mm Siliques vs. Whole Plant
  misc_feature: MA Experiment ID: 20000235 Result: Down-regulated in Transcription
  misc_feature: MA Experiment 20000235 PARAMETER Experiment Name: At_Siliques_P Parameter: Age (day) Value: 21
  misc_feature: MA Experiment 20000235 PARAMETER Experiment Name: At_Siliques_P Parameter: Organism Value: A. thaliana
  misc_feature: MA Experiment 20000235 PARAMETER Experiment Name: At_Siliques_P Parameter: Plant Line Value: WS
  misc_feature: MA Experiment 20000235 PARAMETER Experiment Name: At_Siliques_P Parameter: Tissue Value: 5-10mm Siliques vs. Whole Plant
  misc_feature: MA Experiment ID: 20000264 Result: Down-regulated in Transcription
  misc_feature: MA Experiment 20000264 PARAMETER Experiment Name: At_Open_Flower_P Parameter: Age (day) Value: 21
  misc_feature: MA Experiment 20000264 PARAMETER Experiment Name: At_Open_Flower_P Parameter: Plant Line Value: WS
  misc_feature: MA Experiment 20000264 PARAMETER Experiment Name: At_Open_Flower_P Parameter: Tissue Value: Open Flower vs. Whole Plant
  misc_feature: MA Experiment ID: 20000265 Result: Down-regulated in Transcription
  misc_feature: MA Experiment 20000265 PARAMETER Experiment Name: At_Open_Flower_P Parameter: Age (day) Value: 21
  misc_feature: MA Experiment 20000265 PARAMETER Experiment Name: At_Open_Flower_P Parameter: Plant Line Value: WS
  misc_feature: MA Experiment 20000265 PARAMETER Experiment Name: At_Open_Flower_P Parameter: Tissue Value: Closed Flower vs. Whole Plant
  misc_feature: MA Experiment ID: 20000267 Result: Up-regulated in Transcription
  misc_feature: MA Experiment 20000267 PARAMETER Experiment Name: At_Drought_P Parameter: Age (day) Value: 7
  misc_feature: MA Experiment 20000267 PARAMETER Experiment Name: At_Drought_P Parameter: Organism Value: A. thaliana
  misc_feature: MA Experiment 20000267 PARAMETER Experiment Name: At_Drought_P Parameter: Plant Line Value: WS
  misc_feature: MA Experiment 20000267 PARAMETER Experiment Name: At_Drought_P Parameter: Timepoint (hr) Value: 6
  misc_feature: MA Experiment 20000267 PARAMETER Experiment Name: At_Drought_P Parameter: Tissue Value: Whole Plant
  misc_feature: MA Experiment 20000267 PARAMETER Experiment Name: At_Drought_P Parameter: Treatment Value: Drought vs. No Drought
  misc_feature: MA Experiment ID: 20000286 Result: Down-regulated in Transcription
  misc_feature: MA Experiment 20000286 PARAMETER Experiment Name: At_Open_Flower_P Parameter: Age (day) Value: 21
  misc_feature: MA Experiment 20000286 PARAMETER Experiment Name: At_Open_Flower_P Parameter: Plant Line Value: WS
  misc_feature: MA Experiment 20000286 PARAMETER Experiment Name: At_Open_Flower_P Parameter: Tissue Value: Half Open vs. Whole Plant
  misc_feature: MA Experiment ID: 20000436 Result: Up-regulated in Transcription
  misc_feature: MA Experiment 20000436 PARAMETER Experiment Name: At_Drought_P Parameter: Age (day) Value: 7
  misc_feature: MA Experiment 20000436 PARAMETER Experiment Name: At_Drought_P Parameter: Organism Value: A. thaliana
  misc_feature: MA Experiment 20000436 PARAMETER Experiment Name: At_Drought_P Parameter: Plant Line Value: WS
  misc_feature: MA Experiment 20000436 PARAMETER Experiment Name: At_Drought_P Parameter: Timepoint (hr) Value: 12
  misc_feature: MA Experiment 20000436 PARAMETER Experiment Name: At_Drought_P Parameter: Tissue Value: Whole Plant
  misc_feature: MA Experiment 20000436 PARAMETER Experiment Name: At_Drought_P Parameter: Treatment Value: Drought vs. No Drought
  misc_feature: MA Experiment ID: 20000437 Result: Up-regulated in Transcription
  misc_feature: MA Experiment 20000437 PARAMETER Experiment Name: At_Drought_P Parameter: Age (day) Value: 8
  misc_feature: MA Experiment 20000437 PARAMETER Experiment Name: At_Drought_P Parameter: Organism Value: A. thaliana
  misc_feature: MA Experiment 20000437 PARAMETER Experiment Name: At_Drought_P Parameter: Plant Line Value: WS
  misc_feature: MA Experiment 20000437 PARAMETER Experiment Name: At_Drought_P Parameter: Timepoint (hr) Value: 24
  misc_feature: MA Experiment 20000437 PARAMETER Experiment Name: At_Drought_P Parameter: Tissue Value: Whole Plant
  misc_feature: MA Experiment 20000437 PARAMETER Experiment Name: At_Drought_P Parameter: Treatment Value: Drought vs. No Drought
  misc_feature: MA Experiment ID: 20000438 Result: Down-regulated in Transcription
  misc_feature: MA Experiment 20000438 PARAMETER Experiment Name: At_Shoots__P Parameter: Age (day) Value: 14
  misc_feature: MA Experiment 20000438 PARAMETER Experiment Name: At_Shoots__P Parameter: Tissue Value: Shoots vs. Whole Plant
  misc_feature: MA Experiment ID: 20000439 Result: Down-regulated in Transcription
  misc_feature: MA Experiment 20000439 PARAMETER Experiment Name: At_Roots__P Parameter: Age (day) Value: 14 vs. 21
  misc_feature: MA Experiment 20000439 PARAMETER Experiment Name: At_Roots__P Parameter: Organism Value: A. thaliana
  misc_feature: MA Experiment 20000439 PARAMETER Experiment Name: At_Roots__P Parameter: Tissue Value: Roots vs. Whole Plant
  misc_feature: MA Experiment ID: 20000460 Result: Up-regulated in Transcription
  misc_feature: MA Experiment 20000460 PARAMETER Experiment Name: At_10percent_PEG_P Parameter: Age (day) Value: 12
  misc_feature: MA Experiment 20000460 PARAMETER Experiment Name: At_10percent_PEG_P Parameter: Organism Value: A. thaliana
  misc_feature: MA Experiment 20000460 PARAMETER Experiment Name: At_10percent_PEG_P Parameter: Plant Line Value: WS
  misc_feature: MA Experiment 20000460 PARAMETER Experiment Name: At_10percent_PEG_P Parameter: Timepoint (day) Value: 12
  misc_feature: MA Experiment 20000460 PARAMETER Experiment Name: At_10percent_PEG_P Parameter: Tissue Value: Whole Plant
  misc_feature: MA Experiment 20000460 PARAMETER Experiment Name: At_10percent_PEG_P Parameter: Treatment Value: 10percent PEG vs. No Treatment
  misc_feature: MA Experiment ID: 20000495 Result: Down-regulated in Transcription
  misc_feature: MA Experiment 20000495 PARAMETER Experiment Name: At_Guard_Cells_P Parameter: Harvest Date Value: 8/2/2002
  misc_feature: MA Experiment 20000495 PARAMETER Experiment Name: At_Guard_Cells_P Parameter: Organism Value: A. thaliana
  misc_feature: MA Experiment 20000495 PARAMETER Experiment Name: At_Guard_Cells_P Parameter: Tissue Value: Guard Cells vs. Leaves
  misc_feature: MA Experiment ID: 20000709 Result: Up-regulated in Transcription
  misc_feature: MA Experiment 20000709 PARAMETER Experiment Name: At_15mM_NH4NO3_L-to-H_P Parameter: Age (hr) Value: 14
  misc_feature: MA Experiment 20000709 PARAMETER Experiment Name: At_15mM_NH4NO3_L-to-H_P Parameter: Organism Value: A. thaliana
  misc_feature: MA Experiment 20000709 PARAMETER Experiment Name: At_15mM_NH4NO3_L-to-H_P Parameter: Plant Line Value: WS
  misc_feature: MA Experiment 20000709 PARAMETER Experiment Name: At_15mM_NH4NO3_L-to-H_P Parameter: Timepoint (hr) Value: 4
  misc_feature: MA Experiment 20000709 PARAMETER Experiment Name: At_15mM_NH4NO3_L-to-H_P Parameter: Tissue Value: Aerial
  misc_feature: MA Experiment 20000709 PARAMETER Experiment Name: At_15mM_NH4NO3_L-to-H_P Parameter: Treatment Value: 15mM NH4NO3 vs. 30mM Mannitol
  misc_feature: MA Experiment ID: 20001557 Result: Up-regulated in Transcription
  misc_feature: MA Experiment 20001557 PARAMETER Experiment Name: At_Drought_Soil_Dry_P Parameter: Age (day) Value: 27
  misc_feature: MA Experiment 20001557 PARAMETER Experiment Name: At_Drought_Soil_Dry_P Parameter: Organism Value: A. thaliana
  misc_feature: MA Experiment 20001557 PARAMETER Experiment Name: At_Drought_Soil_Dry_P Parameter: Plant Line Value: WS
  misc_feature: MA Experiment 20001557 PARAMETER Experiment Name: At_Drought_Soil_Dry_P Parameter: Post Timepoint (hr) Value: 3
  misc_feature: MA Experiment 20001557 PARAMETER Experiment Name: At_Drought_Soil_Dry_P Parameter: Post-Treatment Value: Re-Water vs. No Drought
  misc_feature: MA Experiment 20001557 PARAMETER Experiment Name: At_Drought_Soil_Dry_P Parameter: Timepoint (day) Value: 13
  misc_feature: MA Experiment 20001557 PARAMETER Experiment Name: At_Drought_Soil_Dry_P Parameter: Treatment Value: Drought vs. No Drought
  misc_feature: MA Experiment ID: 20001558 Result: Up-regulated in Transcription
  misc_feature: MA Experiment 20001558 PARAMETER Experiment Name: At_Drought_Soil_Dry_P Parameter: Age (day) Value: 27
  misc_feature: MA Experiment 20001558 PARAMETER Experiment Name: At_Drought_Soil_Dry_P Parameter: Organism Value: A. thaliana
  misc_feature: MA Experiment 20001558 PARAMETER Experiment Name: At_Drought_Soil_Dry_P Parameter: Plant Line Value: WS
  misc_feature: MA Experiment 20001558 PARAMETER Experiment Name: At_Drought_Soil_Dry_P Parameter: Post Timepoint (hr) Value: 6
  misc_feature: MA Experiment 20001558 PARAMETER Experiment Name: At_Drought_Soil_Dry_P Parameter: Post-Treatment Value: Re-Water vs. No Drought
  misc_feature: MA Experiment 20001558 PARAMETER Experiment Name: At_Drought_Soil_Dry_P Parameter: Timepoint (day) Value: 13
  misc_feature: MA Experiment 20001558 PARAMETER Experiment Name: At_Drought_Soil_Dry_P Parameter: Treatment Value: Drought vs. No Drought
  misc_feature: MA Experiment ID: 20001760 Result: Down-regulated in Transcription
  misc_feature: MA Experiment 20001760 PARAMETER Experiment Name: At_50mM_NH4NO3_L-to-H_P Parameter: Timepoint (hr) Value: 2
  misc_feature: MA Experiment 20001760 PARAMETER Experiment Name: At_50mM_NH4NO3_L-to-H_P Parameter: Tissue Value: Siliques
  misc_feature: MA Experiment 20001760 PARAMETER Experiment Name: At_50mM_NH4NO3_L-to-H_P Parameter: Treatment Value: 50mM NH4NO3 vs 100mM Mannitol
  misc_feature: MA Experiment ID: 20001761 Result: Down-regulated in Transcription
  misc_feature: MA Experiment 20001761 PARAMETER Experiment Name: At_50mM_NH4NO3_L-to-H_P Parameter: Timepoint (hr) Value: 4
  misc_feature: MA Experiment 20001761 PARAMETER Experiment Name: At_50mM_NH4NO3_L-to-H_P Parameter: Tissue Value: Siliques
  misc_feature: MA Experiment 20001761 PARAMETER Experiment Name: At_50mM_NH4NO3_L-to-H_P Parameter: Treatment Value: 50mM NH4NO3 vs 100mM Mannitol
  misc_feature: MA Experiment ID: 20001904 Result: Up-regulated in Transcription
  misc_feature: MA Experiment 20001904 PARAMETER Experiment Name: At_Drought_Reproduction_P Parameter: Age (day) Value: 37
  misc_feature: MA Experiment 20001904 PARAMETER Experiment Name: At_Drought_Reproduction_P Parameter: Organism Value: A. thaliana
  misc_feature: MA Experiment 20001904 PARAMETER Experiment Name: At_Drought_Reproduction_P Parameter: Plant Line Value: WS
  misc_feature: MA Experiment 20001904 PARAMETER Experiment Name: At_Drought_Reproduction_P Parameter: Timepoint (day) Value: 7
  misc_feature: MA Experiment 20001904 PARAMETER Experiment Name: At_Drought_Reproduction_P Parameter: Tissue Value: Rosettes
  misc_feature: MA Experiment 20001904 PARAMETER Experiment Name: At_Drought_Reproduction_P Parameter: Treatment Value: Drought vs. No Drought
aagtaacaaaatactaattcaaaagctttataaagtttcttttctcattcggttctaaagttcctatttttcaatggattacgtgagaacccaagtcgaagctgtttttgatgattctgagcaagatggatcaaccatctctgaatctggaagctgcgattcttcttctgatcgatcttttgctgacgagcttgggcttatggagttgcttgaaggagataaagctcatgatttgatctatcgtaattgtaaatctggtcttggtgatcaatgtcagattctctctgttcttagaaacggatttaggaacgttggatctcgtgcaaagctcaagacttttcaggtttttcaagaggcggtgcagatgaaacacggtggagacggtggagctaaggtgaaatacggttggtgctctgtttcgaaacatgagcttaaaacgatttttgagtatgggtttagcgagccgctgaggaatgatggatcttttggccgtggattgtatctctcgccggataattctcctcttgattgtttgaaggattcagcttcagaatcagaagatgggatgagattcttgttgctttgtagagttctacttggaaaatcagagattgttcctcaaggctcgactagatcatgtccaagttcaccagagtttgattctggtgtggatgatttagtttctacgaagaagtatattgtgtggagtacacacatgaacactcatgttttgcctgagtttcttgtttgcatcaaagctccatttaacctaactcgaagtccaaagagattgagatcaccatggatggcatttcctgtattgatcaaagcattgtccaagtttctacctccttctcaaatacttgtcattcagaaacattacaaagatcaacaaaataggagaattacacggagcgaactaatccaacgagtcagaagcataaccggagacaagttactagttcacatcatcaaagcttgtggacataaagtacaacactaaatctccattgcagatcactttggcgtttttgtttcaaggacacaatcaccatggttgtatttgtctgtttaccaactccaaaatgatcaggactggtagagtccctttctattgttttcccatgatagtgatgaaaaaaaactgttcattagattatttaagatcgattagattagggtcttagcaacattattaatgaagagaacattaacaagttatcatcttgtttttcttttcactcttcttctttcaaaaacatttgtattattgtctggctttgagctgaagaaaatttctggtggactgagttttac

SEQ ID NO: 98613 - protein, 309 aa, Arabidopsis thaliana; identical to SEQ ID NO: 35573
  peptide (1)..(309): Ceres Seq. ID no. 13601119
  misc_feature (1)..(309): Homolog of NCBI NO: 15241862 NR Description: expressed protein [Arabidopsis thaliana] gene_id:K19B1.13~pir||T07711~similar to unknown protein thaliana] >gi|15450639|gb|AAK96591.1| AT5g62520/K19B1_13
  misc_feature (1)..(309): Homolog of NCBI NO: 21592445 NR Description: unknown [Arabidopsis thaliana]
  misc_feature (1)..(307): Homolog of NCBI NO: 15228235 NR Description: hypothetical protein [Arabidopsis thaliana]
  misc_feature (11)..(306): Homolog of NCBI NO: 15220787 NR Description: hypothetical protein [Arabidopsis thaliana]
  misc_feature (11)..(306): Homolog of NCBI NO: 8778582 NR Description: F28C11.18 [Arabidopsis thaliana]
  misc_feature (16)..(301): Homolog of NCBI NO: 15223159 NR Description: hypothetical protein [Arabidopsis thaliana]
  misc_feature (16)..(290): Homolog of NCBI NO: 7485680 NR Description: hypothetical protein F17O7.2 - Arabidopsis
  misc_feature (1)..(231): Homolog of NCBI NO: 29126336 NR Description: putative CEO protein [Oryza sativa (japonica
  misc_feature (236)..(300): Homolog of NCBI NO: 29126336 NR Description: putative CEO protein [Oryza sativa (japonica
  misc_feature (44)..(260): Homolog of NCBI NO: 14150488 NR Description: ATP8 [Arabidopsis thaliana]

SEQ ID NO: 98614 - protein, 267 aa, Arabidopsis thaliana; identical to SEQ ID NO: 35574
  peptide (1)..(267): Ceres Seq. ID no. 13601120
  misc_feature (1)..(267): Homolog of NCBI NO: 15241862 NR Description: expressed protein [Arabidopsis thaliana] gene_id:K19B1.13~pir||T07711~similar to unknown protein thaliana] >gi|15450639|gb|AAK96591.1| AT5g62520/K19B1_13
  misc_feature (1)..(267): Homolog of NCBI NO: 21592445 NR Description: unknown [Arabidopsis thaliana]
  misc_feature (1)..(265): Homolog of NCBI NO: 15228235 NR Description: hypothetical protein [Arabidopsis thaliana]
  misc_feature (1)..(264): Homolog of NCBI NO: 15220787 NR Description: hypothetical protein [Arabidopsis thaliana]
  misc_feature (1)..(264): Homolog of NCBI NO: 8778582 NR Description: F28C11.18 [Arabidopsis thaliana]
  misc_feature (1)..(259): Homolog of NCBI NO: 15223159 NR Description: hypothetical protein [Arabidopsis thaliana]
  misc_feature (1)..(248): Homolog of NCBI NO: 7485680 NR Description: hypothetical protein F17O7.2 - Arabidopsis
  misc_feature (1)..(189): Homolog of NCBI NO: 29126336 NR Description: putative CEO protein [Oryza sativa (japonica
  misc_feature (194)..(258): Homolog of NCBI NO: 29126336 NR Description: putative CEO protein [Oryza sativa (japonica
  misc_feature (2)..(218): Homolog of NCBI NO: 14150488 NR Description: ATP8 [Arabidopsis thaliana]

SEQ ID NO: 98615 - protein, 212 aa, Arabidopsis thaliana; identical to SEQ ID NO: 35575
  peptide (1)..(212): Ceres Seq. ID no. 13601121
  misc_feature (1)..(212): Homolog of NCBI NO: 15241862 NR Description: expressed protein [Arabidopsis thaliana] gene_id:K19B1.13~pir||T07711~similar to unknown protein thaliana] >gi|15450639|gb|AAK96591.1| AT5g62520/K19B1_13
  misc_feature (1)..(212): Homolog of NCBI NO: 21592445 NR Description: unknown [Arabidopsis thaliana]
  misc_feature (1)..(210): Homolog of NCBI NO: 15228235 NR Description: hypothetical protein [Arabidopsis thaliana]
  misc_feature (1)..(209): Homolog of NCBI NO: 15220787 NR Description: hypothetical protein [Arabidopsis thaliana]
  misc_feature (1)..(209): Homolog of NCBI NO: 8778582 NR Description: F28C11.18 [Arabidopsis thaliana]
  misc_feature (1)..(204): Homolog of NCBI NO: 15223159 NR Description: hypothetical protein [Arabidopsis thaliana]
  misc_feature (1)..(193): Homolog of NCBI NO: 7485680 NR Description: hypothetical protein F17O7.2 - Arabidopsis
  misc_feature (1)..(134): Homolog of NCBI NO: 29126336 NR Description: putative CEO protein [Oryza sativa (japonica
  misc_feature (139)..(203): Homolog of NCBI NO: 29126336 NR Description: putative CEO protein [Oryza sativa (japonica
  misc_feature (1)..(163): Homolog of NCBI NO: 14150488 NR Description: ATP8 [Arabidopsis thaliana]

SEQ ID NO: 98616 - DNA, 1789 bp, Arabidopsis thaliana
  misc_feature (1)..(1789): Ceres Seq. ID no. 13601125
  misc_feature: MA Experiment ID: 108461 Result: Up-regulated in Transcription
  misc_feature: MA Experiment 108461 PARAMETER Experiment Name: At_Germinating_Seeds_cDNA_P Parameter: Age (day) Value: 1 vs. 0
  misc_feature: MA Experiment 108461 PARAMETER Experiment Name: At_Germinating_Seeds_cDNA_P Parameter: Tissue Value: Germinating Seeds
  misc_feature: MA Experiment ID: 108462 Result: Up-regulated in Transcription
  misc_feature: MA Experiment 108462 PARAMETER Experiment Name: At_Germinating_Seeds_cDNA_P Parameter: Age (day) Value: 2 vs. 0
  misc_feature: MA Experiment 108462 PARAMETER Experiment Name: At_Germinating_Seeds_cDNA_P Parameter: Tissue Value: Germinating Seeds
  misc_feature: MA Experiment ID: 108573 Result: Up-regulated in Transcription
  misc_feature: MA Experiment 108573 PARAMETER Experiment Name: At_Drought_cDNA_P Parameter: Timepoint (hr) Value: 6
  misc_feature: MA Experiment 108573 PARAMETER Experiment Name: At_Drought_cDNA_P Parameter: Tissue Value: Aerial
  misc_feature: MA Experiment 108573 PARAMETER Experiment Name: At_Drought_cDNA_P Parameter: Treatment Value: Drought vs. No Drought
  misc_feature: MA Experiment ID: 108595 Result: Down-regulated in Transcription
  misc_feature: MA Experiment 108595 PARAMETER Experiment Name: At_Ler-pi_Ovule_cDNA_P Parameter: Plant Line Value: null
  misc_feature: MA Experiment ID: 20000087 Result: Down-regulated in Transcription
  misc_feature: MA Experiment 20000087 PARAMETER Experiment Name: At_100uM_ABA_Mutants_cDNA_P Parameter: Plant Line Value: WS
  misc_feature: MA Experiment 20000087 PARAMETER Experiment Name: At_100uM_ABA_Mutants_cDNA_P Parameter: Timepoint (hr) Value: 6
  misc_feature: MA Experiment 20000087 PARAMETER Experiment Name: At_100uM_ABA_Mutants_cDNA_P Parameter: Tissue Value: Aerial
  misc_feature: MA Experiment 20000087 PARAMETER Experiment Name: At_100uM_ABA_Mutants_cDNA_P Parameter: Treatment Value: 100uM ABA vs. No Treatment
  misc_feature: MA Experiment ID: 20000180 Result: Up-regulated in Transcription
  misc_feature: MA Experiment 20000180 PARAMETER Experiment Name: At_Germinating_Seeds_P Parameter: Age (hr) Value: 24 vs. 0
  misc_feature: MA Experiment 20000180 PARAMETER Experiment Name: At_Germinating_Seeds_P Parameter: Tissue Value: Germinating Seeds
  misc_feature: MA Experiment ID: 20000185 Result: Down-regulated in Transcription
  misc_feature: MA Experiment 20000185 PARAMETER Experiment Name: At_Roots__P Parameter: Age (day) Value: 7 vs. 21
  misc_feature: MA Experiment 20000185 PARAMETER Experiment Name: At_Roots__P Parameter: Organism Value: A. thaliana
  misc_feature: MA Experiment 20000185 PARAMETER Experiment Name: At_Roots__P Parameter: Tissue Value: Roots vs. Whole Plant
  misc_feature: MA Experiment ID: 20000438 Result: Up-regulated in Transcription
  misc_feature: MA Experiment 20000438 PARAMETER Experiment Name: At_Shoots__P Parameter: Age (day) Value: 14
  misc_feature: MA Experiment 20000438 PARAMETER Experiment Name: At_Shoots__P Parameter: Tissue Value: Shoots vs. Whole Plant
  misc_feature: MA Experiment ID: 20001248 Result: Down-regulated in Transcription
  misc_feature: MA Experiment 20001248 PARAMETER Experiment Name: At_Far-red-induction_P Parameter: Age (day) Value: 7
  misc_feature: MA Experiment 20001248 PARAMETER Experiment Name: At_Far-red-induction_P Parameter: Light Value: Far-red vs. White
  misc_feature: MA Experiment 20001248 PARAMETER Experiment Name: At_Far-red-induction_P Parameter: Organism Value: A. thaliana
  misc_feature: MA Experiment 20001248 PARAMETER Experiment Name: At_Far-red-induction_P Parameter: Plant Line Value: Columbia
  misc_feature: MA Experiment 20001248 PARAMETER Experiment Name: At_Far-red-induction_P Parameter: Timepoint (hr) Value: 4
  misc_feature: MA Experiment 20001248 PARAMETER Experiment Name: At_Far-red-induction_P Parameter: Tissue Value: Whole Plant
  misc_feature: MA Experiment ID: 20001905 Result: Down-regulated in Transcription
  misc_feature: MA Experiment 20001905 PARAMETER Experiment Name: At_Drought_Reproduction_P Parameter: Age (day) Value: 40
  misc_feature: MA Experiment 20001905 PARAMETER Experiment Name: At_Drought_Reproduction_P Parameter: Organism Value: A. thaliana
  misc_feature: MA Experiment 20001905 PARAMETER Experiment Name: At_Drought_Reproduction_P Parameter: Plant Line Value: WS
  misc_feature: MA Experiment 20001905 PARAMETER Experiment Name: At_Drought_Reproduction_P Parameter: Timepoint (day) Value: 10
  misc_feature: MA Experiment 20001905 PARAMETER Experiment Name: At_Drought_Reproduction_P Parameter: Tissue Value: Rosettes
  misc_feature: MA Experiment 20001905 PARAMETER Experiment Name: At_Drought_Reproduction_P Parameter: Treatment Value: Drought vs. No Drought
aatccagattcctttcttatcatcatctctctctctcacactgtttatctgattcgtcttctctgataatcaagagtagtagtgcggttctctggaaaatattcgatttttaaaagactctgatgatgacattaaactcactatctccagctgaatccaaagctatttctttcttggatacctccaggttcaatccaatccctaaactctcaggtgggtttagtttgaggaggaggaatcaagggagaggttttggaaaaggtgttaagtgttcagtgaaagtgcagcagcaacaacaacctcctccagcatggcctgggagagctgtccctgaggcgcctcgtcaatcttgggatggaccaaaacccatctctatcgttggatctactggttctattggcactcagacattggatattgtggctgagaatcctgacaaattcagagttgtggctctagctgctggttcgaatgttactctacttgctgatcaggtaaggagatttaagcctgcattggttgctgttagaaacgagtcactgattaatgagcttaaagaggctttagctgatttggactataaactcgagattattccaggagagcaaggagtgattgaggttgcccgacatcctgaagctgtaaccgttgttaccggaatagtaggttgtgcgggactaaagcctacggttgctgcaattgaagcaggaaaggacattgctcttgcaaacaaagagacattaatcgcaggtggtcctttcgtgcttccgcttgccaacaaacataatgtaaagattcttccggcagattcagaacattctgccatatttcagtgtattcaaggtttgcctgaaggcgctctgcgcaagataatcttgactgcatctggtggagcttttagggattggcctgtcgaaaagctaaaggaagttaaagtagcggatgcgttgaagcatccaaactggaacatgggaaagaaaatcactgtggactctgctacgcttttcaacaagggtcttgaggtcattgaagcgcattatttgtttggagctgagtatgacgatatagagattgtcattcatccgcaaagtatcatacattccatgattgaaacacaggattcatctgtgcttgctcaattgggttggcctgatatgcgtttaccgattctctacaccatgtcatggcccgatagagttccttgttctgaagtaacttggccaagacttgacctttgcaaactcggttcattgactttcaagaaaccagacaatgtgaaatacccatccatggatcttgcttatgctgctggacgagctggaggcacaatgactggagttctcagcgccgccaatgagaaagctgttgaaatgttcattgatgaaaagataagctatttggatatcttcaaggttgtggaattaacatgcgataaacatcgaaacgagttggtaacatcaccgtctcttgaagagattgttcactatgacttgtgggcacgtgaatatgccgcgaatgtgcagctttcttctggtgctaggccagttcatgcatgaagaattggttgttggaagaacataaggaagcttctgaggaaatgttgaaagaagattagtgtagagaatggggtactacttaatagcgtttttggcaaggattatggattgtgtagctaatttatctgtgatccgaacaagccaaactgataatttgaaaccatttttaccaataaaaccgagcttaattgtttcacattatatgattaattacattcatctaagggttcttg

SEQ ID NO: 98617 - protein, 477 aa, Arabidopsis thaliana; identical to SEQ ID NO: 40931
  peptide (1)..(477): Ceres Seq. ID no. 13601126
  misc_feature (83)..(463): Pfam Name: 1-deoxy-D-xylulose 5-phosphate reductoisomerase Pfam Description: 1-deoxy-D-xylulose 5-phosphate reductoisomerase
  misc_feature (1)..(477): Homolog of NCBI NO: 15241970 NR Description: 1-deoxy-D-xylulose 5-phosphate reductoisomerase
  misc_feature (72)..(477): Homolog of NCBI NO: 25323805 NR Description: 1-deoxy-d-xylulose-5-phosphate reductoisomerase
  misc_feature (2)..(474): Homolog of NCBI NO: 15679908 NR Description: 1-deoxy-D-xylulose-5-phosphate reductoisomerase
  misc_feature (2)..(475): Homolog of NCBI NO: 34894108 NR Description: 1-deoxy-d-xylulose-5-phosphate reductoisomerase
  misc_feature (2)..(475): Homolog of NCBI NO: 17225989 NR Description: 1-deoxy-D-xylulose 5-phosphate reductoisomerase
  misc_feature (2)..(474): Homolog of NCBI NO: 7621710 NR Description: 1-deoxy-D-xylulose-5-phosphate reductoisomerase
  misc_feature (1)..(477): Homolog of NCBI NO: 9801280 NR Description: putative 1-deoxy-D-xylulose 5-phosphate
  misc_feature (2)..(475): Homolog of NCBI NO: 22797429 NR Description: 1-deoxy-D-xylulose 5-phosphate reductoisomerase
  misc_feature (33)..(477): Homolog of NCBI NO: 34996397 NR Description: putative 1-deoxy-D-xylulose 5-phosphate
  misc_feature (2)..(474): Homolog of NCBI NO: 9800656 NR Description: 1-deoxy-D-xylulose-5-phosphate reductoisomerase

SEQ ID NO: 98618 - protein, 476 aa, Arabidopsis thaliana; identical to SEQ ID NO: 40932
  peptide (1)..(476): Ceres Seq. ID no. 13601127
  misc_feature (82)..(462): Pfam Name: 1-deoxy-D-xylulose 5-phosphate reductoisomerase Pfam Description: 1-deoxy-D-xylulose 5-phosphate reductoisomerase
  misc_feature (1)..(476): Homolog of NCBI NO: 15241970 NR Description: 1-deoxy-D-xylulose 5-phosphate reductoisomerase
  misc_feature (71)..(476): Homolog of NCBI NO: 25323805 NR Description: 1-deoxy-d-xylulose-5-phosphate reductoisomerase
  misc_feature (1)..(473): Homolog of NCBI NO: 15679908 NR Description: 1-deoxy-D-xylulose-5-phosphate reductoisomerase
  misc_feature (1)..(474): Homolog of NCBI NO: 34894108 NR Description: 1-deoxy-d-xylulose-5-phosphate reductoisomerase
  misc_feature (1)..(474): Homolog of NCBI NO: 17225989 NR Description: 1-deoxy-D-xylulose 5-phosphate reductoisomerase
  misc_feature (1)..(473): Homolog of NCBI NO: 7621710 NR Description: 1-deoxy-D-xylulose-5-phosphate reductoisomerase
  misc_feature (1)..(476): Homolog of NCBI NO: 9801280 NR Description: putative 1-deoxy-D-xylulose 5-phosphate
  misc_feature (1)..(474): Homolog of NCBI NO: 22797429 NR Description: 1-deoxy-D-xylulose 5-phosphate reductoisomerase
  misc_feature (32)..(476): Homolog of NCBI NO: 34996397 NR Description: putative 1-deoxy-D-xylulose 5-phosphate
  misc_feature (1)..(473): Homolog of NCBI NO: 9800656 NR Description: 1-deoxy-D-xylulose-5-phosphate reductoisomerase

SEQ ID NO: 98619 - DNA, 713 bp, Arabidopsis thaliana
  misc_feature (1)..(713): Ceres Seq. ID no. 13601128
  misc_feature: MA Experiment ID: 20000173 Result: Down-regulated in Transcription
  misc_feature: MA Experiment 20000173 PARAMETER Experiment Name: At_42deg_Heat_P Parameter: Age (day) Value: 14
  misc_feature: MA Experiment 20000173 PARAMETER Experiment Name: At_42deg_Heat_P Parameter: Organism Value: A. thaliana
  misc_feature: MA Experiment 20000173 PARAMETER Experiment Name: At_42deg_Heat_P Parameter: Plant Line Value: WS
  misc_feature: MA Experiment 20000173 PARAMETER Experiment Name: At_42deg_Heat_P Parameter: Temperature (deg C) Value: 42 vs. 22
  misc_feature: MA Experiment 20000173 PARAMETER Experiment Name: At_42deg_Heat_P Parameter: Timepoint (hr) Value: 6
  misc_feature: MA Experiment 20000173 PARAMETER Experiment Name: At_42deg_Heat_P Parameter: Tissue Value: Aerial
  misc_feature: MA Experiment ID: 20000180 Result: Down-regulated in Transcription
  misc_feature: MA Experiment 20000180 PARAMETER Experiment Name: At_Germinating_Seeds_P Parameter: Age (hr) Value: 24 vs. 0
  misc_feature: MA Experiment 20000180 PARAMETER Experiment Name: At_Germinating_Seeds_P Parameter: Tissue Value: Germinating Seeds
  misc_feature: MA Experiment ID: 20000184 Result: Down-regulated in Transcription
  misc_feature: MA Experiment 20000184 PARAMETER Experiment Name: At_Shoots__P Parameter: Age (day) Value: 7
  misc_feature: MA Experiment 20000184 PARAMETER Experiment Name: At_Shoots__P Parameter: Tissue Value: Shoots vs. Whole Plant
  misc_feature: MA Experiment ID: 20000234 Result: Down-regulated in Transcription
  misc_feature: MA Experiment 20000234 PARAMETER Experiment Name: At_Siliques_P Parameter: Age (day) Value: 21
  misc_feature: MA Experiment 20000234 PARAMETER Experiment Name: At_Siliques_P Parameter: Organism Value: A. thaliana
  misc_feature: MA Experiment 20000234 PARAMETER Experiment Name: At_Siliques_P Parameter: Plant Line Value: WS
  misc_feature: MA Experiment 20000234 PARAMETER Experiment Name: At_Siliques_P Parameter: Tissue Value: Less Than 5mm Siliques vs. Whole Plant
  misc_feature: MA Experiment ID: 20000235 Result: Down-regulated in Transcription
  misc_feature: MA Experiment 20000235 PARAMETER Experiment Name: At_Siliques_P Parameter: Age (day) Value: 21
  misc_feature: MA Experiment 20000235 PARAMETER Experiment Name: At_Siliques_P Parameter: Organism Value: A. thaliana
  misc_feature: MA Experiment 20000235 PARAMETER Experiment Name: At_Siliques_P Parameter: Plant Line Value: WS
  misc_feature: MA Experiment 20000235 PARAMETER Experiment Name: At_Siliques_P Parameter: Tissue Value: 5-10mm Siliques vs. Whole Plant
  misc_feature: MA Experiment ID: 20000264 Result: Down-regulated in Transcription
  misc_feature: MA Experiment 20000264 PARAMETER Experiment Name: At_Open_Flower_P Parameter: Age (day) Value: 21
  misc_feature: MA Experiment 20000264 PARAMETER Experiment Name: At_Open_Flower_P Parameter: Plant Line Value: WS
  misc_feature: MA Experiment 20000264 PARAMETER Experiment Name: At_Open_Flower_P Parameter: Tissue Value: Open Flower vs. Whole Plant
  misc_feature: MA Experiment ID: 20000265 Result: Down-regulated in Transcription
  misc_feature: MA Experiment 20000265 PARAMETER Experiment Name: At_Open_Flower_P Parameter: Age (day) Value: 21
  misc_feature: MA Experiment 20000265 PARAMETER Experiment Name: At_Open_Flower_P Parameter: Plant Line Value: WS
  misc_feature: MA Experiment 20000265 PARAMETER Experiment Name: At_Open_Flower_P Parameter: Tissue Value: Closed Flower vs. Whole Plant
  misc_feature: MA Experiment ID: 20000286 Result: Down-regulated in Transcription
  misc_feature: MA Experiment 20000286 PARAMETER Experiment Name: At_Open_Flower_P Parameter: Age (day) Value: 21
  misc_feature: MA Experiment 20000286 PARAMETER Experiment Name: At_Open_Flower_P Parameter: Plant Line Value: WS
  misc_feature: MA Experiment 20000286 PARAMETER Experiment Name: At_Open_Flower_P Parameter: Tissue Value: Half Open vs. Whole Plant
  misc_feature: MA Experiment ID: 20000438 Result: Down-regulated in Transcription
  misc_feature: MA Experiment 20000438 PARAMETER Experiment Name: At_Shoots__P Parameter: Age (day) Value: 14
  misc_feature: MA Experiment 20000438 PARAMETER Experiment Name: At_Shoots__P Parameter: Tissue Value: Shoots vs. Whole Plant
  misc_feature: MA Experiment ID: 20000451 Result: Up-regulated in Transcription
  misc_feature: MA Experiment 20000451 PARAMETER Experiment Name: At_CS6879_Shoots-Roots_P Parameter: Age (day) Value: 14
  misc_feature: MA Experiment 20000451 PARAMETER Experiment Name: At_CS6879_Shoots-Roots_P Parameter: Organism Value: A. thaliana
  misc_feature: MA Experiment 20000451 PARAMETER Experiment Name: At_CS6879_Shoots-Roots_P Parameter: Plant Line Value: CS6879 vs. WS
  misc_feature: MA Experiment 20000451 PARAMETER Experiment Name: At_CS6879_Shoots-Roots_P Parameter: Tissue Value: Roots
  misc_feature: MA Experiment ID: 20001248 Result: Up-regulated in Transcription
  misc_feature: MA Experiment 20001248 PARAMETER Experiment Name: At_Far-red-induction_P Parameter: Age (day) Value: 7
  misc_feature: MA Experiment 20001248 PARAMETER Experiment Name: At_Far-red-induction_P Parameter: Light Value: Far-red vs. White
  misc_feature: MA Experiment 20001248 PARAMETER Experiment Name: At_Far-red-induction_P Parameter: Organism Value: A. thaliana
  misc_feature: MA Experiment 20001248 PARAMETER Experiment Name: At_Far-red-induction_P Parameter: Plant Line Value: Columbia
  misc_feature: MA Experiment 20001248 PARAMETER Experiment Name: At_Far-red-induction_P Parameter: Timepoint (hr) Value: 4
  misc_feature: MA Experiment 20001248 PARAMETER Experiment Name: At_Far-red-induction_P Parameter: Tissue Value: Whole Plant
  misc_feature: MA Experiment ID: 20001451 Result: Up-regulated in Transcription
  misc_feature: MA Experiment 20001451 PARAMETER Experiment Name: At_Far-red-induction_P Parameter: Age (day) Value: 7
  misc_feature: MA Experiment 20001451 PARAMETER Experiment Name: At_Far-red-induction_P Parameter: Light Value: Far-red vs. White
  misc_feature: MA Experiment 20001451 PARAMETER Experiment Name: At_Far-red-induction_P Parameter: Organism Value: A. thaliana
  misc_feature: MA Experiment 20001451 PARAMETER Experiment Name: At_Far-red-induction_P Parameter: Plant Line Value: Columbia
  misc_feature: MA Experiment 20001451 PARAMETER Experiment Name: At_Far-red-induction_P Parameter: Timepoint (hr) Value: 24
  misc_feature: MA Experiment 20001451 PARAMETER Experiment Name: At_Far-red-induction_P Parameter: Tissue Value: Whole Plant
tatagacccctcacctacgctttactctttcactcctctctctcctgctttgctccgccgtgagaggagaaacaaatggggaattgtcaagcggcggaggcggcaacgacggtgatacaacaaccagacggtaaatcggttagattttactgtacagtaaacgcgagcgaagtgattaagtcccatcccggtcaccacgtggctctcctcctctcttccgccgtacctcacggtggctctctccgcgtcactcgtataaagcttcttcgtccttctgataacctcttgctcggtcatgtttatagactcatctcctccgaagaggtgatgaaaggaataagagccaagaaatctggaaagatgaagaagattcatggagagttttctgttgcagaagaagagattaacccactaaccctaagatctgaatctgcttctgacaaagacactcagagaaggatacatgaaaagcagagaggaatgatgaacacaggaggagctaccaataaagttagagcttggcagccttctcttcaaagcatctcagaatctacaagctaaaacacttcaatccatatttttctatctttttttcttacttttgactcttttttttatcatttcatttctctttgtattgttgtttttcccaatcaaatttgtaaaggaagaagacccatttgattgtggttgaagaagaagaaacttttgtc

SEQ ID NO: 98620 - protein, 161 aa, Arabidopsis thaliana
  peptide (1)..(161): Ceres Seq. ID no. 13601129
  misc_feature (1)..(161): Homolog of NCBI NO: 15241996 NR Description: expressed protein [Arabidopsis thaliana] gene_id:MQB2.22~unknown protein [Arabidopsis thaliana] unknown protein [Arabidopsis thaliana]
  misc_feature (1)..(161): Homolog of NCBI NO: 15240611 NR Description: expressed protein [Arabidopsis thaliana] gene_id:MPF21.10~unknown protein [Arabidopsis thaliana]
  misc_feature (1)..(161): Homolog of NCBI NO: 21553451 NR Description: unknown [Arabidopsis thaliana]
  misc_feature (1)..(161): Homolog of NCBI NO: 18406580 NR Description: expressed protein [Arabidopsis thaliana]
  misc_feature (53)..(161): Homolog of NCBI NO: 34904920 NR Description: OSJNBa0077M12.2 [Oryza sativa (japonica >gi|25553716|dbj|BAC24949.1| hypothetical protein [Oryza sativa
  misc_feature (1)..(54): Homolog of NCBI NO: 34904920 NR Description: OSJNBa0077M12.2 [Oryza sativa (japonica >gi|25553716|dbj|BAC24949.1| hypothetical protein [Oryza sativa
  misc_feature (1)..(161): Homolog of NCBI NO: 15218556 NR Description: expressed protein [Arabidopsis thaliana]
  misc_feature (1)..(161): Homolog of NCBI NO: 25402604 NR Description: protein T10O24.15 [imported] - Arabidopsis >gi|5091546|gb|AAD39575.1|AC007067_15 T10O24.15 [Arabidopsis
  misc_feature (1)..(146): Homolog of NCBI NO: 15240787 NR Description: expressed protein [Arabidopsis thaliana]
  misc_feature (19)..(98): Homolog of NCBI NO: 37533268 NR Description: hypothetical protein [Oryza sativa (japonica group)] >gi|19920137|gb|AAM08569.1| Hypothetical protein [Oryza
MGNCQAAEAATTVIQQPDGKSVRFYCTVNASEVIKSHPGHHVALLLSSAVPHGGSLRVTRIKLLRPSDNLLLGHVYRLISSEEVMKGIRAKKSGKMKKIHGEFSVAEEEINPLTLRSESASDKDTQRRIHEKQRGMMNTGGATNKVRAWQPSLQSISESTS

SEQ ID NO: 98621 - DNA, 1065 bp, Arabidopsis thaliana
  misc_feature (1)..(1065): Ceres Seq. ID no. 13601134
  misc_feature: MA Experiment ID: 108462 Result: Up-regulated in Transcription
  misc_feature: MA Experiment 108462 PARAMETER Experiment Name: At_Germinating_Seeds_cDNA_P Parameter: Age (day) Value: 2 vs. 0
  misc_feature: MA Experiment 108462 PARAMETER Experiment Name: At_Germinating_Seeds_cDNA_P Parameter: Tissue Value: Germinating Seeds
  misc_feature: MA Experiment ID: 108464 Result: Up-regulated in Transcription
  misc_feature: MA Experiment 108464 PARAMETER Experiment Name: At_Germinating_Seeds_cDNA_P Parameter: Age (day) Value: 4 vs. 0
  misc_feature: MA Experiment 108464 PARAMETER Experiment Name: At_Germinating_Seeds_cDNA_P Parameter: Tissue Value: Germinating Seeds
  misc_feature: MA Experiment ID: 108579 Result: Down-regulated in Transcription
  misc_feature: MA Experiment 108579 PARAMETER Experiment Name: At_4deg_Cold_cDNA_P Parameter: Temperature (deg C) Value: 4 vs. 22
  misc_feature: MA Experiment 108579 PARAMETER Experiment Name: At_4deg_Cold_cDNA_P Parameter: Timepoint (hr) Value: 6
  misc_feature: MA Experiment 108579 PARAMETER Experiment Name: At_4deg_Cold_cDNA_P Parameter: Tissue Value: Aerial
  misc_feature: MA Experiment ID: 20000179 Result: Up-regulated in Transcription
  misc_feature: MA Experiment 20000179 PARAMETER Experiment Name: At_Germinating_Seeds_P Parameter: Age (hr) Value: 6 vs. 0
  misc_feature: MA Experiment 20000179 PARAMETER Experiment Name: At_Germinating_Seeds_P Parameter: Tissue Value: Germinating Seeds
  misc_feature: MA Experiment ID: 20000180 Result: Up-regulated in Transcription
  misc_feature: MA Experiment 20000180 PARAMETER Experiment Name: At_Germinating_Seeds_P Parameter: Age (hr) Value: 24 vs. 0
  misc_feature: MA Experiment 20000180 PARAMETER Experiment Name: At_Germinating_Seeds_P Parameter: Tissue Value: Germinating Seeds
  misc_feature: MA Experiment ID: 20000184 Result: Down-regulated in Transcription
  misc_feature: MA Experiment 20000184 PARAMETER Experiment Name: At_Shoots__P Parameter: Age (day) Value: 7
  misc_feature: MA Experiment 20000184 PARAMETER Experiment Name: At_Shoots__P Parameter: Tissue Value: Shoots vs. Whole Plant
atgatttggcccagaagagactttaagtttcctaatacagttaacggtttactcagtgaaccggagggagacagcgagatgaggccggagatagttctgttcggcgactcgatcacggcgcagtcttttaggtccggcggttggggatctgctcttgccgacgcttactctcgcaaggctgatgttgtggttcgaggctacggcggctacaacacccgatgggctctcttcttgcttcatcacatcttccctctcggctcttcgtctcctcctgttgctacgacgatattcttcggtgcaaacgatgcagctctcaaaggaagaaccagtgatagacaacatgtgccggtggaagagtacacagataatgtcagaaagattgttcagcatttgaagaaatgttcacctacaatgctaattgtgcttataactccaccaccaattgatgaagctggacgtcaaagttatgcagaatcaatctacggtgagaaagctatgaaagagcctgagagaacaaacgaaacaacaggggtatatgcacaacattgtgttgcattggccgaggaactcggtctgcgatgtgtcaacttatggtctaagatgcaggaaaccaatgattggcagaaaaagtacctaagtgatgggctccatctcacgcctgaaggcaatggggtagtttttgatgaagtctcgagagtttttagagaagcttggctctctcccgaagaaatgccgtttgatttcccccatcattcgcatatcgatggtaaaaacccatcgaaagcttttgaagagcgttgcttataacgatcatccccaaattcatgagcaggtttgttttgatttaaattcatgaacacgtttcaatgttgtgatttagaaaactctcggatgtgaataaatacctaaaaagtgcatcatcactagagatcgttttcaagagaaatgaacttatgatgtacttactatatgttgtgacttttgacttatgtacctgcactagctttctatcttccttgctatatatttcagtctgaaagattttttttaatcttcttttcaatg

SEQ ID NO: 98622 - protein, 268 aa, Arabidopsis thaliana
  peptide (1)..(268): Ceres Seq. ID no. 13601135
  misc_feature (31)..(230): Pfam Name: GDSL-like Lipase/Acylhydrolase Pfam Description: GDSL-like Lipase/Acylhydrolase
  misc_feature (27)..(268): Homolog of NCBI NO: 15242002 NR Description: GDSL-motif lipase/hydrolase protein [Arabidopsis
  misc_feature (27)..(264): Homolog of NCBI NO: 37535366 NR Description: putative esterase [Oryza sativa (japonica
  misc_feature (27)..(265): Homolog of NCBI NO: 15242539 NR Description: GDSL-motif lipase/hydrolase protein [Arabidopsis
  misc_feature (27)..(265): Homolog of NCBI NO: 38454102 NR Description: At5g45920 [Arabidopsis thaliana]
  misc_feature (27)..(264): Homolog of NCBI NO: 34903948 NR Description: OSJNBa0038J17.19 [Oryza sativa (japonica >gi|7523515|dbj|BAA94243.1| unnamed protein product [Oryza sativa
  misc_feature (27)..(268): Homolog of NCBI NO: 13161403 NR Description: CPRD49 [Vigna unguiculata]
  misc_feature (28)..(255): Homolog of NCBI NO: 32352168 NR Description: hypothetical protein [Oryza sativa (japonica
  misc_feature (23)..(230): Homolog of NCBI NO: 27478045 NR Description: similar to hypothetical protein 4833421E05Rik
  misc_feature (28)..(255): Homolog of NCBI NO: 21554235 NR Description: CPRD49 [Arabidopsis thaliana]
  misc_feature (28)..(255): Homolog of NCBI NO: 18399151 NR Description: GDSL-motif lipase/hydrolase protein [Arabidopsis >gi|6016678|gb|AAF01505.1|AC009991_1 unknown protein [Arabidopsis
MIWPRRDFKFPNTVNGLLSEPEGDSEMRPEIVLFGDSITAQSFRSGGWGSALADAYSRKADVVVRGYGGYNTRWALFLLHHIFPLGSSSPPVATTIFFGANDAALKGRTSDRQHVPVEEYTDNVRKIVQHLKKCSPTMLIVLITPPPIDEAGRQSYAESIYGEKAMKEPERTNETTGVYAQHCVALAEELGLRCVNLWSKMQETNDWQKKYLSDGLHLTPEGNGVVFDEVSRVFREAWLSPEEMPFDFPHHSHIDGKNPSKAFEERCL

SEQ ID NO: 98623 - protein, 242 aa, Arabidopsis thaliana; identical to SEQ ID NO: 37221
  peptide (1)..(242): Ceres Seq. ID no. 13601136
  misc_feature (5)..(204): Pfam Name: GDSL-like Lipase/Acylhydrolase Pfam Description: GDSL-like Lipase/Acylhydrolase
  misc_feature (1)..(242): Homolog of NCBI NO: 15242002 NR Description: GDSL-motif lipase/hydrolase protein [Arabidopsis
  misc_feature (1)..(238): Homolog of NCBI NO: 37535366 NR Description: putative esterase [Oryza sativa (japonica
  misc_feature (1)..(239): Homolog of NCBI NO: 15242539 NR Description: GDSL-motif lipase/hydrolase protein [Arabidopsis
  misc_feature (1)..(239): Homolog of NCBI NO: 38454102 NR Description: At5g45920 [Arabidopsis thaliana]
  misc_feature (1)..(238): Homolog of NCBI NO: 34903948 NR Description: OSJNBa0038J17.19 [Oryza sativa (japonica >gi|7523515|dbj|BAA94243.1| unnamed protein product [Oryza sativa
  misc_feature (1)..(242): Homolog of NCBI NO: 13161403 NR Description: CPRD49 [Vigna unguiculata]
  misc_feature (2)..(229): Homolog of NCBI NO: 32352168 NR Description: hypothetical protein [Oryza sativa (japonica
  misc_feature (1)..(204): Homolog of NCBI NO: 27478045 NR Description: similar to hypothetical protein 4833421E05Rik
  misc_feature (2)..(229): Homolog of NCBI NO: 21554235 NR Description: CPRD49 [Arabidopsis thaliana]
  misc_feature (2)..(229): Homolog of NCBI NO: 18399151 NR Description: GDSL-motif lipase/hydrolase protein [Arabidopsis >gi|6016678|gb|AAF01505.1|AC009991_1 unknown protein [Arabidopsis

SEQ ID NO: 98624 - DNA, 1437 bp, Arabidopsis thaliana
  misc_feature (1)..(1437): Ceres Seq. ID no. 13601143
  misc_feature: MA Experiment ID: 108433 Result: Up-regulated in Transcription
  misc_feature: MA Experiment 108433 PARAMETER Experiment Name: At_rhl_Mutant2_cDNA_P Parameter: Age (day) Value: 7
  misc_feature: MA Experiment 108433 PARAMETER Experiment Name: At_rhl_Mutant2_cDNA_P Parameter: Organism Value: A. thaliana
  misc_feature: MA Experiment 108433 PARAMETER Experiment Name: At_rhl_Mutant2_cDNA_P Parameter: Plant Line Value: rhl Mutant vs. wt landsburg
  misc_feature: MA Experiment 108433 PARAMETER Experiment Name: At_rhl_Mutant2_cDNA_P Parameter: Tissue Value: Roots
  misc_feature: MA Experiment ID: 108434 Result: Down-regulated in Transcription
  misc_feature: MA Experiment 108434 PARAMETER Experiment Name: At_Root_Tips_cDNA_P Parameter: Tissue Value: Root Tips
  misc_feature: MA Experiment ID: 108435 Result: Down-regulated in Transcription
  misc_feature: MA Experiment 108435 PARAMETER Experiment Name: At_stm_Mutants_cDNA_P Parameter: Plant Line Value: wt Landsburg vs stm
  misc_feature: MA Experiment 108435 PARAMETER Experiment Name: At_stm_Mutants_cDNA_P Parameter: Tissue Value: Shoot Apical Meristem Region
  misc_feature: MA Experiment ID: 108464 Result: Up-regulated in Transcription
  misc_feature: MA Experiment 108464 PARAMETER Experiment Name: At_Germinating_Seeds_cDNA_P Parameter: Age (day) Value: 4 vs. 0
  misc_feature: MA Experiment 108464 PARAMETER Experiment Name: At_Germinating_Seeds_cDNA_P Parameter: Tissue Value: Germinating Seeds
  misc_feature: MA Experiment ID: 108572 Result: Up-regulated in Transcription
  misc_feature: MA Experiment 108572 PARAMETER Experiment Name: At_Drought_cDNA_P Parameter: Timepoint (hr) Value: 1
  misc_feature: MA Experiment 108572 PARAMETER Experiment Name: At_Drought_cDNA_P Parameter: Tissue Value: Aerial
  misc_feature: MA Experiment 108572 PARAMETER Experiment Name: At_Drought_cDNA_P Parameter: Treatment Value: Drought vs. No Drought
  misc_feature: MA Experiment ID: 108573 Result: Up-regulated in Transcription
  misc_feature: MA Experiment 108573 PARAMETER Experiment Name: At_Drought_cDNA_P Parameter: Timepoint (hr) Value: 6
  misc_feature: MA Experiment 108573 PARAMETER Experiment Name: At_Drought_cDNA_P Parameter: Tissue Value: Aerial
  misc_feature: MA Experiment 108573 PARAMETER Experiment Name: At_Drought_cDNA_P Parameter: Treatment Value: Drought vs. No Drought
  misc_feature: MA Experiment ID: 108595 Result: Down-regulated in Transcription
  misc_feature: MA Experiment 108595 PARAMETER Experiment Name: At_Ler-pi_Ovule_cDNA_P Parameter: Plant Line Value: null
  misc_feature: MA Experiment ID: 108605 Result: Up-regulated in Transcription
  misc_feature: MA Experiment 108605 PARAMETER Experiment Name: At_100uM_ABA_cDNA_P Parameter: Timepoint (hr) Value: 6
  misc_feature: MA Experiment 108605 PARAMETER Experiment Name: At_100uM_ABA_cDNA_P Parameter: Tissue Value: Aerial
  misc_feature: MA Experiment 108605 PARAMETER Experiment Name: At_100uM_ABA_cDNA_P Parameter: Treatment Value: 100uM ABA vs. No Treatment
  misc_feature: MA Experiment ID: 108607 Result: Up-regulated in Transcription
  misc_feature: MA Experiment 108607 PARAMETER Experiment Name: At_100uM_ABA_cDNA_P Parameter: Timepoint (hr) Value: 4
  misc_feature: MA Experiment 108607 PARAMETER Experiment Name: At_100uM_ABA_cDNA_P Parameter: Tissue Value: Aerial
  misc_feature: MA Experiment 108607 PARAMETER Experiment Name: At_100uM_ABA_cDNA_P Parameter: Treatment Value: 100uM ABA vs. No Treatment
  misc_feature: MA Experiment ID: 20000069 Result: Up-regulated in Transcription
  misc_feature: MA Experiment 20000069 PARAMETER Experiment Name: At_100uM_ABA_Mutants_cDNA_P Parameter: Plant Line Value: CS23
  misc_feature: MA Experiment 20000069 PARAMETER Experiment Name: At_100uM_ABA_Mutants_cDNA_P Parameter: Timepoint (hr) Value: 6
  misc_feature: MA Experiment 20000069 PARAMETER Experiment Name: At_100uM_ABA_Mutants_cDNA_P Parameter: Tissue Value: Aerial
  misc_feature: MA Experiment 20000069 PARAMETER Experiment Name: At_100uM_ABA_Mutants_cDNA_P Parameter: Treatment Value: 100uM ABA vs. No Treatment
  misc_feature: MA Experiment ID: 20000070 Result: Up-regulated in Transcription
  misc_feature: MA Experiment 20000070 PARAMETER Experiment Name: At_100uM_ABA_Mutants_cDNA_P Parameter: Plant Line Value: CS24
  misc_feature: MA Experiment 20000070 PARAMETER Experiment Name: At_100uM_ABA_Mutants_cDNA_P Parameter: Timepoint (hr) Value: 6
  misc_feature: MA Experiment 20000070 PARAMETER Experiment Name: At_100uM_ABA_Mutants_cDNA_P Parameter: Tissue Value: Aerial
  misc_feature: MA Experiment 20000070 PARAMETER Experiment Name: At_100uM_ABA_Mutants_cDNA_P Parameter: Treatment Value: 100uM ABA vs. No Treatment
  misc_feature: MA Experiment ID: 20000071 Result: Up-regulated in Transcription
  misc_feature: MA Experiment 20000071 PARAMETER Experiment Name: At_100uM_ABA_Mutants_cDNA_P Parameter: Plant Line Value: CS8104
  misc_feature: MA Experiment 20000071 PARAMETER Experiment Name: At_100uM_ABA_Mutants_cDNA_P Parameter: Timepoint (hr) Value: 6
  misc_feature: MA Experiment 20000071 PARAMETER Experiment Name: At_100uM_ABA_Mutants_cDNA_P Parameter: Tissue Value: Aerial
  misc_feature: MA Experiment 20000071 PARAMETER Experiment Name: At_100uM_ABA_Mutants_cDNA_P Parameter: Treatment Value: 100uM ABA vs. No Treatment
  misc_feature: MA Experiment ID: 20000072 Result: Up-regulated in Transcription
  misc_feature: MA Experiment 20000072 PARAMETER Experiment Name: At_100uM_ABA_Mutants_cDNA_P Parameter: Plant Line Value: CS8105
  misc_feature: MA Experiment 20000072 PARAMETER Experiment Name: At_100uM_ABA_Mutants_cDNA_P Parameter: Timepoint (hr) Value: 6
  misc_feature: MA Experiment 20000072 PARAMETER Experiment Name: At_100uM_ABA_Mutants_cDNA_P Parameter: Tissue Value: Aerial
  misc_feature: MA Experiment 20000072 PARAMETER Experiment Name: At_100uM_ABA_Mutants_cDNA_P Parameter: Treatment Value: 100uM ABA vs. No Treatment
  misc_feature: MA Experiment ID: 20000086 Result: Up-regulated in Transcription
  misc_feature: MA Experiment 20000086 PARAMETER Experiment Name: At_100uM_ABA_Mutants_cDNA_P Parameter: Plant Line Value: CS22
  misc_feature: MA Experiment 20000086 PARAMETER Experiment Name: At_100uM_ABA_Mutants_cDNA_P Parameter: Timepoint (hr) Value: 6
  misc_feature: MA Experiment 20000086 PARAMETER Experiment Name: At_100uM_ABA_Mutants_cDNA_P Parameter: Tissue Value: Aerial
  misc_feature: MA Experiment 20000086 PARAMETER Experiment Name: At_100uM_ABA_Mutants_cDNA_P Parameter: Treatment Value: 100uM ABA vs. No Treatment
  misc_feature: MA Experiment ID: 20000087 Result: Up-regulated in Transcription
  misc_feature: MA Experiment 20000087 PARAMETER Experiment Name: At_100uM_ABA_Mutants_cDNA_P Parameter: Plant Line Value: WS
  misc_feature: MA Experiment 20000087 PARAMETER Experiment Name: At_100uM_ABA_Mutants_cDNA_P Parameter: Timepoint (hr) Value: 6
  misc_feature: MA Experiment 20000087 PARAMETER Experiment Name: At_100uM_ABA_Mutants_cDNA_P Parameter: Tissue Value: Aerial
  misc_feature: MA Experiment 20000087 PARAMETER Experiment Name: At_100uM_ABA_Mutants_cDNA_P Parameter: Treatment Value: 100uM ABA vs. No Treatment
  misc_feature: MA Experiment ID: 20000088 Result: Up-regulated in Transcription
  misc_feature: MA Experiment 20000088 PARAMETER Experiment Name: At_100uM_ABA_Mutants_cDNA_P Parameter: Plant Line Value: Landsberg
  misc_feature: MA Experiment 20000088 PARAMETER Experiment Name: At_100uM_ABA_Mutants_cDNA_P Parameter: Timepoint (hr) Value: 6
  misc_feature: MA Experiment 20000088 PARAMETER Experiment Name: At_100uM_ABA_Mutants_cDNA_P Parameter: Tissue Value: Aerial
  misc_feature: MA Experiment 20000088 PARAMETER Experiment Name: At_100uM_ABA_Mutants_cDNA_P Parameter: Treatment Value: 100uM ABA vs. No Treatment
  misc_feature: MA Experiment ID: 20000111 Result: Up-regulated in Transcription
  misc_feature: MA Experiment 20000111 PARAMETER Experiment Name: At_42deg_Heat_cDNA_P Parameter: Temperature (deg C) Value: 42 vs. 22
  misc_feature: MA Experiment 20000111 PARAMETER Experiment Name: At_42deg_Heat_cDNA_P Parameter: Timepoint (hr) Value: 6
  misc_feature: MA Experiment 20000111 PARAMETER Experiment Name: At_42deg_Heat_cDNA_P Parameter: Tissue Value: Aerial
  misc_feature: MA Experiment ID: 20000112 Result: Up-regulated in Transcription
  misc_feature: MA Experiment 20000112 PARAMETER Experiment Name: At_42deg_Heat_cDNA_P Parameter: Temperature (deg C) Value: 42 vs. 22
  misc_feature: MA Experiment 20000112 PARAMETER Experiment Name: At_42deg_Heat_cDNA_P Parameter: Timepoint (hr) Value: 2
  misc_feature: MA Experiment 20000112 PARAMETER Experiment Name: At_42deg_Heat_cDNA_P Parameter: Tissue Value: Aerial
  misc_feature: MA Experiment ID: 20000113 Result: Up-regulated in Transcription
  misc_feature: MA Experiment 20000113 PARAMETER Experiment Name: At_42deg_Heat_cDNA_P Parameter: Temperature (deg C) Value: 42 vs. 22
  misc_feature: MA Experiment 20000113 PARAMETER Experiment Name: At_42deg_Heat_cDNA_P Parameter: Timepoint (hr) Value: 8
  misc_feature: MA Experiment 20000113 PARAMETER Experiment Name: At_42deg_Heat_cDNA_P Parameter: Tissue Value: Aerial
  misc_feature: MA Experiment ID: 20000169 Result: Up-regulated in Transcription
  misc_feature: MA Experiment 20000169 PARAMETER Experiment Name: At_100uM_ABA_P Parameter: Age (day) Value: 14
  misc_feature: MA Experiment 20000169 PARAMETER Experiment Name: At_100uM_ABA_P Parameter: Organism Value: A. thaliana
  misc_feature: MA Experiment 20000169 PARAMETER Experiment Name: At_100uM_ABA_P Parameter: Plant Line Value: WS
  misc_feature: MA Experiment 20000169 PARAMETER Experiment Name: At_100uM_ABA_P Parameter: Timepoint (hr) Value: 6
  misc_feature: MA Experiment 20000169 PARAMETER Experiment Name: At_100uM_ABA_P Parameter: Tissue Value: Aerial
  misc_feature: MA Experiment 20000169 PARAMETER Experiment Name: At_100uM_ABA_P Parameter: Treatment Value: 100uM ABA vs. No Treatment
  misc_feature: MA Experiment ID: 20000234 Result: Down-regulated in Transcription
  misc_feature: MA Experiment 20000234 PARAMETER Experiment Name: At_Siliques_P Parameter: Age (day) Value: 21
  misc_feature: MA Experiment 20000234 PARAMETER Experiment Name: At_Siliques_P Parameter: Organism Value: A. thaliana
  misc_feature: MA Experiment 20000234 PARAMETER Experiment Name: At_Siliques_P Parameter: Plant Line Value: WS
  misc_feature: MA Experiment 20000234 PARAMETER Experiment Name: At_Siliques_P Parameter: Tissue Value: Less Than 5mm Siliques vs. Whole Plant
  misc_feature: MA Experiment ID: 20000264 Result: Down-regulated in Transcription
  misc_feature: MA Experiment 20000264 PARAMETER Experiment Name: At_Open_Flower_P Parameter: Age (day) Value: 21
  misc_feature: MA Experiment 20000264 PARAMETER Experiment Name: At_Open_Flower_P Parameter: Plant Line Value: WS
  misc_feature: MA Experiment 20000264 PARAMETER Experiment Name: At_Open_Flower_P Parameter: Tissue Value: Open Flower vs. Whole Plant
  misc_feature: MA Experiment ID: 20000265 Result: Down-regulated in Transcription
  misc_feature: MA Experiment 20000265 PARAMETER Experiment Name: At_Open_Flower_P Parameter: Age (day) Value: 21
  misc_feature: MA Experiment 20000265 PARAMETER Experiment Name: At_Open_Flower_P Parameter: Plant Line Value: WS
  misc_feature: MA Experiment 20000265 PARAMETER Experiment Name: At_Open_Flower_P Parameter: Tissue Value: Closed Flower vs. Whole Plant
  misc_feature: MA Experiment ID: 20000439 Result: Down-regulated in Transcription
  misc_feature: MA Experiment 20000439 PARAMETER Experiment Name: At_Roots__P Parameter: Age (day) Value: 14 vs. 21
  misc_feature: MA Experiment 20000439 PARAMETER Experiment Name: At_Roots__P Parameter: Organism Value: A. thaliana
  misc_feature: MA Experiment 20000439 PARAMETER Experiment Name: At_Roots__P Parameter: Tissue Value: Roots vs. Whole Plant
  misc_feature: MA Experiment ID: 20000451 Result: Down-regulated in Transcription
  misc_feature: MA Experiment 20000451 PARAMETER Experiment Name: At_CS6879_Shoots-Roots_P Parameter: Age (day) Value: 14
  misc_feature: MA Experiment 20000451 PARAMETER Experiment Name: At_CS6879_Shoots-Roots_P Parameter: Organism Value: A. thaliana
  misc_feature: MA Experiment 20000451 PARAMETER Experiment Name: At_CS6879_Shoots-Roots_P Parameter: Plant Line Value: CS6879 vs. WS
  misc_feature: MA Experiment 20000451 PARAMETER Experiment Name: At_CS6879_Shoots-Roots_P Parameter: Tissue Value: Roots
  misc_feature: MA Experiment ID: 20000495 Result: Down-regulated in Transcription
  misc_feature: MA Experiment 20000495 PARAMETER Experiment Name: At_Guard_Cells_P Parameter: Harvest Date Value: 8/2/2002
  misc_feature: MA Experiment 20000495 PARAMETER Experiment Name: At_Guard_Cells_P Parameter: Organism Value: A. thaliana
  misc_feature: MA Experiment 20000495 PARAMETER Experiment Name: At_Guard_Cells_P Parameter: Tissue Value: Guard Cells vs. Leaves
  misc_feature: MA Experiment ID: 20000527 Result: Up-regulated in Transcription
  misc_feature: MA Experiment 20000527 PARAMETER Experiment Name: At_10percent_PEG_P Parameter: Age (day) Value: 20
  misc_feature: MA Experiment 20000527 PARAMETER Experiment Name: At_10percent_PEG_P Parameter: Organism Value: A. thaliana
  misc_feature: MA Experiment 20000527 PARAMETER Experiment Name: At_10percent_PEG_P Parameter: Plant Line Value: WS
  misc_feature: MA Experiment 20000527 PARAMETER Experiment Name: At_10percent_PEG_P Parameter: Timepoint (day) Value: 20
  misc_feature: MA Experiment 20000527 PARAMETER Experiment Name: At_10percent_PEG_P Parameter: Tissue Value: Whole Plant
  misc_feature: MA Experiment 20000527 PARAMETER Experiment Name: At_10percent_PEG_P Parameter: Treatment Value: 10percent PEG vs. No Treatment
  misc_feature: MA Experiment ID: 20000574 Result: Down-regulated in Transcription
  misc_feature: MA Experiment 20000574 PARAMETER Experiment Name: At_100uM_ABA_Mutants__P Parameter: Organism Value: A. thaliana
  misc_feature: MA Experiment 20000574 PARAMETER Experiment Name: At_100uM_ABA_Mutants__P Parameter: Plant Line Value: CS23 vs. Ler wt
  misc_feature: MA Experiment 20000574 PARAMETER Experiment Name: At_100uM_ABA_Mutants__P Parameter: Timepoint (hr) Value: N/A
  misc_feature: MA Experiment 20000574 PARAMETER Experiment Name: At_100uM_ABA_Mutants__P Parameter: Tissue Value: Whole Plant
  misc_feature: MA Experiment 20000574 PARAMETER Experiment Name: At_100uM_ABA_Mutants__P Parameter: Treatment Value: None
  misc_feature: MA Experiment ID: 20001247 Result: Up-regulated in Transcription
  misc_feature: MA Experiment 20001247 PARAMETER Experiment Name: At_Far-red-induction_P Parameter: Age (day) Value: 7
  misc_feature: MA Experiment 20001247 PARAMETER Experiment Name: At_Far-red-induction_P Parameter: Light Value: Far-red vs. White
  misc_feature: MA Experiment 20001247 PARAMETER Experiment Name: At_Far-red-induction_P Parameter: Organism Value: A. thaliana
  misc_feature: MA Experiment 20001247 PARAMETER Experiment Name: At_Far-red-induction_P Parameter: Plant Line Value: Columbia
  misc_feature: MA Experiment 20001247 PARAMETER Experiment Name: At_Far-red-induction_P Parameter: Timepoint (hr) Value: 1
  misc_feature: MA Experiment 20001247 PARAMETER Experiment Name: At_Far-red-induction_P Parameter: Tissue Value: Whole Plant
  misc_feature: MA Experiment ID: 20001248 Result: Up-regulated in Transcription
  misc_feature: MA Experiment 20001248 PARAMETER Experiment Name: At_Far-red-induction_P Parameter: Age (day) Value: 7
  misc_feature: MA Experiment 20001248 PARAMETER Experiment Name: At_Far-red-induction_P Parameter: Light Value: Far-red vs. White
  misc_feature: MA Experiment 20001248 PARAMETER Experiment Name: At_Far-red-induction_P Parameter: Organism Value: A. thaliana
  misc_feature: MA Experiment 20001248 PARAMETER Experiment Name: At_Far-red-induction_P Parameter: Plant Line Value: Columbia
  misc_feature: MA Experiment 20001248 PARAMETER Experiment Name: At_Far-red-induction_P Parameter: Timepoint (hr) Value: 4
  misc_feature: MA Experiment 20001248 PARAMETER Experiment Name: At_Far-red-induction_P Parameter: Tissue Value: Whole Plant
  misc_feature: MA Experiment ID: 20001450 Result: Up-regulated in Transcription
  misc_feature: MA Experiment 20001450 PARAMETER Experiment Name: At_Far-red-induction_P Parameter: Age (day) Value: 7
  misc_feature: MA Experiment 20001450 PARAMETER Experiment Name: At_Far-red-induction_P Parameter: Light Value: Far-red vs. White
  misc_feature: MA Experiment 20001450 PARAMETER Experiment Name: At_Far-red-induction_P Parameter: Organism Value: A. thaliana
  misc_feature: MA Experiment 20001450 PARAMETER Experiment Name: At_Far-red-induction_P Parameter: Plant Line Value: Columbia
  misc_feature: MA Experiment 20001450 PARAMETER Experiment Name: At_Far-red-induction_P Parameter: Timepoint (hr) Value: 8
  misc_feature: MA Experiment 20001450 PARAMETER Experiment Name: At_Far-red-induction_P Parameter: Tissue Value: Whole Plant
  misc_feature: MA Experiment ID: 20001451 Result: Up-regulated in Transcription
  misc_feature: MA Experiment 20001451 PARAMETER Experiment Name: At_Far-red-induction_P Parameter: Age (day) Value: 7
  misc_feature: MA Experiment 20001451 PARAMETER Experiment Name: At_Far-red-induction_P Parameter: Light Value: Far-red vs. White
  misc_feature: MA Experiment 20001451 PARAMETER Experiment Name: At_Far-red-induction_P Parameter: Organism Value: A. thaliana
  misc_feature: MA Experiment 20001451 PARAMETER Experiment Name: At_Far-red-induction_P Parameter: Plant Line Value: Columbia
  misc_feature: MA Experiment 20001451 PARAMETER Experiment Name: At_Far-red-induction_P Parameter: Timepoint (hr) Value: 24
  misc_feature: MA Experiment 20001451 PARAMETER Experiment Name: At_Far-red-induction_P Parameter: Tissue Value: Whole Plant
  misc_feature: MA Experiment ID: 20001554 Result: Up-regulated in Transcription
  misc_feature: MA Experiment 20001554 PARAMETER Experiment Name: At_Drought_Soil_Dry_P Parameter: Age (day) Value: 21
  misc_feature: MA Experiment 20001554 PARAMETER Experiment Name: At_Drought_Soil_Dry_P Parameter: Organism Value: A. thaliana
  misc_feature: MA Experiment 20001554 PARAMETER Experiment Name: At_Drought_Soil_Dry_P Parameter: Plant Line Value: WS
  misc_feature: MA Experiment 20001554 PARAMETER Experiment Name: At_Drought_Soil_Dry_P Parameter: Post Timepoint (hr) Value: None
  misc_feature: MA Experiment 20001554 PARAMETER Experiment Name: At_Drought_Soil_Dry_P Parameter: Post-Treatment Value: None
  misc_feature: MA Experiment 20001554 PARAMETER Experiment Name: At_Drought_Soil_Dry_P Parameter: Timepoint (day) Value: 7
  misc_feature: MA Experiment 20001554 PARAMETER Experiment Name: At_Drought_Soil_Dry_P Parameter: Treatment Value: Drought vs. No Drought
  misc_feature: MA Experiment ID: 20001555 Result: Up-regulated in Transcription
  misc_feature: MA Experiment 20001555 PARAMETER Experiment Name: At_Drought_Soil_Dry_P Parameter: Age (day) Value: 24
  misc_feature: MA Experiment 20001555 PARAMETER Experiment Name: At_Drought_Soil_Dry_P Parameter: Organism Value: A. thaliana
  misc_feature: MA Experiment 20001555 PARAMETER Experiment Name: At_Drought_Soil_Dry_P Parameter: Plant Line Value: WS
  misc_feature: MA Experiment 20001555 PARAMETER Experiment Name: At_Drought_Soil_Dry_P Parameter: Post Timepoint (hr) Value: None
  misc_feature: MA Experiment 20001555 PARAMETER Experiment Name: At_Drought_Soil_Dry_P Parameter: Post-Treatment Value: None
  misc_feature: MA Experiment 20001555 PARAMETER Experiment Name: At_Drought_Soil_Dry_P Parameter: Timepoint (day) Value: 10
  misc_feature: MA Experiment 20001555 PARAMETER Experiment Name: At_Drought_Soil_Dry_P Parameter: Treatment Value: Drought vs. No Drought
  misc_feature: MA Experiment ID: 20001757 Result: Up-regulated in Transcription
  misc_feature: MA Experiment 20001757 PARAMETER Experiment Name: At_50mM_NH4NO3_L-to-H_P Parameter: Timepoint (hr) Value: 6
  misc_feature: MA Experiment 20001757 PARAMETER Experiment Name: At_50mM_NH4NO3_L-to-H_P Parameter: Tissue Value: Leaf
  misc_feature: MA Experiment 20001757 PARAMETER Experiment Name: At_50mM_NH4NO3_L-to-H_P Parameter: Treatment Value: 50mM NH4NO3 vs 100mM Mannitol
atcaaattaaaaccctccagcctccaacaacaaaatttaccaacactctctctttctctttctctctgaaaacttaaaacgatggctataaccgccactcaaaacgacggcgtttcactaaacgccaataagatttcgtatgatcttgtggaaactgatgttgagatcatcacctccggtcgtcgtagtattccggcacactccggcatcctcgcttcggtctcaccggtactgacgaacatcatcgagaagccgaggaagattcacggcggatcatcgaagaaagttattaagattctcggtgttccatgcgacgccgtttcagtcttcgtcagattcctctattctccgagtgtcacggagaatgagatggaaaaatacggaatccatctactggctttatcacacgtgtatatggtgactcagttaaagcaacggtgcactaaaggcgtcggtgagagagtaaccgccgaaaacgttgtcgatattctccagctggctcgtctctgcgacgcacctgacctctgtctcaagtgtatgcgattcattcactacaagttcaagaccgttgaacagacagaaggatggaagtttcttcaagaacacgatccttttcttgaacttgacattctccaattcatcgacgatgcagaatcgaggaagaaaagaagaaggagacacagacgagaacagaatctgtatttgcagctgagtgaagccatggaatgtatagaacacatatgcaccgaaggttgcacactggtcggaccatcgtctaacttagacaacaagtcaacatgtcaagcaaaacccggtccatgcagtgcgttttcgacttgttacggacttcaacttcttatacgtcactttgcagtatgcaagaaaagagtcgatggcaaaggttgtgtccgatgcaagagaatgattcaactccttagactccattcttcgatttgtgaccaatctgaatcttgccgtgtccctctttgcaggcaatataagaatagaggtgaaaaggacaagaaaatggttgaggacacgaagtggaaggttctggtgagaagagtagcgtctgctaaagccatgtcttcgttgtctcaatcaaagaagaaaaaaagtgaagtgttatttaaagaagaagcagaagatttgatcagaatccggaacaagttaatgtgaatatacaatatatgtgtttttattagattatatagtgagcgattgttagaagccattaattacttgagtcggaaggtttatttgtttgttatttgtctctcggactggttgattgggttaaacttgtcaatgagtaaccctttgaatctgtcgttttgtttggtcggtcgaattatatagaaatgtattattggttataaaatggtattagggtttttggagactttgtggcaaaaagtatacagattgatccggttt

SEQ ID NO: 98625 - protein, 365 aa, Arabidopsis thaliana
  peptide (1)..(365): Ceres Seq. ID no. 13601144
  misc_feature (253)..(303): Pfam Name: TAZ zinc finger Pfam Description: TAZ zinc finger
  misc_feature (1)..(365): Homolog of NCBI NO: 15242656 NR Description: expressed protein [Arabidopsis thaliana] contains similarity to unknown
  misc_feature (1)..(347): Homolog of NCBI NO: 18408618 NR Description: expressed protein [Arabidopsis thaliana] unknown protein [Arabidopsis thaliana] unknown protein [Arabidopsis thaliana]
  misc_feature (1)..(347): Homolog of NCBI NO: 7487530 NR Description: hypothetical protein T29H11.120 - Arabidopsis >gi|4678352|emb|CAB41162.1| putative protein [Arabidopsis
  misc_feature (26)..(343): Homolog of NCBI NO: 20804890 NR Description: P0497A05.15 [Oryza sativa (japonica
  misc_feature (23)..(345): Homolog of NCBI NO: 38345257 NR Description: OSJNBb0011N17.18 [Oryza sativa (japonica
  misc_feature (16)..(333): Homolog of NCBI NO: 15240763 NR Description: expressed protein [Arabidopsis thaliana] gene_id:K9I9.4~pir||T04718~strong similarity to unknown protein thaliana] >gi|15529178|gb|AAK97683.1| AT5g67480/K9I9_4
  misc_feature (26)..(303): Homolog of NCBI NO: 15221235 NR Description: hypothetical protein [Arabidopsis thaliana]
  misc_feature (26)..(333): Homolog of NCBI NO: 7485765 NR Description: hypothetical protein F19F18.100 - Arabidopsis >gi|4468986|emb|CAB38300.1| putative protein [Arabidopsis >gi|7270743|emb|CAB80426.1| putative protein [Arabidopsis
  misc_feature (26)..(333): Homolog of NCBI NO: 26453150 NR Description: unknown protein [Arabidopsis thaliana]
  misc_feature (26)..(333): Homolog of NCBI NO: 18420081 NR Description: expressed protein [Arabidopsis thaliana]
MAITATQNDGVSLNANKISYDLVETDVEIITSGRRSIPAHSGILASVSPVLTNIIEKPRKIHGGSSKKVIKILGVPCDAVSVFVRFLYSPSVTENEMEKYGIHLLALSHVYMVTQLKQRCTKGVGERVTAENVVDILQLARLCDAPDLCLKCMRFIHYKFKTVEQTEGWKFLQEHDPFLELDILQFIDDAESRKKRRRRHRREQNLYLQLSEAMECIEHICTEGCTLVGPSSNLDNKSTCQAKPGPCSAFSTCYGLQLLIRHFAVCKKRVDGKGCVRCKRMIQLLRLHSSICDQSESCRVPLCRQYKNRGEKDKKMVEDTKWKVLVRRVASAKAMSSLSQSKKKKSEVLFKEEAEDLIRIRNKLM

SEQ ID NO: 98626 - protein, 269 aa, Arabidopsis thaliana
  peptide (1)..(269): Ceres Seq. ID no. 13601145
  misc_feature (157)..(207): Pfam Name: TAZ zinc finger Pfam Description: TAZ zinc finger
  misc_feature (1)..(269): Homolog of NCBI NO: 15242656 NR Description: expressed protein [Arabidopsis thaliana] contains similarity to unknown
  misc_feature (1)..(251): Homolog of NCBI NO: 18408618 NR Description: expressed protein [Arabidopsis thaliana] unknown protein [Arabidopsis thaliana] unknown protein [Arabidopsis thaliana]
  misc_feature (1)..(251): Homolog of NCBI NO: 7487530 NR Description: hypothetical protein T29H11.120 - Arabidopsis >gi|4678352|emb|CAB41162.1| putative protein [Arabidopsis
  misc_feature (1)..(247): Homolog of NCBI NO: 20804890 NR Description: P0497A05.15 [Oryza sativa (japonica
  misc_feature (1)..(249): Homolog of NCBI NO: 38345257 NR Description: OSJNBb0011N17.18 [Oryza sativa (japonica
  misc_feature (1)..(237): Homolog of NCBI NO: 15240763 NR Description: expressed protein [Arabidopsis thaliana] gene_id:K9I9.4~pir||T04718~strong similarity to unknown protein thaliana] >gi|15529178|gb|AAK97683.1| AT5g67480/K9I9_4
  misc_feature (1)..(207): Homolog of NCBI NO: 15221235 NR Description: hypothetical protein [Arabidopsis thaliana]
  misc_feature (1)..(237): Homolog of NCBI NO: 7485765 NR Description: hypothetical protein F19F18.100 - Arabidopsis >gi|4468986|emb|CAB38300.1| putative protein [Arabidopsis >gi|7270743|emb|CAB80426.1| putative protein [Arabidopsis
  misc_feature (1)..(237): Homolog of NCBI NO: 26453150 NR Description: unknown protein [Arabidopsis thaliana]
  misc_feature (1)..(237): Homolog of NCBI NO: 18420081 NR Description: expressed protein [Arabidopsis thaliana]
MEKYGIHLLALSHVYMVTQLKQRCTKGVGERVTAENVVDILQLARLCDAPDLCLKCMRFIHYKFKTVEQTEGWKFLQEHDPFLELDILQFIDDAESRKKRRRRHRREQNLYLQLSEAMECIEHICTEGCTLVGPSSNLDNKSTCQAKPGPCSAFSTCYGLQLLIRHFAVCKKRVDGKGCVRCKRMIQLLRLHSSICDQSESCRVPLCRQYKNRGEKDKKMVEDTKWKVLVRRVASAKAMSSLSQSKKKKSEVLFKEEAEDLIRIRNKLM

SEQ ID NO: 98627 - protein, 254 aa, Arabidopsis thaliana
  peptide (1)..(254): Ceres Seq. ID no. 13601146
  misc_feature (142)..(192): Pfam Name: TAZ zinc finger Pfam Description: TAZ zinc finger
  misc_feature (1)..(254): Homolog of NCBI NO: 15242656 NR Description: expressed protein [Arabidopsis thaliana] contains similarity to unknown
  misc_feature (1)..(236): Homolog of NCBI NO: 18408618 NR Description: expressed protein [Arabidopsis thaliana] unknown protein [Arabidopsis thaliana] unknown protein [Arabidopsis thaliana]
  misc_feature (1)..(236): Homolog of NCBI NO: 7487530 NR Description: hypothetical protein T29H11.120 - Arabidopsis >gi|4678352|emb|CAB41162.1| putative protein [Arabidopsis
  misc_feature (1)..(232): Homolog of NCBI NO: 20804890 NR Description: P0497A05.15 [Oryza sativa (japonica
  misc_feature (1)..(234): Homolog of NCBI NO: 38345257 NR Description: OSJNBb0011N17.18 [Oryza sativa (japonica
  misc_feature (1)..(222): Homolog of NCBI NO: 15240763 NR Description: expressed protein [Arabidopsis thaliana] gene_id:K9I9.4~pir||T04718~strong similarity to unknown protein thaliana] >gi|15529178|gb|AAK97683.1| AT5g67480/K9I9_4
  misc_feature (1)..(192): Homolog of NCBI NO: 15221235 NR Description: hypothetical protein [Arabidopsis thaliana]
  misc_feature (1)..(222): Homolog of NCBI NO: 7485765 NR Description: hypothetical protein F19F18.100 - Arabidopsis >gi|4468986|emb|CAB38300.1| putative protein [Arabidopsis >gi|7270743|emb|CAB80426.1| putative protein [Arabidopsis
  misc_feature (1)..(222): Homolog of NCBI NO: 18420081 NR Description: expressed protein [Arabidopsis thaliana]
  misc_feature (1)..(222): Homolog of NCBI NO: 26453150 NR Description: unknown protein [Arabidopsis thaliana]
MVTQLKQRCTKGVGERVTAENVVDILQLARLCDAPDLCLKCMRFIHYKFKTVEQTEGWKFLQEHDPFLELDILQFIDDAESRKKRRRRHRREQNLYLQLSEAMECIEHICTEGCTLVGPSSNLDNKSTCQAKPGPCSAFSTCYGLQLLIRHFAVCKKRVDGKGCVRCKRMIQLLRLHSSICDQSESCRVPLCRQYKNRGEKDKKMVEDTKWKVLVRRVASAKAMSSLSQSKKKKSEVLFKEEAEDLIRIRNKLM

SEQ ID NO: 98628 - DNA, 3026 bp, Arabidopsis thaliana
  misc_feature (1)..(3026): Ceres Seq. ID no. 13601159
  misc_feature: MA Experiment ID: 20000169 Result: Down-regulated in Transcription
  misc_feature: MA Experiment 20000169 PARAMETER Experiment Name: At_100uM_ABA_P Parameter: Age (day) Value: 14
  misc_feature: MA Experiment 20000169 PARAMETER Experiment Name: At_100uM_ABA_P Parameter: Organism Value: A. thaliana
  misc_feature: MA Experiment 20000169 PARAMETER Experiment Name: At_100uM_ABA_P Parameter: Plant Line Value: WS
  misc_feature: MA Experiment 20000169 PARAMETER Experiment Name: At_100uM_ABA_P Parameter: Timepoint (hr) Value: 6
  misc_feature: MA Experiment 20000169 PARAMETER Experiment Name: At_100uM_ABA_P Parameter: Tissue Value: Aerial
  misc_feature: MA Experiment 20000169 PARAMETER Experiment Name: At_100uM_ABA_P Parameter: Treatment Value: 100uM ABA vs. No Treatment
  misc_feature: MA Experiment ID: 20000173 Result: Down-regulated in Transcription
  misc_feature: MA Experiment 20000173 PARAMETER Experiment Name: At_42deg_Heat_P Parameter: Age (day) Value: 14
  misc_feature: MA Experiment 20000173 PARAMETER Experiment Name: At_42deg_Heat_P Parameter: Organism Value: A. thaliana
  misc_feature: MA Experiment 20000173 PARAMETER Experiment Name: At_42deg_Heat_P Parameter: Plant Line Value: WS
  misc_feature: MA Experiment 20000173 PARAMETER Experiment Name: At_42deg_Heat_P Parameter: Temperature (deg C) Value: 42 vs. 22
  misc_feature: MA Experiment 20000173 PARAMETER Experiment Name: At_42deg_Heat_P Parameter: Timepoint (hr) Value: 6
  misc_feature: MA Experiment 20000173 PARAMETER Experiment Name: At_42deg_Heat_P Parameter: Tissue Value: Aerial
  misc_feature: MA Experiment ID: 20000182 Result: Down-regulated in Transcription
  misc_feature: MA Experiment 20000182 PARAMETER Experiment Name: At_2mM_SA_P Parameter: Age (day) Value: 14
  misc_feature: MA Experiment 20000182 PARAMETER Experiment Name: At_2mM_SA_P Parameter: Organism Value: A. thaliana
  misc_feature: MA Experiment 20000182 PARAMETER Experiment Name: At_2mM_SA_P Parameter: Plant Line Value: WS
  misc_feature: MA Experiment 20000182 PARAMETER Experiment Name: At_2mM_SA_P Parameter: Timepoint (hr) Value: 6
  misc_feature: MA Experiment 20000182 PARAMETER Experiment Name: At_2mM_SA_P Parameter: Tissue Value: Aerial
  misc_feature: MA Experiment 20000182 PARAMETER Experiment Name: At_2mM_SA_P Parameter: Treatment Value: 2mM SA vs. No Treatment
  misc_feature: MA Experiment ID: 20000184 Result: Down-regulated in Transcription
  misc_feature: MA Experiment 20000184 PARAMETER Experiment Name: At_Shoots__P Parameter: Age (day) Value: 7
  misc_feature: MA Experiment 20000184 PARAMETER Experiment Name: At_Shoots__P Parameter: Tissue Value: Shoots vs. Whole Plant
  misc_feature: MA Experiment ID: 20000185 Result: Down-regulated in Transcription
  misc_feature: MA Experiment 20000185 PARAMETER Experiment Name: At_Roots__P Parameter: Age (day) Value: 7 vs. 21
  misc_feature: MA Experiment 20000185 PARAMETER Experiment Name: At_Roots__P Parameter: Organism Value: A. thaliana
  misc_feature: MA Experiment 20000185 PARAMETER Experiment Name: At_Roots__P Parameter: Tissue Value: Roots vs. Whole Plant
  misc_feature: MA Experiment ID: 20000437 Result: Down-regulated in Transcription
  misc_feature: MA Experiment 20000437 PARAMETER Experiment Name: At_Drought_P Parameter: Age (day) Value: 8
  misc_feature: MA Experiment 20000437 PARAMETER Experiment Name: At_Drought_P Parameter: Organism Value: A. thaliana
  misc_feature: MA Experiment 20000437 PARAMETER Experiment Name: At_Drought_P Parameter: Plant Line Value: WS
  misc_feature: MA Experiment 20000437 PARAMETER Experiment Name: At_Drought_P Parameter: Timepoint (hr) Value: 24
  misc_feature: MA Experiment 20000437 PARAMETER Experiment Name: At_Drought_P Parameter: Tissue Value: Whole Plant
  misc_feature: MA Experiment 20000437 PARAMETER Experiment Name: At_Drought_P Parameter: Treatment Value: Drought vs. No Drought
  misc_feature: MA Experiment ID: 20000439 Result: Down-regulated in Transcription
  misc_feature: MA Experiment 20000439 PARAMETER Experiment Name: At_Roots__P Parameter: Age (day) Value: 14 vs. 21
  misc_feature: MA Experiment 20000439 PARAMETER Experiment Name: At_Roots__P Parameter: Organism Value: A. thaliana
  misc_feature: MA Experiment 20000439 PARAMETER Experiment Name: At_Roots__P Parameter: Tissue Value: Roots vs. Whole Plant
  misc_feature: MA Experiment ID: 20000794 Result: Down-regulated in Transcription
  misc_feature: MA Experiment 20000794 PARAMETER Experiment Name: At_Petals_P Parameter: Age (day) Value: 23-25 days
  misc_feature: MA Experiment 20000794 PARAMETER Experiment Name: At_Petals_P Parameter: Plant Line Value: WS
  misc_feature: MA Experiment 20000794 PARAMETER Experiment Name: At_Petals_P Parameter: Tissue Value: Petals vs. Whole plant
  misc_feature: MA Experiment ID: 20001247 Result: Down-regulated in Transcription
  misc_feature: MA Experiment 20001247 PARAMETER Experiment Name: At_Far-red-induction_P Parameter: Age (day) Value: 7
  misc_feature: MA Experiment 20001247 PARAMETER Experiment Name: At_Far-red-induction_P Parameter: Light Value: Far-red vs. White
  misc_feature: MA Experiment 20001247 PARAMETER Experiment Name: At_Far-red-induction_P Parameter: Organism Value: A. thaliana
  misc_feature: MA Experiment 20001247 PARAMETER Experiment Name: At_Far-red-induction_P Parameter: Plant Line Value: Columbia
  misc_feature: MA Experiment 20001247 PARAMETER Experiment Name: At_Far-red-induction_P Parameter: Timepoint (hr) Value: 1
  misc_feature: MA Experiment 20001247 PARAMETER Experiment Name: At_Far-red-induction_P Parameter: Tissue Value: Whole Plant
  misc_feature: MA Experiment ID: 20001556 Result: Up-regulated in Transcription
  misc_feature: MA Experiment 20001556 PARAMETER Experiment Name: At_Drought_Soil_Dry_P Parameter: Age (day) Value: 26
  misc_feature: MA Experiment 20001556 PARAMETER Experiment Name: At_Drought_Soil_Dry_P Parameter: Organism Value: A. thaliana
  misc_feature: MA Experiment 20001556 PARAMETER Experiment Name: At_Drought_Soil_Dry_P Parameter: Plant Line Value: WS
  misc_feature: MA Experiment 20001556 PARAMETER Experiment Name: At_Drought_Soil_Dry_P Parameter: Post Timepoint (hr) Value: None
  misc_feature: MA Experiment 20001556 PARAMETER Experiment Name: At_Drought_Soil_Dry_P Parameter: Post-Treatment Value: None
  misc_feature: MA Experiment 20001556 PARAMETER Experiment Name: At_Drought_Soil_Dry_P Parameter: Timepoint (day) Value: 12
  misc_feature: MA Experiment 20001556 PARAMETER Experiment Name: At_Drought_Soil_Dry_P Parameter: Treatment Value: Drought vs. No Drought
  misc_feature: MA Experiment ID: 20001558 Result: Up-regulated in Transcription
  misc_feature: MA Experiment 20001558 PARAMETER Experiment Name: At_Drought_Soil_Dry_P Parameter: Age (day) Value: 27
  misc_feature: MA Experiment 20001558 PARAMETER Experiment Name: At_Drought_Soil_Dry_P Parameter: Organism Value: A. thaliana
  misc_feature: MA Experiment 20001558 PARAMETER Experiment Name: At_Drought_Soil_Dry_P Parameter: Plant Line Value: WS
  misc_feature: MA Experiment 20001558 PARAMETER Experiment Name: At_Drought_Soil_Dry_P Parameter: Post Timepoint (hr) Value: 6
  misc_feature: MA Experiment 20001558 PARAMETER Experiment Name: At_Drought_Soil_Dry_P Parameter: Post-Treatment Value: Re-Water vs. No Drought
  misc_feature: MA Experiment 20001558 PARAMETER Experiment Name: At_Drought_Soil_Dry_P Parameter: Timepoint (day) Value: 13
  misc_feature: MA Experiment 20001558 PARAMETER Experiment Name: At_Drought_Soil_Dry_P Parameter: Treatment Value: Drought vs. No Drought
gaaagattgtttacagtcacagagatacttttctcactcatctctctctctctttcccgcttccctccttaaaccccaattcttctcctgctcacaaaaaccctatcttttgggttttgttatacagtgatgatgaaacctgcttctttgcaaggtttctcctcacatgcgtcctcctctatctactccgatgttcgcaggccagctactactccttcgaaaatggcagcttttagtgccctctcgctttgtccctatactttcaccttccgccaaagctctcgaattaagtctaccgtttcctgttccgtcacttctgctcctgcttctggtacatcttcatcctctaagacgccacgtagaagatcaggtcgactagaaggagttggaaaaagcatggaggattcggtgaaacgtaaaatggaacagttttatgaaggaaccgatggaccacctctccgtattcttcccataggaggccttggtgaaattggaatgaactgtatgcttgttggaaactatgatcgttacattctaatcgacgctggtataatgttccctgattatgatgagcctgggatccagaaaataatgccagacacaggatttatcagacgatggaaacacaaaattgaagctgttgttataacgcatggtcatgaagatcacattggtgcgttgccttgggttatcccagcattggaccctaatacaccaatattcgcatcatccttcaccatggagcttataaagaagcgcttgaaggagcatggaatcttcgttcaatctagacttaagacattcagcactcgaaggagatttatggctggaccatttgagatagagcccattacagttacccattctattcctgattgtagtggtttattcctccgttgcgctgatggtaatattcttcacactggtgattggaagattgatgaagcaccattggatggaaaagtctttgatcgtgaagctttagaagaactctcaaaggaaggagtcacattgatgatgagtgactcaacaaatgtgttgtcacctggaaggacaattagtgaaaaggtggtagcagatgctctggtaaggaatgtaatggcggccaagggaagagtaatcacaactcagtttgcctctaatatacaccgtttgggaagtataaaagctgctgctgatataactggtcgaaagttggtctttgttggcatgtcgttgcggacatacctagaggcagcttggagggatggaaaggctccaattgacccgtcaagtctgataaaagtcgaagacattgaagcatatgctcctaaggacttactgattgtcacaactggatcacaagcagaaccacgcgctgccctgaatcttgcatcatatgggagtagtcacgcattcaaacttacgaaggaagacataattctttactctgccaaggtaatcccaggcaatgaatcacgagtaatgaaaatgatgaatcggatagcagatatcgggccaaatattatcatgggtaagaatgaaatgctccacacatctggtcatgcctaccgtggagaattggaagaggtccttaaaatagtgaagccgcaacattttcttcccatacatggagaacttttgtttcttaaggagcatgagttgctcgggaagtctactgggattagacacactactgttataaagaacggagaaatgctaggagtttctcacctgagaaatagaagggttttgtctaatggatttagctctcttggcagggagaatttgcagttaatgtatagtgatggtgataaagcatttggcacatcaagcgaactatgcattgacgaacgacttagaatttcttctgatggcattatagttctgagcatggagatcatgcgtccaggggtctcagaaaacactttgaaaggaaaaataagaatcacaacgcggtgcatgtggcttgacaaaggaagacttttagatgcacttcacaaagcagctcatgctgctctatcaagttgtcctgtgacatgtcccttgtctcacatggaaagaacagtctccgaagtcctgaggaagattgtaaggaagtacagtggtaaaaggcctgaagtcatcgctatagccactgagaatccaatggctgtccgagctgatgaggtcagtgcgagactgtctggtgatccaagtgttggttctggagttgcagctttaaggaaagttgttgaaggaaatgacaaaagaagtcgggcgaagaaagcaccttcacaagaagcttcccccaaagaagtagatcgcactttggaagatgatatcattgatagtgcaagactactggctgaagaagaaactgcggcatcaacatacacggaagaagttgatacgcccgttgggagttcttcagaagagtcagacgatttttggaaatcattcatcaatccatcatcgtcaccttcaccgagtgaaacagaaaatatgaataaggtagctgatacggagcctaaagcagagggtaaggaaaacagcagagacgacgatgaattagctgatgcttcagattctgaaaccaagtcatcaccaaaacgtgtgaggaagaacaaatggaaaccggaggagataaagaaggtaatcagaatgcgaggagagctgcacagtagatttcaagtggtgaaaggtagaatggcattgtgggaagagatctcttcaaatctatcagctgaaggaatcaatcgaagcccgggacaatgcaaatctctctgggcatcacttattcagaaatacgaggagagcaaggctgatgagagaagcaagacgagttggccacattttgaggatatgaacaacattttgtcagagctaggcacacctgcgtcttaagtaatgtgatttagatgacattatcttcccaaaagaatcatctccagattttcttaaattgaacaaaaacagaaaagcattaattatattatgtatgtaaccagctgtaagatgatttttgtctgtagaactagaagctatcaacgcagaatccaaatccc

SEQ ID NO: 98629 - protein, 911 aa, Arabidopsis thaliana
  peptide (1)..(911): Ceres Seq. ID no. 13601160
  misc_feature (122)..(335): Pfam Name: Metallo-beta-lactamase superfamily Pfam Description: Metallo-beta-lactamase superfamily
  misc_feature (1)..(517): Homolog of NCBI NO: 15242755 NR Description: hydrolase family [Arabidopsis thaliana] gene_id:MLE2.5~similar to unknown protein~sp|P54122 [Arabidopsis
  misc_feature (582)..(911): Homolog of NCBI NO: 15242756 NR Description: expressed protein [Arabidopsis thaliana] gene_id:MLE2.6~pir||T01257~similar to unknown protein
  misc_feature (110)..(664): Homolog of NCBI NO: 18310757 NR Description: conserved hypothetical protein [Clostridium >gi|18145438|dbj|BAB81481.1| conserved hypothetical protein
  misc_feature (110)..(664): Homolog of NCBI NO: 23020398 NR Description: hypothetical protein [Clostridium thermocellum
  misc_feature (77)..(679): Homolog of NCBI NO: 25028419 NR Description: putative metallo-beta-lactamase superfamily
  misc_feature (105)..(664): Homolog of NCBI NO: 23000198 NR Description: hypothetical protein [Magnetococcus sp. MC-1]
  misc_feature (79)..(584): Homolog of NCBI NO: 19553174 NR Description: predicted hydrolase of the metallo-beta-lactamase [Corynebacterium glutamicum ATCC 13032] Hypothetical protein Cgl1970 >gi|11967652|emb|CAC19480.1|
  misc_feature (110)..(664): Homolog of NCBI NO: 15614961 NR Description: BH2398~unknown conserved protein [Bacillus
  misc_feature (110)..(664): Homolog of NCBI NO: 23055885 NR Description: hypothetical protein [Geobacter metallireducens]
  misc_feature (110)..(524): Homolog of NCBI NO: 23014037 NR Description: hypothetical protein [Magnetospirillum
MMKPASLQGFSSHASSSIYSDVRRPATTPSKMAAFSALSLCPYTFTFRQSSRIKSTVSCSVTSAPASGTSSSSKTPRRRSGRLEGVGKSMEDSVKRKMEQFYEGTDGPPLRILPIGGLGEIGMNCMLVGNYDRYILIDAGIMFPDYDEPGIQKIMPDTGFIRRWKHKIEAVVITHGHEDHIGALPWVIPALDPNTPIFASSFTMELIKKRLKEHGIFVQSRLKTFSTRRRFMAGPFEIEPITVTHSIPDCSGLFLRCADGNILHTGDWKIDEAPLDGKVFDREALEELSKEGVTLMMSDSTNVLSPGRTISEKVVADALVRNVMAAKGRVITTQFASNIHRLGSIKAAADITGRKLVFVGMSLRTYLEAAWRDGKAPIDPSSLIKVEDIEAYAPKDLLIVTTGSQAEPRAALNLASYGSSHAFKLTKEDIILYSAKVIPGNESRVMKMMNRIADIGPNIIMGKNEMLHTSGHAYRGELEEVLKIVKPQHFLPIHGELLFLKEHELLGKSTGIRHTTVIKNGEMLGVSHLRNRRVLSNGFSSLGRENLQLMYSDGDKAFGTSSELCIDERLRISSDGIIVLSMEIMRPGVSENTLKGKIRITTRCMWLDKGRLLDALHKAAHAALSSCPVTCPLSHMERTVSEVLRKIVRKYSGKRPEVIAIATENPMAVRADEVSARLSGDPSVGSGVAALRKVVEGNDKRSRAKKAPSQEASPKEVDRTLEDDIIDSARLLAEEETAASTYTEEVDTPVGSSSEESDDFWKSFINPSSSPSPSETENMNKVADTEPKAEGKENSRDDDELADASDSETKSSPKRVRKNKWKPEEIKKVIRMRGELHSRFQVVKGRMALWEEISSNLSAEGINRSPGQCKSLWASLIQKYEESKADERSKTSWPHFEDMNNILSELGTPAS

SEQ ID NO: 98630 - protein, 910 aa, Arabidopsis thaliana
  peptide (1)..(910): Ceres Seq. ID no. 13601161
  misc_feature (121)..(334): Pfam Name: Metallo-beta-lactamase superfamily Pfam Description: Metallo-beta-lactamase superfamily
  misc_feature (1)..(516): Homolog of NCBI NO: 15242755 NR Description: hydrolase family [Arabidopsis thaliana] gene_id:MLE2.5~similar to unknown protein~sp|P54122 [Arabidopsis
  misc_feature (581)..(910): Homolog of NCBI NO: 15242756 NR Description: expressed protein [Arabidopsis thaliana] gene_id:MLE2.6~pir||T01257~similar to unknown protein
  misc_feature (109)..(663): Homolog of NCBI NO: 18310757 NR Description: conserved hypothetical protein [Clostridium >gi|18145438|dbj|BAB81481.1| conserved hypothetical protein
  misc_feature (109)..(663): Homolog of NCBI NO: 23020398 NR Description: hypothetical protein [Clostridium thermocellum
  misc_feature (76)..(678): Homolog of NCBI NO: 25028419 NR Description: putative metallo-beta-lactamase superfamily
  misc_feature (104)..(663): Homolog of NCBI NO: 23000198 NR Description: hypothetical protein [Magnetococcus sp. MC-1]
  misc_feature (78)..(583): Homolog of NCBI NO: 19553174 NR Description: predicted hydrolase of the metallo-beta-lactamase [Corynebacterium glutamicum ATCC 13032] Hypothetical protein Cgl1970 >gi|11967652|emb|CAC19480.1|
  misc_feature (109)..(663): Homolog of NCBI NO: 15614961 NR Description: BH2398~unknown conserved protein [Bacillus
  misc_feature (109)..(663): Homolog of NCBI NO: 23055885 NR Description: hypothetical protein [Geobacter metallireducens]
  misc_feature (109)..(523): Homolog of NCBI NO: 23014037 NR Description: hypothetical protein [Magnetospirillum
MKPASLQGFSSHASSSIYSDVRRPATTPSKMAAFSALSLCPYTFTFRQSSRIKSTVSCSVTSAPASGTSSSSKTPRRRSGRLEGVGKSMEDSVKRKMEQFYEGTDGPPLRILPIGGLGEIGMNCMLVGNYDRYILIDAGIMFPDYDEPGIQKIMPDTGFIRRWKHKIEAVVITHGHEDHIGALPWVIPALDPNTPIFASSFTMELIKKRLKEHGIFVQSRLKTFSTRRRFMAGPFEIEPITVTHSIPDCSGLFLRCADGNILHTGDWKIDEAPLDGKVFDREALEELSKEGVTLMMSDSTNVLSPGRTISEKVVADALVRNVMAAKGRVITTQFASNIHRLGSIKAAADITGRKLVFVGMSLRTYLEAAWRDGKAPIDPSSLIKVEDIEAYAPKDLLIVTTGSQAEPRAALNLASYGSSHAFKLTKEDIILYSAKVIPGNESRVMKMMNRIADIGPNIIMGKNEMLHTSGHAYRGELEEVLKIVKPQHFLPIHGELLFLKEHELLGKSTGIRHTTVIKNGEMLGVSHLRNRRVLSNGFSSLGRENLQLMYSDGDKAFGTSSELCIDERLRISSDGIIVLSMEIMRPGVSENTLKGKIRITTRCMWLDKGRLLDALHKAAHAALSSCPVTCPLSHMERTVSEVLRKIVRKYSGKRPEVIAIATENPMAVRADEVSARLSGDPSVGSGVAALRKVVEGNDKRSRAKKAPSQEASPKEVDRTLEDDIIDSARLLAEEETAASTYTEEVDTPVGSSSEESDDFWKSFINPSSSPSPSETENMNKVADTEPKAEGKENSRDDDELADASDSETKSSPKRVRKNKWKPEEIKKVIRMRGELHSRFQVVKGRMALWEEISSNLSAEGINRSPGQCKSLWASLIQKYEESKADERSKTSWPHFEDMNNILSELGTPAS

SEQ ID NO: 98631 - protein, 880 aa, Arabidopsis thaliana
  peptide (1)..(880): Ceres Seq. ID no. 13601162
  misc_feature (91)..(304): Pfam Name: Metallo-beta-lactamase superfamily Pfam Description: Metallo-beta-lactamase superfamily
  misc_feature (1)..(486): Homolog of NCBI NO: 15242755 NR Description: hydrolase family [Arabidopsis thaliana] gene_id:MLE2.5~similar to unknown protein~sp|P54122 [Arabidopsis
  misc_feature (551)..(880): Homolog of NCBI NO: 15242756 NR Description: expressed protein [Arabidopsis thaliana] gene_id:MLE2.6~pir||T01257~similar to unknown protein
  misc_feature (79)..(633): Homolog of NCBI NO: 18310757 NR Description: conserved hypothetical protein [Clostridium >gi|18145438|dbj|BAB81481.1| conserved hypothetical protein
  misc_feature (79)..(633): Homolog of NCBI NO: 23020398 NR Description: hypothetical protein [Clostridium thermocellum
  misc_feature (46)..(648): Homolog of NCBI NO: 25028419 NR Description: putative metallo-beta-lactamase superfamily
  misc_feature (74)..(633): Homolog of NCBI NO: 23000198 NR Description: hypothetical protein [Magnetococcus sp. MC-1]
  misc_feature (48)..(553): Homolog of NCBI NO: 19553174 NR Description: predicted hydrolase of the metallo-beta-lactamase [Corynebacterium glutamicum ATCC 13032] Hypothetical protein Cgl1970 >gi|11967652|emb|CAC19480.1|
  misc_feature (79)..(633): Homolog of NCBI NO: 15614961 NR Description: BH2398~unknown conserved protein [Bacillus
  misc_feature (79)..(633): Homolog of NCBI NO: 23055885 NR Description: hypothetical protein [Geobacter metallireducens]
  misc_feature (79)..(493): Homolog of NCBI NO: 23014037 NR Description: hypothetical protein [Magnetospirillum
MAAFSALSLCPYTFTFRQSSRIKSTVSCSVTSAPASGTSSSSKTPRRRSGRLEGVGKSMEDSVKRKMEQFYEGTDGPPLRILPIGGLGEIGMNCMLVGNYDRYILIDAGIMFPDYDEPGIQKIMPDTGFIRRWKHKIEAVVITHGHEDHIGALPWVIPALDPNTPIFASSFTMELIKKRLKEHGIFVQSRLKTFSTRRRFMAGPFEIEPITVTHSIPDCSGLFLRCADGNILHTGDWKIDEAPLDGKVFDREALEELSKEGVTLMMSDSTNVLSPGRTISEKVVADALVRNVMAAKGRVITTQFASNIHRLGSIKAAADITGRKLVFVGMSLRTYLEAAWRDGKAPIDPSSLIKVEDIEAYAPKDLLIVTTGSQAEPRAALNLASYGSSHAFKLTKEDIILYSAKVIPGNESRVMKMMNRIADIGPNIIMGKNEMLHTSGHAYRGELEEVLKIVKPQHFLPIHGELLFLKEHELLGKSTGIRHTTVIKNGEMLGVSHLRNRRVLSNGFSSLGRENLQLMYSDGDKAFGTSSELCIDERLRISSDGIIVLSMEIMRPGVSENTLKGKIRITTRCMWLDKGRLLDALHKAAHAALSSCPVTCPLSHMERTVSEVLRKIVRKYSGKRPEVIAIATENPMAVRADEVSARLSGDPSVGSGVAALRKVVEGNDKRSRAKKAPSQEASPKEVDRTLEDDIIDSARLLAEEETAASTYTEEVDTPVGSSSEESDDFWKSFINPSSSPSPSETENMNKVADTEPKAEGKENSRDDDELADASDSETKSSPKRVRKNKWKPEEIKKVIRMRGELHSRFQVVKGRMALWEEISSNLSAEGINRSPGQCKSLWASLIQKYEESKADERSKTSWPHFEDMNNILSELGTPAS

SEQ ID NO: 98632 - DNA, 1623 bp, Arabidopsis thaliana
  misc_feature (1)..(1623): Ceres Seq. ID no. 13601163
  misc_feature: MA Experiment ID: 108434 Result: Down-regulated in Transcription
  misc_feature: MA Experiment 108434 PARAMETER Experiment Name: At_Root_Tips_cDNA_P Parameter: Tissue Value: Root Tips
  misc_feature: MA Experiment ID: 108461 Result: Up-regulated in Transcription
  misc_feature: MA Experiment 108461 PARAMETER Experiment Name: At_Germinating_Seeds_cDNA_P Parameter: Age (day) Value: 1 vs. 0
  misc_feature: MA Experiment 108461 PARAMETER Experiment Name: At_Germinating_Seeds_cDNA_P Parameter: Tissue Value: Germinating Seeds
  misc_feature: MA Experiment ID: 108462 Result: Up-regulated in Transcription
  misc_feature: MA Experiment 108462 PARAMETER Experiment Name: At_Germinating_Seeds_cDNA_P Parameter: Age (day) Value: 2 vs. 0
  misc_feature: MA Experiment 108462 PARAMETER Experiment Name: At_Germinating_Seeds_cDNA_P Parameter: Tissue Value: Germinating Seeds
  misc_feature: MA Experiment ID: 108463 Result: Up-regulated in Transcription
  misc_feature: MA Experiment 108463 PARAMETER Experiment Name: At_Germinating_Seeds_cDNA_P Parameter: Age (day) Value: 3 vs. 0
  misc_feature: MA Experiment 108463 PARAMETER Experiment Name: At_Germinating_Seeds_cDNA_P Parameter: Tissue Value: Germinating Seeds
  misc_feature: MA Experiment ID: 108464 Result: Up-regulated in Transcription
  misc_feature: MA Experiment 108464 PARAMETER Experiment Name: At_Germinating_Seeds_cDNA_P Parameter: Age (day) Value: 4 vs. 0
  misc_feature: MA Experiment 108464 PARAMETER Experiment Name: At_Germinating_Seeds_cDNA_P Parameter: Tissue Value: Germinating Seeds
  misc_feature: MA Experiment ID: 108576 Result: Up-regulated in Transcription
  misc_feature: MA Experiment 108576 PARAMETER Experiment Name: At_42deg_Heat_cDNA_P Parameter: Temperature (deg C) Value: 42 vs. 22
  misc_feature: MA Experiment 108576 PARAMETER Experiment Name: At_42deg_Heat_cDNA_P Parameter: Timepoint (hr) Value: 1
  misc_feature: MA Experiment 108576 PARAMETER Experiment Name: At_42deg_Heat_cDNA_P Parameter: Tissue Value: Aerial
  misc_feature: MA Experiment ID: 20000087 Result: Up-regulated in Transcription
  misc_feature: MA Experiment 20000087 PARAMETER Experiment Name: At_100uM_ABA_Mutants_cDNA_P Parameter: Plant Line Value: WS
  misc_feature: MA Experiment 20000087 PARAMETER Experiment Name: At_100uM_ABA_Mutants_cDNA_P Parameter: Timepoint (hr) Value: 6
  misc_feature: MA Experiment 20000087 PARAMETER Experiment Name: At_100uM_ABA_Mutants_cDNA_P Parameter: Tissue Value: Aerial
  misc_feature: MA Experiment 20000087 PARAMETER Experiment Name: At_100uM_ABA_Mutants_cDNA_P Parameter: Treatment Value: 100uM ABA vs. No Treatment
  misc_feature: MA Experiment ID: 20000211 Result: Up-regulated in Transcription
  misc_feature: MA Experiment 20000211 PARAMETER Experiment Name: At_0.001percent_MeJA__P Parameter: Age (day) Value: 14
  misc_feature: MA Experiment 20000211 PARAMETER Experiment Name: At_0.001percent_MeJA__P Parameter: Organism Value: A. thaliana
  misc_feature: MA Experiment 20000211 PARAMETER Experiment Name: At_0.001percent_MeJA__P Parameter: Plant Line Value: WS
  misc_feature: MA Experiment 20000211 PARAMETER Experiment Name: At_0.001percent_MeJA__P Parameter: Timepoint (hr) Value: 1
  misc_feature: MA Experiment 20000211 PARAMETER Experiment Name: At_0.001percent_MeJA__P Parameter: Tissue Value: Aerial
  misc_feature: MA Experiment 20000211 PARAMETER Experiment Name: At_0.001percent_MeJA__P Parameter: Treatment Value: 0.001percent MeJA vs. No Treatment
  misc_feature: MA Experiment ID: 20000224 Result: Up-regulated in Transcription
  misc_feature: MA Experiment ID: 20000234 Result: Down-regulated in Transcription
  misc_feature: MA Experiment 20000234 PARAMETER Experiment Name: At_Siliques_P Parameter: Age (day) Value: 21
  misc_feature: MA Experiment 20000234 PARAMETER Experiment Name: At_Siliques_P Parameter: Organism Value: A. thaliana
  misc_feature: MA Experiment 20000234 PARAMETER Experiment Name: At_Siliques_P Parameter: Plant Line Value: WS
  misc_feature: MA Experiment 20000234 PARAMETER Experiment Name: At_Siliques_P Parameter: Tissue Value: Less Than 5mm Siliques vs. Whole Plant
  misc_feature: MA Experiment ID: 20000235 Result: Down-regulated in Transcription
  misc_feature: MA Experiment 20000235 PARAMETER Experiment Name: At_Siliques_P Parameter: Age (day) Value: 21
  misc_feature: MA Experiment 20000235 PARAMETER Experiment Name: At_Siliques_P Parameter: Organism Value: A. thaliana
  misc_feature: MA Experiment 20000235 PARAMETER Experiment Name: At_Siliques_P Parameter: Plant Line Value: WS
  misc_feature: MA Experiment 20000235 PARAMETER Experiment Name: At_Siliques_P Parameter: Tissue Value: 5-10mm Siliques vs. Whole Plant
  misc_feature: MA Experiment ID: 20000265 Result: Down-regulated in Transcription
  misc_feature: MA Experiment 20000265 PARAMETER Experiment Name: At_Open_Flower_P Parameter: Age (day) Value: 21
  misc_feature: MA Experiment 20000265 PARAMETER Experiment Name: At_Open_Flower_P Parameter: Plant Line Value: WS
  misc_feature: MA Experiment 20000265 PARAMETER Experiment Name: At_Open_Flower_P Parameter: Tissue Value: Closed Flower vs. Whole Plant
  misc_feature: MA Experiment ID: 20000495 Result: Down-regulated in Transcription
  misc_feature: MA Experiment 20000495 PARAMETER Experiment Name: At_Guard_Cells_P Parameter: Harvest Date Value: 8/2/2002
  misc_feature: MA Experiment 20000495 PARAMETER Experiment Name: At_Guard_Cells_P Parameter: Organism Value: A. thaliana
  misc_feature: MA Experiment 20000495 PARAMETER Experiment Name: At_Guard_Cells_P Parameter: Tissue Value: Guard Cells vs. Leaves
  misc_feature: MA Experiment ID: 20000496 Result: Down-regulated in Transcription
  misc_feature: MA Experiment 20000496 PARAMETER Experiment Name: At_Guard_Cells_P Parameter: Harvest Date Value: 7/19/2002
  misc_feature: MA Experiment 20000496 PARAMETER Experiment Name: At_Guard_Cells_P Parameter: Organism Value: Canola
  misc_feature: MA Experiment 20000496 PARAMETER Experiment Name: At_Guard_Cells_P Parameter: Tissue Value: Guard Cells vs. Leaves
  misc_feature: MA Experiment ID: 20001761 Result: Down-regulated in Transcription
  misc_feature: MA Experiment 20001761 PARAMETER Experiment Name: At_50mM_NH4NO3_L-to-H_P Parameter: Timepoint (hr) Value: 4
  misc_feature: MA Experiment 20001761 PARAMETER Experiment Name: At_50mM_NH4NO3_L-to-H_P Parameter: Tissue Value: Siliques
  misc_feature: MA Experiment 20001761 PARAMETER Experiment Name: At_50mM_NH4NO3_L-to-H_P Parameter: Treatment Value: 50mM NH4NO3 vs 100mM Mannitol
acaaatcaaaacaacataattaacttacccaaacaagaaacccaagaatccaaaatggaaatgctcaacgcaataattctcatcctatttccaatcatagggtttgtattaatcttctcattcccaacaaaaaccctaaaagccaaaaccgcatcaccctctaatccgacatcgtaccaactcatcggctctattctctccttcaacaaaaaccgccaccgtcttctccaatggtacacagatctcctccgtctctctccgtctcaaaccatcaccgtcgatctcctcttcggtcgtcggactatcatcactgcaaaccctgaaaacgttgagcacattctcaaaacaaatttttataacttccctaaaggcaaacctttcaccgacctcctaggagatctactcggcggcggaatctttaattctgacggcgagttatggagctcacagcgtaaactcgcgagccacgagtttacaatgcgttctcttagggaattcactttcgaaatcctccgtgaagaagtccaaaaccgcctcattccggtgctttcctccgccgtggactgtggagagacggttgattttcaggaggttttgaagcgctttgctttcgatgttgtatgcaaagtgtcgttgggttgggatccggattgtttggatttgacccgacccgttccagaacttgttaaggcttttgatgtagcggcggagatcagcgctcgccgcgccacggagccggtttacgccgtgtggaaagtaaagcgtttcttgaacgtagggagcgagaagaggttgagagaagccatcaagaccgtacacttgtctgtgtctgagatcatccgggccaaaaagaaaagcctcgatatcggtggtgacgtgtcggacaagcaggacctgctgtcgaggtttctcgccgctggccacggggaagaagccgtgagggatagtgtaatcagctttattatggcgggaagggatacaacgtcggcagcgatgacgtggctgttttggttgttgagtcaaaatgatgacgtggagacgaagatactcgacgaattgagaaacaaagggtctttagggttagggtttgaggatttgagagagatgagttacacaaaagcttgtctgtgtgaagcaatgaggctttacccaccagtggcttgggactcaaagcatgcagcaaacgacgacattttgccagatggaacacctctcaaaaagggagacaaagtcacttatttcccttacggtatgggaaggatggagaaggtgtggggtaaagattgggacgagtttaaaccaaaccggtggtttgaggaagaaccgagttacggtacaaaaccggttttgaaaagtgtgagttcgttcaagtttccggttttccaagccggaccaagggtttgcataggtaaagaaatggcttttacacaaatgaaatacgtggttggttcagttttgagtcggtttaagattataccggtttgcaataaccggccggtctttgttcctcttctaaccgctcacatggctggtgggctaaaggtgaagatcaagaggagagagcaatgtgattcgatgtatatttaattaattgattaatcaagtcatgtccttgtagaatat

SEQ ID NO: 98633 - protein, 528 aa, Arabidopsis thaliana
  peptide (1)..(528): Ceres Seq. ID no. 13601164
  misc_feature (19)..(528): Homolog of NCBI NO: 15242759 NR Description: cytochrome P450, putative [Arabidopsis thaliana]
  misc_feature (19)..(528): Homolog of NCBI NO: 26452145 NR Description: putative cytochrome P450 [Arabidopsis thaliana]
  misc_feature (21)..(528): Homolog of NCBI NO: 21536522 NR Description: cytochrome P450-like protein [Arabidopsis
  misc_feature (27)..(520): Homolog of NCBI NO: 15228396 NR Description: cytochrome P450 family [Arabidopsis thaliana]
  misc_feature (54)..(521): Homolog of NCBI NO: 18395978 NR Description: cytochrome P450 family [Arabidopsis thaliana] putative cytochrome P450 [Arabidopsis thaliana]
  misc_feature (22)..(521): Homolog of NCBI NO: 17366212 NR Description: Cytochrome P450 94A1 (P450-dependent fatty acid
  misc_feature (19)..(520): Homolog of NCBI NO: 18000072 NR Description: cytochrome P450-dependent fatty acid hydroxylase
  misc_feature (24)..(520): Homolog of NCBI NO: 18000066 NR Description: cytochrome P450-dependent fatty acid hydroxylase
  misc_feature (19)..(524): Homolog of NCBI NO: 18000068 NR Description: cytochrome P450-dependent fatty acid hydroxylase
  misc_feature (19)..(520): Homolog of NCBI NO: 17366433 NR Description: Cytochrome P450 94A2 (P450-dependent fatty acid
TNQNNIINLPKQETQESKMEMLNAIILILFPIIGFVLIFSFPTKTLKAKTASPSNPTSYQLIGSILSFNKNRHRLLQWYTDLLRLSPSQTITVDLLFGRRTIITANPENVEHILKTNFYNFPKGKPFTDLLGDLLGGGIFNSDGELWSSQRKLASHEFTMRSLREFTFEILREEVQNRLIPVLSSAVDCGETVDFQEVLKRFAFDVVCKVSLGWDPDCLDLTRPVPELVKAFDVAAEISARRATEPVYAVWKVKRFLNVGSEKRLREAIKTVHLSVSEIIRAKKKSLDIGGDVSDKQDLLSRFLAAGHGEEAVRDSVISFIMAGRDTTSAAMTWLFWLLSQNDDVETKILDELRNKGSLGLGFEDLREMSYTKACLCEAMRLYPPVAWDSKHAANDDILPDGTPLKKGDKVTYFPYGMGRMEKVWGKDWDEFKPNRWFEEEPSYGTKPVLKSVSSFKFPVFQAGPRVCIGKEMAFTQMKYVVGSVLSRFKIIPVCNNRPVFVPLLTAHMAGGLKVKIKRREQCDSMYI

SEQ ID NO: 98634 - protein, 510 aa, Arabidopsis thaliana
  peptide (1)..(510): Ceres Seq. ID no. 13601165
  misc_feature (1)..(510): Homolog of NCBI NO: 15242759 NR Description: cytochrome P450, putative [Arabidopsis thaliana]
  misc_feature (1)..(510): Homolog of NCBI NO: 26452145 NR Description: putative cytochrome P450 [Arabidopsis thaliana]
  misc_feature (3)..(510): Homolog of NCBI NO: 21536522 NR Description: cytochrome P450-like protein [Arabidopsis
  misc_feature (9)..(502): Homolog of NCBI NO: 15228396 NR Description: cytochrome P450 family [Arabidopsis thaliana]
  misc_feature (36)..(503): Homolog of NCBI NO: 18395978 NR Description: cytochrome P450 family [Arabidopsis thaliana] putative cytochrome P450 [Arabidopsis thaliana]
  misc_feature (4)..(503): Homolog of NCBI NO: 17366212 NR Description: Cytochrome P450 94A1 (P450-dependent fatty acid
  misc_feature (1)..(502): Homolog of NCBI NO: 18000072 NR Description: cytochrome P450-dependent fatty acid hydroxylase
  misc_feature (6)..(502): Homolog of NCBI NO: 18000066 NR Description: cytochrome P450-dependent fatty acid hydroxylase
  misc_feature (1)..(506): Homolog of NCBI NO: 18000068 NR Description: cytochrome P450-dependent fatty acid hydroxylase
  misc_feature (1)..(502): Homolog of NCBI NO: 17366433 NR Description: Cytochrome P450 94A2 (P450-dependent fatty acid
MEMLNAIILILFPIIGFVLIFSFPTKTLKAKTASPSNPTSYQLIGSILSFNKNRHRLLQWYTDLLRLSPSQTITVDLLFGRRTIITANPENVEHILKTNFYNFPKGKPFTDLLGDLLGGGIFNSDGELWSSQRKLASHEFTMRSLREFTFEILREEVQNRLIPVLSSAVDCGETVDFQEVLKRFAFDVVCKVSLGWDPDCLDLTRPVPELVKAFDVAAEISARRATEPVYAVWKVKRFLNVGSEKRLREAIKTVHLSVSEIIRAKKKSLDIGGDVSDKQDLLSRFLAAGHGEEAVRDSVISFIMAGRDTTSAAMTWLFWLLSQNDDVETKILDELRNKGSLGLGFEDLREMSYTKACLCEAMRLYPPVAWDSKHAANDDILPDGTPLKKGDKVTYFPYGMGRMEKVWGKDWDEFKPNRWFEEEPSYGTKPVLKSVSSFKFPVFQAGPRVCIGKEMAFTQMKYVVGSVLSRFKIIPVCNNRPVFVPLLTAHMAGGLKVKIKRREQCDSMYI

SEQ ID NO: 98635 - protein, 508 aa, Arabidopsis thaliana
  peptide (1)..(508): Ceres Seq. ID no. 13601166
  misc_feature (1)..(508): Homolog of NCBI NO: 15242759 NR Description: cytochrome P450, putative [Arabidopsis thaliana]
  misc_feature (1)..(508): Homolog of NCBI NO: 26452145 NR Description: putative cytochrome P450 [Arabidopsis thaliana]
  misc_feature (1)..(508): Homolog of NCBI NO: 21536522 NR Description: cytochrome P450-like protein [Arabidopsis
  misc_feature (7)..(500): Homolog of NCBI NO: 15228396 NR Description: cytochrome P450 family [Arabidopsis thaliana]
  misc_feature (34)..(501): Homolog of NCBI NO: 18395978 NR Description: cytochrome P450 family [Arabidopsis thaliana] putative cytochrome P450 [Arabidopsis thaliana]
  misc_feature (2)..(501): Homolog of NCBI NO: 17366212 NR Description: Cytochrome P450 94A1 (P450-dependent fatty acid
  misc_feature (1)..(500): Homolog of NCBI NO: 18000072 NR Description: cytochrome P450-dependent fatty acid hydroxylase
  misc_feature (4)..(500): Homolog of NCBI NO: 18000066 NR Description: cytochrome P450-dependent fatty acid hydroxylase
  misc_feature (1)..(504): Homolog of NCBI NO: 18000068 NR Description: cytochrome P450-dependent fatty acid hydroxylase
  misc_feature (1)..(500): Homolog of NCBI NO: 17366433 NR Description: Cytochrome P450 94A2 (P450-dependent fatty acid
MLNAIILILFPIIGFVLIFSFPTKTLKAKTASPSNPTSYQLIGSILSFNKNRHRLLQWYTDLLRLSPSQTITVDLLFGRRTIITANPENVEHILKTNFYNFPKGKPFTDLLGDLLGGGIFNSDGELWSSQRKLASHEFTMRSLREFTFEILREEVQNRLIPVLSSAVDCGETVDFQEVLKRFAFDVVCKVSLGWDPDCLDLTRPVPELVKAFDVAAEISARRATEPVYAVWKVKRFLNVGSEKRLREAIKTVHLSVSEIIRAKKKSLDIGGDVSDKQDLLSRFLAAGHGEEAVRDSVISFIMAGRDTTSAAMTWLFWLLSQNDDVETKILDELRNKGSLGLGFEDLREMSYTKACLCEAMRLYPPVAWDSKHAANDDILPDGTPLKKGDKVTYFPYGMGRMEKVWGKDWDEFKPNRWFEEEPSYGTKPVLKSVSSFKFPVFQAGPRVCIGKEMAFTQMKYVVGSVLSRFKIIPVCNNRPVFVPLLTAHMAGGLKVKIKRREQCDSMYI

SEQ ID NO: 98636 - DNA, 1041 bp, Arabidopsis thaliana
  misc_feature (1)..(1041): Ceres Seq. ID no. 13601171
  misc_feature: MA Experiment ID: 108434 Result: Up-regulated in Transcription
  misc_feature: MA Experiment 108434 PARAMETER Experiment Name: At_Root_Tips_cDNA_P Parameter: Tissue Value: Root Tips
  misc_feature: MA Experiment ID: 108461 Result: Up-regulated in Transcription
  misc_feature: MA Experiment 108461 PARAMETER Experiment Name: At_Germinating_Seeds_cDNA_P Parameter: Age (day) Value: 1 vs. 0
  misc_feature: MA Experiment 108461 PARAMETER Experiment Name: At_Germinating_Seeds_cDNA_P Parameter: Tissue Value: Germinating Seeds
  misc_feature: MA Experiment ID: 20000180 Result: Up-regulated in Transcription
  misc_feature: MA Experiment 20000180 PARAMETER Experiment Name: At_Germinating_Seeds_P Parameter: Age (hr) Value: 24 vs. 0
  misc_feature: MA Experiment 20000180 PARAMETER Experiment Name: At_Germinating_Seeds_P Parameter: Tissue Value: Germinating Seeds
  misc_feature: MA Experiment ID: 20000184 Result: Up-regulated in Transcription
  misc_feature: MA Experiment 20000184 PARAMETER Experiment Name: At_Shoots__P Parameter: Age (day) Value: 7
  misc_feature: MA Experiment 20000184 PARAMETER Experiment Name: At_Shoots__P Parameter: Tissue Value: Shoots vs. Whole Plant
  misc_feature: MA Experiment ID: 20000185 Result: Up-regulated in Transcription
  misc_feature: MA Experiment 20000185 PARAMETER Experiment Name: At_Roots__P Parameter: Age (day) Value: 7 vs. 21
  misc_feature: MA Experiment 20000185 PARAMETER Experiment Name: At_Roots__P Parameter: Organism Value: A. thaliana
  misc_feature: MA Experiment 20000185 PARAMETER Experiment Name: At_Roots__P Parameter: Tissue Value: Roots vs. Whole Plant
actctctctcttttcctctttgcaaatccttgaagaaatccaaaatccatagcaatggcgacttcgatagctcgattgtctcggagaggagtcacttctaacctgatccgtcgttgcttcgctgcggaagcggcgttggcgaggaagacagagttacctaaaccgcaattcacggtgtcgccgtcgacggatcgtgtgaaatgggactacagaggccaacgacagatcattcctttgggacagtggcttccgaaggtagccgttgatgcttacgtggcacccaacgttgtgctggctggtcaggtcacagtctgggacggctcgtctgtttggaacggtgccgttttgcgcggcgatctcaacaaaatcactgttggattctgctcgaatgtacaggaacggtgtgttgttcatgccgcctggtcttccccaacaggattaccagcagcgacaataatcgacaggtatgtgacagtaggtgcctacagtcttctgagatcatgtaccatcgaaccagagtgcatcatcggtcaacactcaatactaatggaaggctcactggttgagacccggtcaatcttggaagcgggttcagttgtgccgccaggaagaaggatcccatcaggtgaactatggggaggcaatccagcaagattcattagaaccctaaccaacgaagaaaccctagagatcccaaaactcgctgtagccatcaaccacttaagcggagattacttctctgagttcctaccttactcaactgtctacttagaggtagagaagttcaagaagtcccttgggatcgccgtttagaagcttcatctttttcgtgattcactttcatgtgtttatctatcatatgaggtctttctctctgcatattgcaataagtagctgatgaacatcaaaacaagtccggctctcttttttggttctaaaacgtttgtcatttcgttttttgggttctttgtaaaattccatttaaaactgattttggctgaatattgtctgaatgataatggcgacgacttctggttttgt

SEQ ID NO: 98637 - protein, 252 aa, Arabidopsis thaliana
  peptide (1)..(252): Ceres Seq. ID no. 13601172
  misc_feature (1)..(252): Homolog of NCBI NO: 15242792 NR Description: transferase hexapeptide repeat family thaliana] >gi|25091501|sp|Q9FMV1|UMP7_ARATH Unknown mitochondrial At5g63510 >gi|9758292|dbj|BAB08816.1| contains similarity to
  misc_feature (1)..(252): Homolog of NCBI NO: 15451014 NR Description: Unknown protein [Arabidopsis thaliana]
  misc_feature (1)..(252): Homolog of NCBI NO: 21592733 NR Description: unknown [Arabidopsis thaliana]
  misc_feature (1)..(252): Homolog of NCBI NO: 15228424 NR Description: transferase hexapeptide repeat family thaliana] >gi|25091504|sp|Q9SMN1|UMP8_ARATH Unknown mitochondrial
  misc_feature (66)..(252): Homolog of NCBI NO: 21537242 NR Description: unknown [Arabidopsis thaliana]
  misc_feature (66)..(252): Homolog of NCBI NO: 8778427 NR Description: F18O14.34 [Arabidopsis thaliana]
  misc_feature (66)..(252): Homolog of NCBI NO: 18394761 NR Description: transferase hexapeptide repeat family
  misc_feature (66)..(248): Homolog of NCBI NO: 10177532 NR Description: ferripyochelin-binding protein-like [Arabidopsis
  misc_feature (66)..(248): Homolog of NCBI NO: 18425082 NR Description: transferase hexapeptide repeat family
  misc_feature (66)..(243): Homolog of NCBI NO: 15220153 NR Description: transferase hexapeptide repeat family
MATSIARLSRRGVTSNLIRRCFAAEAALARKTELPKPQFTVSPSTDRVKWDYRGQRQIIPLGQWLPKVAVDAYVAPNVVLAGQVTVWDGSSVWNGAVLRGDLNKITVGFCSNVQERCVVHAAWSSPTGLPAATIIDRYVTVGAYSLLRSCTIEPECIIGQHSILMEGSLVETRSILEAGSVVPPGRRIPSGELWGGNPARFIRTLTNEETLEIPKLAVAINHLSGDYFSEFLPYSTVYLEVEKFKKSLGIAV

SEQ ID NO: 98638 - DNA, 1199 bp, Arabidopsis thaliana
  misc_feature (1)..(1199): Ceres Seq. ID no. 13601185
  misc_feature: MA Experiment ID: 20000179 Result: Up-regulated in Transcription
  misc_feature: MA Experiment 20000179 PARAMETER Experiment Name: At_Germinating_Seeds_P Parameter: Age (hr) Value: 6 vs. 0
  misc_feature: MA Experiment 20000179 PARAMETER Experiment Name: At_Germinating_Seeds_P Parameter: Tissue Value: Germinating Seeds
  misc_feature: MA Experiment ID: 20000180 Result: Up-regulated in Transcription
  misc_feature: MA Experiment 20000180 PARAMETER Experiment Name: At_Germinating_Seeds_P Parameter: Age (hr) Value: 24 vs. 0
  misc_feature: MA Experiment 20000180 PARAMETER Experiment Name: At_Germinating_Seeds_P Parameter: Tissue Value: Germinating Seeds
  misc_feature: MA Experiment ID: 20000184 Result: Up-regulated in Transcription
  misc_feature: MA Experiment 20000184 PARAMETER Experiment Name: At_Shoots__P Parameter: Age (day) Value: 7
  misc_feature: MA Experiment 20000184 PARAMETER Experiment Name: At_Shoots__P Parameter: Tissue Value: Shoots vs. Whole Plant
  misc_feature: MA Experiment ID: 20000264 Result: Down-regulated in Transcription
  misc_feature: MA Experiment 20000264 PARAMETER Experiment Name: At_Open_Flower_P Parameter: Age (day) Value: 21
  misc_feature: MA Experiment 20000264 PARAMETER Experiment Name: At_Open_Flower_P Parameter: Plant Line Value: WS
  misc_feature: MA Experiment 20000264 PARAMETER Experiment Name: At_Open_Flower_P Parameter: Tissue Value: Open Flower vs. Whole Plant
  misc_feature: MA Experiment ID: 20000265 Result: Down-regulated in Transcription
  misc_feature: MA Experiment 20000265 PARAMETER Experiment Name: At_Open_Flower_P Parameter: Age (day) Value: 21
  misc_feature: MA Experiment 20000265 PARAMETER Experiment Name: At_Open_Flower_P Parameter: Plant Line Value: WS
  misc_feature: MA Experiment 20000265 PARAMETER Experiment Name: At_Open_Flower_P Parameter: Tissue Value: Closed Flower vs. Whole Plant
  misc_feature: MA Experiment ID: 20000286 Result: Down-regulated in Transcription
  misc_feature: MA Experiment 20000286 PARAMETER Experiment Name: At_Open_Flower_P Parameter: Age (day) Value: 21
  misc_feature: MA Experiment 20000286 PARAMETER Experiment Name: At_Open_Flower_P Parameter: Plant Line Value: WS
  misc_feature: MA Experiment 20000286 PARAMETER Experiment Name: At_Open_Flower_P Parameter: Tissue Value: Half Open vs. Whole Plant
  misc_feature: MA Experiment ID: 20000437 Result: Down-regulated in Transcription
  misc_feature: MA Experiment 20000437 PARAMETER Experiment Name: At_Drought_P Parameter: Age (day) Value: 8
  misc_feature: MA Experiment 20000437 PARAMETER Experiment Name: At_Drought_P Parameter: Organism Value: A. thaliana
  misc_feature: MA Experiment 20000437 PARAMETER Experiment Name: At_Drought_P Parameter: Plant Line Value: WS
  misc_feature: MA Experiment 20000437 PARAMETER Experiment Name: At_Drought_P Parameter: Timepoint (hr) Value: 24
  misc_feature: MA Experiment 20000437 PARAMETER Experiment Name: At_Drought_P Parameter: Tissue Value: Whole Plant
  misc_feature: MA Experiment 20000437 PARAMETER Experiment Name: At_Drought_P Parameter: Treatment Value: Drought vs. No Drought
  misc_feature: MA Experiment ID: 20000794 Result: Down-regulated in Transcription
  misc_feature: MA Experiment 20000794 PARAMETER Experiment Name: At_Petals_P Parameter: Age (day) Value: 23-25 days
  misc_feature: MA Experiment 20000794 PARAMETER Experiment Name: At_Petals_P Parameter: Plant Line Value: WS
  misc_feature: MA Experiment 20000794 PARAMETER Experiment Name: At_Petals_P Parameter: Tissue Value: Petals vs. Whole plant
  misc_feature: MA Experiment ID: 20001555 Result: Down-regulated in Transcription
  misc_feature: MA Experiment 20001555 PARAMETER Experiment Name: At_Drought_Soil_Dry_P Parameter: Age (day) Value: 24
  misc_feature: MA Experiment 20001555 PARAMETER Experiment Name: At_Drought_Soil_Dry_P Parameter: Organism Value: A. thaliana
  misc_feature: MA Experiment 20001555 PARAMETER Experiment Name: At_Drought_Soil_Dry_P Parameter: Plant Line Value: WS
  misc_feature: MA Experiment 20001555 PARAMETER Experiment Name: At_Drought_Soil_Dry_P Parameter: Post Timepoint (hr) Value: None
  misc_feature: MA Experiment 20001555 PARAMETER Experiment Name: At_Drought_Soil_Dry_P Parameter: Post-Treatment Value: None
  misc_feature: MA Experiment 20001555 PARAMETER Experiment Name: At_Drought_Soil_Dry_P Parameter: Timepoint (day) Value: 10
  misc_feature: MA Experiment 20001555 PARAMETER Experiment Name: At_Drought_Soil_Dry_P Parameter: Treatment Value: Drought vs. No Drought
  misc_feature: MA Experiment ID: 20001556 Result: Down-regulated in Transcription
  misc_feature: MA Experiment 20001556 PARAMETER Experiment Name: At_Drought_Soil_Dry_P Parameter: Age (day) Value: 26
  misc_feature: MA Experiment 20001556 PARAMETER Experiment Name: At_Drought_Soil_Dry_P Parameter: Organism Value: A. thaliana
  misc_feature: MA Experiment 20001556 PARAMETER Experiment Name: At_Drought_Soil_Dry_P Parameter: Plant Line Value: WS
  misc_feature: MA Experiment 20001556 PARAMETER Experiment Name: At_Drought_Soil_Dry_P Parameter: Post Timepoint (hr) Value: None
  misc_feature: MA Experiment 20001556 PARAMETER Experiment Name: At_Drought_Soil_Dry_P Parameter: Post-Treatment Value: None
  misc_feature: MA Experiment 20001556 PARAMETER Experiment Name: At_Drought_Soil_Dry_P Parameter: Timepoint (day) Value: 12
  misc_feature: MA Experiment 20001556 PARAMETER Experiment Name: At_Drought_Soil_Dry_P Parameter: Treatment Value: Drought vs. No Drought
  misc_feature: MA Experiment ID: 20001559 Result: Down-regulated in Transcription
  misc_feature: MA Experiment 20001559 PARAMETER Experiment Name: At_Drought_Soil_Dry_P Parameter: Age (day) Value: 28
  misc_feature: MA Experiment 20001559 PARAMETER Experiment Name: At_Drought_Soil_Dry_P Parameter: Organism Value: A. thaliana
  misc_feature: MA Experiment 20001559 PARAMETER Experiment Name: At_Drought_Soil_Dry_P Parameter: Plant Line Value: WS
  misc_feature: MA Experiment 20001559 PARAMETER Experiment Name: At_Drought_Soil_Dry_P Parameter: Post Timepoint (hr) Value: 29
  misc_feature: MA Experiment 20001559 PARAMETER Experiment Name: At_Drought_Soil_Dry_P Parameter: Post-Treatment Value: Re-Water vs. No Drought
  misc_feature: MA Experiment 20001559 PARAMETER Experiment Name: At_Drought_Soil_Dry_P Parameter: Timepoint (day) Value: 14
  misc_feature: MA Experiment 20001559 PARAMETER Experiment Name: At_Drought_Soil_Dry_P Parameter: Treatment Value: Drought vs. No Drought
  misc_feature: MA Experiment ID: 20001904 Result: Down-regulated in Transcription
  misc_feature: MA Experiment 20001904 PARAMETER Experiment Name: At_Drought_Reproduction_P Parameter: Age (day) Value: 37
  misc_feature: MA Experiment 20001904 PARAMETER Experiment Name: At_Drought_Reproduction_P Parameter: Organism Value: A. thaliana
  misc_feature: MA Experiment 20001904 PARAMETER Experiment Name: At_Drought_Reproduction_P Parameter: Plant Line Value: WS
  misc_feature: MA Experiment 20001904 PARAMETER Experiment Name: At_Drought_Reproduction_P Parameter: Timepoint (day) Value: 7
  misc_feature: MA Experiment 20001904 PARAMETER Experiment Name: At_Drought_Reproduction_P Parameter: Tissue Value: Rosettes
  misc_feature: MA Experiment 20001904 PARAMETER Experiment Name: At_Drought_Reproduction_P Parameter: Treatment Value: Drought vs. No Drought
  misc_feature: MA Experiment ID: 20001905 Result: Down-regulated in Transcription
  misc_feature: MA Experiment 20001905 PARAMETER Experiment Name: At_Drought_Reproduction_P Parameter: Age (day) Value: 40
  misc_feature: MA Experiment 20001905 PARAMETER Experiment Name: At_Drought_Reproduction_P Parameter: Organism Value: A. thaliana
  misc_feature: MA Experiment 20001905 PARAMETER Experiment Name: At_Drought_Reproduction_P Parameter: Plant Line Value: WS
  misc_feature: MA Experiment 20001905 PARAMETER Experiment Name: At_Drought_Reproduction_P Parameter: Timepoint (day) Value: 10
  misc_feature: MA Experiment 20001905 PARAMETER Experiment Name: At_Drought_Reproduction_P Parameter: Tissue Value: Rosettes
  misc_feature: MA Experiment 20001905 PARAMETER Experiment Name: At_Drought_Reproduction_P Parameter: Treatment Value: Drought vs. No Drought
  misc_feature: MA Experiment ID: 20001911 Result: Down-regulated in Transcription
  misc_feature: MA Experiment 20001911 PARAMETER Experiment Name: At_Drought_Reproduction_P Parameter: Age (day) Value: 40
  misc_feature: MA Experiment 20001911 PARAMETER Experiment Name: At_Drought_Reproduction_P Parameter: Organism Value: A. thaliana
  misc_feature: MA Experiment 20001911 PARAMETER Experiment Name: At_Drought_Reproduction_P Parameter: Plant Line Value: WS
  misc_feature: MA Experiment 20001911 PARAMETER Experiment Name: At_Drought_Reproduction_P Parameter: Timepoint (day) Value: 10
  misc_feature: MA Experiment 20001911 PARAMETER Experiment Name: At_Drought_Reproduction_P Parameter: Tissue Value: Flowers
  misc_feature: MA Experiment 20001911 PARAMETER Experiment Name: At_Drought_Reproduction_P Parameter: Treatment Value: Drought vs. No Drought
gattttatctgatcactcgttttgtgtctctgaatctctatcccgtggattcgcatctggatttgtttttttttcatttttattcgagcggctaacctttctcggatccatctgatatcgattggattctctctaatcaatcgttgaaatggcggatgcgtggaaggatttagcttcagggactgttggaggagctgctcaactagttgttggtcatccatttgacactatcaaggtcaaacttcagagccaaccgactccagcaccaggccaacttccaaggtacaccggtgcaatcgatgcggttaaacagaccgttgcttctgaaggaaccaaaggtttgtataaaggtatgggagctccacttgcaaccgttgctgccttcaatgcggttttgttcactgtgagaggtcaaatggaagggctgcttaggtctgaagctggagttcctttgaccattagtcaacagtttgtggccggtgcaggcgctggtttcgctgtttcgttccttgcttgtcctaccgagttgatcaagtgcaggttgcaagcacaaggtgcattagctggtgcctctactacaagctcagtggttgcagccgtgaaatacggtggaccaatggatgtagcccgtcatgtcctacgatcagaaggaggagcacgaggtctattcaaaggtttattccctacattcgcccgtgaagtcccgggaaatgcaacaatgtttgcagcctacgaagctttcaagcggtttttagccggtggttcagacacttcaagcttaggacaagggtcattgatcatggcgggtggagtcgctggtgcttctttttggggaatagtatatccgacagatgttgtgaagagtgttcttcaagtcgacgattacaaaaacccgagatacacggggtcgatggatgcttttcggaagattctgaaatctgaaggagttaaaggtttgtataaaggatttggtccagctatggctaggagtgttcctgctaatgctgcttgcttcttggcttatgagatgacaaggtcaagcttgggataaaccggttcggtttgggtttaactgttggttcgatttctgaatgttccattgcgattaacctctctgtttttagatttgattcttaaaaaatttctgcaaaatttatgtaccatttacacagtttatttcagtatttcttacacagaag

SEQ ID NO: 98639 - protein, 300 aa, Arabidopsis thaliana; identical to SEQ ID NO: 98136
  peptide (1)..(300): Ceres Seq. ID no. 13601186
  misc_feature (1)..(300): Homolog of NCBI NO: 18422718 NR Description: mitochondrial carrier protein family [Arabidopsis
  misc_feature (1)..(300): Homolog of NCBI NO: 9758516 NR Description: carnitine/acylcarnitine translocase-like protein
  misc_feature (1)..(300): Homolog of NCBI NO: 37537070 NR Description: putative carnitine/acylcarnitine translocase
  misc_feature (1)..(300): Homolog of NCBI NO: 37537072 NR Description: putative carnitine/acylcarnitine translocase
  misc_feature (1)..(295): Homolog of NCBI NO: 17539560 NR Description: Embryonic tissue differentiation factor DIF-1,
  misc_feature (1)..(295): Homolog of NCBI NO: 39593620 NR Description: Hypothetical protein CBG05908 [Caenorhabditis
  misc_feature (6)..(299): Homolog of NCBI NO: 38541954 NR Description: Unknown (protein for MGC:77760) [Danio rerio]
  misc_feature (6)..(294): Homolog of NCBI NO: 31216089 NR Description: ENSANGP00000020391 [Anopheles gambiae]
  misc_feature (6)..(299): Homolog of NCBI NO: 27694786 NR Description: Similar to solute carrier family 25
  misc_feature (6)..(299): Homolog of NCBI NO: 38566282 NR Description: Carnitine/acylcarnitine translocase [Silurana

SEQ ID NO: 98640 - protein, 232 aa, Arabidopsis thaliana; identical to SEQ ID NO: 98137
  peptide (1)..(232): Ceres Seq. ID no. 13601187
  misc_feature (1)..(232): Homolog of NCBI NO: 18422718 NR Description: mitochondrial carrier protein family [Arabidopsis
  misc_feature (1)..(232): Homolog of NCBI NO: 9758516 NR Description: carnitine/acylcarnitine translocase-like protein
  misc_feature (1)..(232): Homolog of NCBI NO: 37537070 NR Description: putative carnitine/acylcarnitine translocase
  misc_feature (1)..(232): Homolog of NCBI NO: 37537072 NR Description: putative carnitine/acylcarnitine translocase
  misc_feature (1)..(227): Homolog of NCBI NO: 17539560 NR Description: Embryonic tissue differentiation factor DIF-1,
  misc_feature (1)..(227): Homolog of NCBI NO: 39593620 NR Description: Hypothetical protein CBG05908 [Caenorhabditis
  misc_feature (1)..(231): Homolog of NCBI NO: 38541954 NR Description: Unknown (protein for MGC:77760) [Danio rerio]
  misc_feature (1)..(226): Homolog of NCBI NO: 31216089 NR Description: ENSANGP00000020391 [Anopheles gambiae]
  misc_feature (1)..(231): Homolog of NCBI NO: 27694786 NR Description: Similar to solute carrier family 25
  misc_feature (1)..(231): Homolog of NCBI NO: 38566282 NR Description: Carnitine/acylcarnitine translocase [Silurana

SEQ ID NO: 98641 - protein, 211 aa, Arabidopsis thaliana; identical to SEQ ID NO: 98138
  peptide (1)..(211): Ceres Seq. ID no. 13601188
  misc_feature (1)..(211): Homolog of NCBI NO: 18422718 NR Description: mitochondrial carrier protein family [Arabidopsis
  misc_feature (1)..(211): Homolog of NCBI NO: 9758516 NR Description: carnitine/acylcarnitine translocase-like protein
  misc_feature (1)..(211): Homolog of NCBI NO: 37537070 NR Description: putative carnitine/acylcarnitine translocase
  misc_feature (1)..(211): Homolog of NCBI NO: 37537072 NR Description: putative carnitine/acylcarnitine translocase
  misc_feature (1)..(206): Homolog of NCBI NO: 17539560 NR Description: Embryonic tissue differentiation factor DIF-1,
  misc_feature (1)..(206): Homolog of NCBI NO: 39593620 NR Description: Hypothetical protein CBG05908 [Caenorhabditis
  misc_feature (1)..(210): Homolog of NCBI NO: 38541954 NR Description: Unknown (protein for MGC:77760) [Danio rerio]
  misc_feature (1)..(205): Homolog of NCBI NO: 31216089 NR Description: ENSANGP00000020391 [Anopheles gambiae]
  misc_feature (1)..(210): Homolog of NCBI NO: 27694786 NR Description: Similar to solute carrier family 25
  misc_feature (1)..(210): Homolog of NCBI NO: 38566282 NR Description: Carnitine/acylcarnitine translocase [Silurana

SEQ ID NO: 98642 - DNA, 1713 bp, Arabidopsis thaliana
  misc_feature (1)..(1713): Ceres Seq. ID no. 13601189
  misc_feature: MA Experiment ID: 108434 Result: Up-regulated in Transcription
  misc_feature: MA Experiment 108434 PARAMETER Experiment Name: At_Root_Tips_cDNA_P Parameter: Tissue Value: Root Tips
  misc_feature: MA Experiment ID: 108461 Result: Down-regulated in Transcription
  misc_feature: MA Experiment 108461 PARAMETER Experiment Name: At_Germinating_Seeds_cDNA_P Parameter: Age (day) Value: 1 vs. 0
  misc_feature: MA Experiment 108461 PARAMETER Experiment Name: At_Germinating_Seeds_cDNA_P Parameter: Tissue Value: Germinating Seeds
  misc_feature: MA Experiment ID: 108462 Result: Down-regulated in Transcription
  misc_feature: MA Experiment 108462 PARAMETER Experiment Name: At_Germinating_Seeds_cDNA_P Parameter: Age (day) Value: 2 vs. 0
  misc_feature: MA Experiment 108462 PARAMETER Experiment Name: At_Germinating_Seeds_cDNA_P Parameter: Tissue Value: Germinating Seeds
  misc_feature: MA Experiment ID: 108463 Result: Down-regulated in Transcription
  misc_feature: MA Experiment 108463 PARAMETER Experiment Name: At_Germinating_Seeds_cDNA_P Parameter: Age (day) Value: 3 vs. 0
  misc_feature: MA Experiment 108463 PARAMETER Experiment Name: At_Germinating_Seeds_cDNA_P Parameter: Tissue Value: Germinating Seeds
  misc_feature: MA Experiment ID: 108464 Result: Down-regulated in Transcription
  misc_feature: MA Experiment 108464 PARAMETER Experiment Name: At_Germinating_Seeds_cDNA_P Parameter: Age (day) Value: 4 vs. 0
  misc_feature: MA Experiment 108464 PARAMETER Experiment Name: At_Germinating_Seeds_cDNA_P Parameter: Tissue Value: Germinating Seeds
  misc_feature: MA Experiment ID: 108569 Result: Down-regulated in Transcription
  misc_feature: MA Experiment 108569 PARAMETER Experiment Name: At_0.001%_MeJA__cDNA_P Parameter: Timepoint (hr) Value: 6
  misc_feature: MA Experiment 108569 PARAMETER Experiment Name: At_0.001%_MeJA__cDNA_P Parameter: Tissue Value: Aerial
  misc_feature: MA Experiment 108569 PARAMETER Experiment Name: At_0.001%_MeJA__cDNA_P Parameter: Treatment Value: 0.001% MeJA vs. No Treatment
  misc_feature: MA Experiment ID: 20000113 Result: Up-regulated in Transcription
  misc_feature: MA Experiment 20000113 PARAMETER Experiment Name: At_42deg_Heat_cDNA_P Parameter: Temperature (deg C) Value: 42 vs. 22
  misc_feature: MA Experiment 20000113 PARAMETER Experiment Name: At_42deg_Heat_cDNA_P Parameter: Timepoint (hr) Value: 8
  misc_feature: MA Experiment 20000113 PARAMETER Experiment Name: At_42deg_Heat_cDNA_P Parameter: Tissue Value: Aerial
  misc_feature: MA Experiment ID: 20000179 Result: Down-regulated in Transcription
  misc_feature: MA Experiment 20000179 PARAMETER Experiment Name: At_Germinating_Seeds_P Parameter: Age (hr) Value: 6 vs. 0
  misc_feature: MA Experiment 20000179 PARAMETER Experiment Name: At_Germinating_Seeds_P Parameter: Tissue Value: Germinating Seeds
  misc_feature: MA Experiment ID: 20000180 Result: Down-regulated in Transcription
  misc_feature: MA Experiment 20000180 PARAMETER Experiment Name: At_Germinating_Seeds_P Parameter: Age (hr) Value: 24 vs. 0
  misc_feature: MA Experiment 20000180 PARAMETER Experiment Name: At_Germinating_Seeds_P Parameter: Tissue Value: Germinating Seeds
  misc_feature: MA Experiment ID: 20000184 Result: Down-regulated in Transcription
  misc_feature: MA Experiment 20000184 PARAMETER Experiment Name: At_Shoots__P Parameter: Age (day) Value: 7
  misc_feature: MA Experiment 20000184 PARAMETER Experiment Name: At_Shoots__P Parameter: Tissue Value: Shoots vs. Whole Plant
  misc_feature: MA Experiment ID: 20000224 Result: Up-regulated in Transcription
  misc_feature: MA Experiment ID: 20000438 Result: Down-regulated in Transcription
  misc_feature: MA Experiment 20000438 PARAMETER Experiment Name: At_Shoots__P Parameter: Age (day) Value: 14
  misc_feature: MA Experiment 20000438 PARAMETER Experiment Name: At_Shoots__P Parameter: Tissue Value: Shoots vs. Whole Plant
  misc_feature: MA Experiment ID: 20001248 Result: Up-regulated in Transcription
  misc_feature: MA Experiment 20001248 PARAMETER Experiment Name: At_Far-red-induction_P Parameter: Age (day) Value: 7
  misc_feature: MA Experiment 20001248 PARAMETER Experiment Name: At_Far-red-induction_P Parameter: Light Value: Far-red vs. White
  misc_feature: MA Experiment 20001248 PARAMETER Experiment Name: At_Far-red-induction_P Parameter: Organism Value: A. thaliana
  misc_feature: MA Experiment 20001248 PARAMETER Experiment Name: At_Far-red-induction_P Parameter: Plant Line Value: Columbia
  misc_feature: MA Experiment 20001248 PARAMETER Experiment Name: At_Far-red-induction_P Parameter: Timepoint (hr) Value: 4
  misc_feature: MA Experiment 20001248 PARAMETER Experiment Name: At_Far-red-induction_P Parameter: Tissue Value: Whole Plant
  misc_feature: MA Experiment ID: 20001450 Result: Up-regulated in Transcription
  misc_feature: MA Experiment 20001450 PARAMETER Experiment Name: At_Far-red-induction_P Parameter: Age (day) Value: 7
  misc_feature: MA Experiment 20001450 PARAMETER Experiment Name: At_Far-red-induction_P Parameter: Light Value: Far-red vs. White
  misc_feature: MA Experiment 20001450 PARAMETER Experiment Name: At_Far-red-induction_P Parameter: Organism Value: A. thaliana
  misc_feature: MA Experiment 20001450 PARAMETER Experiment Name: At_Far-red-induction_P Parameter: Plant Line Value: Columbia
  misc_feature: MA Experiment 20001450 PARAMETER Experiment Name: At_Far-red-induction_P Parameter: Timepoint (hr) Value: 8
  misc_feature: MA Experiment 20001450 PARAMETER Experiment Name: At_Far-red-induction_P Parameter: Tissue Value: Whole Plant
  misc_feature: MA Experiment ID: 20001451 Result: Up-regulated in Transcription
  misc_feature: MA Experiment 20001451 PARAMETER Experiment Name: At_Far-red-induction_P Parameter: Age (day) Value: 7
  misc_feature: MA Experiment 20001451 PARAMETER Experiment Name: At_Far-red-induction_P Parameter: Light Value: Far-red vs. White
  misc_feature: MA Experiment 20001451 PARAMETER Experiment Name: At_Far-red-induction_P Parameter: Organism Value: A. thaliana
  misc_feature: MA Experiment 20001451 PARAMETER Experiment Name: At_Far-red-induction_P Parameter: Plant Line Value: Columbia
  misc_feature: MA Experiment 20001451 PARAMETER Experiment Name: At_Far-red-induction_P Parameter: Timepoint (hr) Value: 24
  misc_feature: MA Experiment 20001451 PARAMETER Experiment Name: At_Far-red-induction_P Parameter: Tissue Value: Whole Plant
  misc_feature: MA Experiment ID: 20001911 Result: Up-regulated in Transcription
  misc_feature: MA Experiment 20001911 PARAMETER Experiment Name: At_Drought_Reproduction_P Parameter: Age (day) Value: 40
  misc_feature: MA Experiment 20001911 PARAMETER Experiment Name: At_Drought_Reproduction_P Parameter: Organism Value: A. thaliana
  misc_feature: MA Experiment 20001911 PARAMETER Experiment Name: At_Drought_Reproduction_P Parameter: Plant Line Value: WS
  misc_feature: MA Experiment 20001911 PARAMETER Experiment Name: At_Drought_Reproduction_P Parameter: Timepoint (day) Value: 10
  misc_feature: MA Experiment 20001911 PARAMETER Experiment Name: At_Drought_Reproduction_P Parameter: Tissue Value: Flowers
  misc_feature: MA Experiment 20001911 PARAMETER Experiment Name: At_Drought_Reproduction_P Parameter: Treatment Value: Drought vs. No Drought
aatctctctctccctctttcttcctcttctctcattgaaatcgaacgaggatggggaagaagaaatcgaaggtaacggagccggaatctcaaaacgatgaatctcagacaatcttctccactctcttctccggcgaggttgaaagctctggctttgcgagtctcttctccgctgataaccctttccggcgaaaacaacctcaagaaatcaaagagtcgtcaattcctgatgagaagaaaggggataaacgaaatgcagagaacgaagaagaagaagaagaaacagatttgcctgtgaagacgaagaaatctaaaaaggaaaaaaagcttacagattccggcgacgagaaagagacgatttcggaggctgtagaagaaagtgggttggtttcaaagaggaagaagaggaagagagatgagattgagaacgaatacgagacgaagaagtatggaagcgttgagatgaaagagaagaaggttggtgagaagaggaagaaagctgatgaagtagctgatacaatggtttcaaaggaaggttttgatgatgagagtaagcttcttagaactgttttcgttgggaatttgcctttgaaggttaagaaaaaagtcatcttgaaggagtttagtaaatttggtgaggttgaatctgtgaggatacgctctgtgcctattgttgattcgaagaggacaaggaaaggagctataatgctgaaacaaatcaatgagaaagcttcaagtgttcatgcttatgttgtgtttgaaacagagcaatctgctgcagcttctctggcacataacatgtctctgattgatgggaatcatgtccgcgttgatagagcatgtccgcctcgtaagaaacagaaagggcatgatgatactcatttgtatgatcctaagaggacagtctttatgggtaatctccctttcgatgtgaaggacgaggaagtgtatcaactgtttacgggtaagagtaatctggagaacagtatagaagctgttcgtgtcattagagatcctcacttgaacattgggaaaggaatagcttacgtcttgtttaaaacacgggaagctgcaaatctcgtactcaagaaaggatacttgaagcttagagaaagagagttacggatttctcgagtcaaacctgatacgccatcaaagagaaagagcaatccgtctgaagcttactcgccggcccagaaaagactgcagaaggacaaagtggtcacaccaactccaacagggaaggctaatctttcatatcaaggtgtacgagcttcaaaatctggtgatgataagaaaacaccttatcagaaaagctccgcgcagacaaagatgagacctagaggtagcagcagcaatgacaacaaaaaatctgggaataatagtgcttcaaaggaaagaagtcagaagcgaccagctgttgcagcaagaaaggcgaaagcaaacgcaaaaggttcaaaagagagcggtggtaagcggtttgcagggacaaagcgtaaacaagaaaaccggacgcctgaaagcttctctaagaagaaaaaaacaaaacggttttagacggtttctttcaaccataatggtgaacctctttcttcttccttagttttgatactagtagtcgttttgtattgttctcttatatcaatcaatgatgatatactgtaatgttgcaacaattatgttttcgtgcaagtttaaaaggaaagctattttg

SEQ ID NO: 98643 - protein, 501 aa, Arabidopsis thaliana
  peptide (1)..(501): Ceres Seq. ID no. 13601190
  misc_feature (173)..(260): Pfam Name: RNA recognition motif. (a.k.a. RRM, RBD, or RNP domain) Pfam Description: RNA recognition motif. (a.k.a. RRM, RBD, or RNP
  misc_feature (1)..(501): Homolog of NCBI NO: 15237960 NR Description: RNA recognition motif (RRM)-containing protein
  misc_feature (1)..(501): Homolog of NCBI NO: 21554835 NR Description: unknown [Arabidopsis thaliana]
  misc_feature (103)..(500): Homolog of NCBI NO: 29126350 NR Description: unknown protein [Oryza sativa (japonica
  misc_feature (21)..(429): Homolog of NCBI NO: 37549473 NR Description: similar to DNA segment, Chr 8, ERATO Doi 233, [Homo sapiens] >gi|37549825|ref|XP_351353.1| similar to DNA
  misc_feature (23)..(454): Homolog of NCBI NO: 19115130 NR Description: putative RNA-binding protein [Schizosaccharomyces
  misc_feature (47)..(425): Homolog of NCBI NO: 39593884 NR Description: Hypothetical protein CBG06224 [Caenorhabditis
  misc_feature (36)..(361): Homolog of NCBI NO: 27370124 NR Description: DNA segment, Chr 8, ERATO Doi 233, expressed [Mus >gi|26346951|dbj|BAC37124.1| unnamed protein product [Mus
  misc_feature (105)..(425): Homolog of NCBI NO: 17539754 NR Description: RNA recognition motif containing protein (43.9 [Caenorhabditis elegans] >gi|15718191|emb|CAC70081.1|
  misc_feature (58)..(427): Homolog of NCBI NO: 34863377 NR Description: similar to DNA segment, Chr 8, ERATO Doi 233,
  misc_feature (105)..(416): Homolog of NCBI NO: 7498869 NR Description: hypothetical protein F11A10.2 - Caenorhabditis
MGKKKSKVTEPESQNDESQTIFSTLFSGEVESSGFASLFSADNPFRRKQPQEIKESSIPDEKKGDKRNAENEEEEEETDLPVKTKKSKKEKKLTDSGDEKETISEAVEESGLVSKRKKRKRDEIENEYETKKYGSVEMKEKKVGEKRKKADEVADTMVSKEGFDDESKLLRTVFVGNLPLKVKKKVILKEFSKFGEVESVRIRSVPIVDSKRTRKGAIMLKQINEKASSVHAYVVFETEQSAAASLAHNMSLIDGNHVRVDRACPPRKKQKGHDDTHLYDPKRTVFMGNLPFDVKDEEVYQLFTGKSNLENSIEAVRVIRDPHLNIGKGIAYVLFKTREAANLVLKKGYLKLRERELRISRVKPDTPSKRKSNPSEAYSPAQKRLQKDKVVTPTPTGKANLSYQGVRASKSGDDKKTPYQKSSAQTKMRPRGSSSNDNKKSGNNSASKERSQKRPAVAARKAKANAKGSKESGGKRFAGTKRKQENRTPESFSKKKKTKRF

SEQ ID NO: 98644 - protein, 364 aa, Arabidopsis thaliana
  peptide (1)..(364): Ceres Seq. ID no. 13601191
  misc_feature (36)..(123): Pfam Name: RNA recognition motif. (a.k.a. RRM, RBD, or RNP domain) Pfam Description: RNA recognition motif. (a.k.a. RRM, RBD, or RNP
  misc_feature (1)..(364): Homolog of NCBI NO: 15237960 NR Description: RNA recognition motif (RRM)-containing protein
  misc_feature (1)..(364): Homolog of NCBI NO: 21554835 NR Description: unknown [Arabidopsis thaliana]
  misc_feature (1)..(363): Homolog of NCBI NO: 29126350 NR Description: unknown protein [Oryza sativa (japonica
  misc_feature (1)..(292): Homolog of NCBI NO: 37549473 NR Description: similar to DNA segment, Chr 8, ERATO Doi 233, [Homo sapiens] >gi|37549825|ref|XP_351353.1| similar to DNA
  misc_feature (1)..(317): Homolog of NCBI NO: 19115130 NR Description: putative RNA-binding protein [Schizosaccharomyces
  misc_feature (1)..(288): Homolog of NCBI NO: 39593884 NR Description: Hypothetical protein CBG06224 [Caenorhabditis
  misc_feature (1)..(224): Homolog of NCBI NO: 27370124 NR Description: DNA segment, Chr 8, ERATO Doi 233, expressed [Mus >gi|26346951|dbj|BAC37124.1| unnamed protein product [Mus
  misc_feature (1)..(288): Homolog of NCBI NO: 17539754 NR Description: RNA recognition motif containing protein (43.9 [Caenorhabditis elegans] >gi|15718191|emb|CAC70081.1|
  misc_feature (1)..(290): Homolog of NCBI NO: 34863377 NR Description: similar to DNA segment, Chr 8, ERATO Doi 233,
  misc_feature (1)..(279): Homolog of NCBI NO: 7498869 NR Description: hypothetical protein F11A10.2 - Caenorhabditis
MKEKKVGEKRKKADEVADTMVSKEGFDDESKLLRTVFVGNLPLKVKKKVILKEFSKFGEVESVRIRSVPIVDSKRTRKGAIMLKQINEKASSVHAYVVFETEQSAAASLAHNMSLIDGNHVRVDRACPPRKKQKGHDDTHLYDPKRTVFMGNLPFDVKDEEVYQLFTGKSNLENSIEAVRVIRDPHLNIGKGIAYVLFKTREAANLVLKKGYLKLRERELRISRVKPDTPSKRKSNPSEAYSPAQKRLQKDKVVTPTPTGKANLSYQGVRASKSGDDKKTPYQKSSAQTKMRPRGSSSNDNKKSGNNSASKERSQKRPAVAARKAKANAKGSKESGGKRFAGTKRKQENRTPESFSKKKKTKRF

SEQ ID NO: 98645 - protein, 345 aa, Arabidopsis thaliana
  peptide (1)..(345): Ceres Seq. ID no. 13601192
  misc_feature (17)..(104): Pfam Name: RNA recognition motif. (a.k.a. RRM, RBD, or RNP domain) Pfam Description: RNA recognition motif. (a.k.a. RRM, RBD, or RNP
  misc_feature (1)..(345): Homolog of NCBI NO: 15237960 NR Description: RNA recognition motif (RRM)-containing protein
  misc_feature (1)..(345): Homolog of NCBI NO: 21554835 NR Description: unknown [Arabidopsis thaliana]
  misc_feature (1)..(344): Homolog of NCBI NO: 29126350 NR Description: unknown protein [Oryza sativa (japonica
  misc_feature (1)..(273): Homolog of NCBI NO: 37549473 NR Description: similar to DNA segment, Chr 8, ERATO Doi 233, [Homo sapiens] >gi|37549825|ref|XP_351353.1| similar to DNA
  misc_feature (1)..(298): Homolog of NCBI NO: 19115130 NR Description: putative RNA-binding protein [Schizosaccharomyces
  misc_feature (1)..(269): Homolog of NCBI NO: 39593884 NR Description: Hypothetical protein CBG06224 [Caenorhabditis
  misc_feature (1)..(205): Homolog of NCBI NO: 27370124 NR Description: DNA segment, Chr 8, ERATO Doi 233, expressed [Mus >gi|26346951|dbj|BAC37124.1| unnamed protein product [Mus
  misc_feature (1)..(269): Homolog of NCBI NO: 17539754 NR Description: RNA recognition motif containing protein (43.9 [Caenorhabditis elegans] >gi|15718191|emb|CAC70081.1|
  misc_feature (1)..(271): Homolog of NCBI NO: 34863377 NR Description: similar to DNA segment, Chr 8, ERATO Doi 233,
  misc_feature (1)..(260): Homolog of NCBI NO: 7498869 NR Description: hypothetical protein F11A10.2 - Caenorhabditis
MVSKEGFDDESKLLRTVFVGNLPLKVKKKVILKEFSKFGEVESVRIRSVPIVDSKRTRKGAIMLKQINEKASSVHAYVVFETEQSAAASLAHNMSLIDGNHVRVDRACPPRKKQKGHDDTHLYDPKRTVFMGNLPFDVKDEEVYQLFTGKSNLENSIEAVRVIRDPHLNIGKGIAYVLFKTREAANLVLKKGYLKLRERELRISRVKPDTPSKRKSNPSEAYSPAQKRLQKDKVVTPTPTGKANLSYQGVRASKSGDDKKTPYQKSSAQTKMRPRGSSSNDNKKSGNNSASKERSQKRPAVAARKAKANAKGSKESGGKRFAGTKRKQENRTPESFSKKKKTKRF

SEQ ID NO: 98646 - DNA, 1422 bp, Arabidopsis thaliana
  misc_feature (1)..(1422): Ceres Seq. ID no. 13601197
  misc_feature: MA Experiment ID: 20000179 Result: Down-regulated in Transcription
  misc_feature: MA Experiment 20000179 PARAMETER Experiment Name: At_Germinating_Seeds_P Parameter: Age (hr) Value: 6 vs. 0
  misc_feature: MA Experiment 20000179 PARAMETER Experiment Name: At_Germinating_Seeds_P Parameter: Tissue Value: Germinating Seeds
  misc_feature: MA Experiment ID: 20000182 Result: Up-regulated in Transcription
  misc_feature: MA Experiment 20000182 PARAMETER Experiment Name: At_2mM_SA_P Parameter: Age (day) Value: 14
  misc_feature: MA Experiment 20000182 PARAMETER Experiment Name: At_2mM_SA_P Parameter: Organism Value: A. thaliana
  misc_feature: MA Experiment 20000182 PARAMETER Experiment Name: At_2mM_SA_P Parameter: Plant Line Value: WS
  misc_feature: MA Experiment 20000182 PARAMETER Experiment Name: At_2mM_SA_P Parameter: Timepoint (hr) Value: 6
  misc_feature: MA Experiment 20000182 PARAMETER Experiment Name: At_2mM_SA_P Parameter: Tissue Value: Aerial
  misc_feature: MA Experiment 20000182 PARAMETER Experiment Name: At_2mM_SA_P Parameter: Treatment Value: 2mM SA vs. No Treatment
  misc_feature: MA Experiment ID: 20000227 Result: Up-regulated in Transcription
  misc_feature: MA Experiment 20000227 PARAMETER Experiment Name: At_Root-Tips-vs-Tops_P Parameter: Tissue Value: Root Tips vs. Root Tops
  misc_feature: MA Experiment ID: 20000234 Result: Up-regulated in Transcription
  misc_feature: MA Experiment 20000234 PARAMETER Experiment Name: At_Siliques_P Parameter: Age (day) Value: 21
  misc_feature: MA Experiment 20000234 PARAMETER Experiment Name: At_Siliques_P Parameter: Organism Value: A. thaliana
  misc_feature: MA Experiment 20000234 PARAMETER Experiment Name: At_Siliques_P Parameter: Plant Line Value: WS
  misc_feature: MA Experiment 20000234 PARAMETER Experiment Name: At_Siliques_P Parameter: Tissue Value: Less Than 5mm Siliques vs. Whole Plant
  misc_feature: MA Experiment ID: 20000264 Result: Up-regulated in Transcription
  misc_feature: MA Experiment 20000264 PARAMETER Experiment Name: At_Open_Flower_P Parameter: Age (day) Value: 21
  misc_feature: MA Experiment 20000264 PARAMETER Experiment Name: At_Open_Flower_P Parameter: Plant Line Value: WS
  misc_feature: MA Experiment 20000264 PARAMETER Experiment Name: At_Open_Flower_P Parameter: Tissue Value: Open Flower vs. Whole Plant
  misc_feature: MA Experiment ID: 20000265 Result: Up-regulated in Transcription
  misc_feature: MA Experiment 20000265 PARAMETER Experiment Name: At_Open_Flower_P Parameter: Age (day) Value: 21
  misc_feature: MA Experiment 20000265 PARAMETER Experiment Name: At_Open_Flower_P Parameter: Plant Line Value: WS
  misc_feature: MA Experiment 20000265 PARAMETER Experiment Name: At_Open_Flower_P Parameter: Tissue Value: Closed Flower vs. Whole Plant
  misc_feature: MA Experiment ID: 20000286 Result: Up-regulated in Transcription
  misc_feature: MA Experiment 20000286 PARAMETER Experiment Name: At_Open_Flower_P Parameter: Age (day) Value: 21
  misc_feature: MA Experiment 20000286 PARAMETER Experiment Name: At_Open_Flower_P Parameter: Plant Line Value: WS
  misc_feature: MA Experiment 20000286 PARAMETER Experiment Name: At_Open_Flower_P Parameter: Tissue Value: Half Open vs. Whole Plant
  misc_feature: MA Experiment ID: 20000495 Result: Up-regulated in Transcription
  misc_feature: MA Experiment 20000495 PARAMETER Experiment Name: At_Guard_Cells_P Parameter: Harvest Date Value: 8/2/2002
  misc_feature: MA Experiment 20000495 PARAMETER Experiment Name: At_Guard_Cells_P Parameter: Organism Value: A. thaliana
  misc_feature: MA Experiment 20000495 PARAMETER Experiment Name: At_Guard_Cells_P Parameter: Tissue Value: Guard Cells vs. Leaves
  misc_feature: MA Experiment ID: 20000794 Result: Up-regulated in Transcription
  misc_feature: MA Experiment 20000794 PARAMETER Experiment Name: At_Petals_P Parameter: Age (day) Value: 23-25 days
  misc_feature: MA Experiment 20000794 PARAMETER Experiment Name: At_Petals_P Parameter: Plant Line Value: WS
  misc_feature: MA Experiment 20000794 PARAMETER Experiment Name: At_Petals_P Parameter: Tissue Value: Petals vs. Whole plant
  misc_feature: MA Experiment ID: 20001558 Result: Up-regulated in Transcription
  misc_feature: MA Experiment 20001558 PARAMETER Experiment Name: At_Drought_Soil_Dry_P Parameter: Age (day) Value: 27
  misc_feature: MA Experiment 20001558 PARAMETER Experiment Name: At_Drought_Soil_Dry_P Parameter: Organism Value: A. thaliana
  misc_feature: MA Experiment 20001558 PARAMETER Experiment Name: At_Drought_Soil_Dry_P Parameter: Plant Line Value: WS
  misc_feature: MA Experiment 20001558 PARAMETER Experiment Name: At_Drought_Soil_Dry_P Parameter: Post Timepoint (hr) Value: 6
  misc_feature: MA Experiment 20001558 PARAMETER Experiment Name: At_Drought_Soil_Dry_P Parameter: Post-Treatment Value: Re-Water vs. No Drought
  misc_feature: MA Experiment 20001558 PARAMETER Experiment Name: At_Drought_Soil_Dry_P Parameter: Timepoint (day) Value: 13
  misc_feature: MA Experiment 20001558 PARAMETER Experiment Name: At_Drought_Soil_Dry_P Parameter: Treatment Value: Drought vs. No Drought
  misc_feature: MA Experiment ID: 20001560 Result: Up-regulated in Transcription
  misc_feature: MA Experiment 20001560 PARAMETER Experiment Name: At_Drought_Soil_Dry_P Parameter: Age (day) Value: 28
  misc_feature: MA Experiment 20001560 PARAMETER Experiment Name: At_Drought_Soil_Dry_P Parameter: Organism Value: A. thaliana
  misc_feature: MA Experiment 20001560 PARAMETER Experiment Name: At_Drought_Soil_Dry_P Parameter: Plant Line Value: WS
  misc_feature: MA Experiment 20001560 PARAMETER Experiment Name: At_Drought_Soil_Dry_P Parameter: Post Timepoint (hr) Value: None
  misc_feature: MA Experiment 20001560 PARAMETER Experiment Name: At_Drought_Soil_Dry_P Parameter: Post-Treatment Value: None
  misc_feature: MA Experiment 20001560 PARAMETER Experiment Name: At_Drought_Soil_Dry_P Parameter: Timepoint (day) Value: 14
  misc_feature: MA Experiment 20001560 PARAMETER Experiment Name: At_Drought_Soil_Dry_P Parameter: Treatment Value: Drought vs. No Drought
atttagaacctttagtaccttaccatgtgagtgaagagttcaaaaacctctgcaaaaactttcttttttatctctctctcttctttaaacttactttcaaacactaaatagccaaaacttaagataccaaatttcaacaggggaaaaaatgtataagaatcagcttcaagagcttgcacagagaagttgtttcaacttaccatcatatacttgcataagagaaggaccagatcatgctccaagattcaaagcttctgttaacttcaatggtgagatatttgagagtcccacttactgttctactctcagacaagctgagcatgcagctgctgaagtttcccttaatgtcctttcgtctagagtcccttcaaagtctctaactgctaagattcttgatgagacagggatttacaagaacctgcttcaagagacagcacatagagctggtcttgatctaccaatgtacacaagtgtgagatcaggatcttgtcacttcccaggtttctcttgtactgttgaacttgctgggatgacgtttacaggagaatcagcaaagacaaagaaacaagctgagaaaaacgcagccattgcagcttggtcctctttgaagaaaatgtcaagcttggattcacaagatgaagagaaggaacaagaagcagtagcaagagtactctcaagatttaaacccaaagaagtaagaagacgagagacaacaaaccaatggagaagaagaacaagtcaacaagattcaaacaaggatttgttgattgagagattgagatggatcaatcttttgaccaatcaagcttcttcatcatcatcaacatcaacaccgaatcaacacaaaaactccagtttcatctctctaattcccccaccaccaccacctaaatcctccaaaattttgccatttatccagcaatacaaagacagatcatcacaagaagctaagacagagacagcgacagagatgatcaacagcaaagccaaagtcaatgaaacatcaaccagattgagtaagcaaatgcccttttccgacatgaacagatacaactttgtcggagggtgtagcgtaaacccttatagtctggctccagcggttcaaatgagatcagtgattccagttttcgcagctccaccaccgaaaccaaaccccaaccttaacccatcatcattatcatcatcagtcaatgaattcacctcatccaataattcctgctctgttctgaatacgccgggattgggaggccaagagaagaagaatctaactcgcgaaatgatcaaacttggttcagaatcgagaattttggatcaaacccatgatagttagctaaatttggttaatgggttaatctcaaattaaatccttgtcaagtgtttgtcacatagataaattatagaccagtatgtttccgtttcttg

SEQ ID NO: 98647 - protein, 393 aa, Arabidopsis thaliana
  peptide (1)..(393): Ceres Seq. ID no. 13601198
  misc_feature (2)..(68): Pfam Name: Double-stranded RNA binding motif Pfam Description: Double-stranded RNA binding motif
  misc_feature (1)..(393): Homolog of NCBI NO: 30693732 NR Description: expressed protein [Arabidopsis thaliana]
  misc_feature (1)..(393): Homolog of NCBI NO: 9759153 NR Description: gb|AAD20688.1~gene_id:MEE6.14~similar to unknown
  misc_feature (1)..(341): Homolog of NCBI NO: 11994159 NR Description: gb|AAD20688.1~gene_id:MQP17.5~similar to unknown
  misc_feature (1)..(341): Homolog of NCBI NO: 15231653 NR Description: hypothetical protein [Arabidopsis thaliana]
  misc_feature (1)..(182): Homolog of NCBI NO: 18401724 NR Description: expressed protein [Arabidopsis thaliana]
  misc_feature (1)..(182): Homolog of NCBI NO: 37535422 NR Description: putative extensin [Oryza sativa (japonica
  misc_feature (1)..(268): Homolog of NCBI NO: 40788412 NR Description: hypothetical protein [Oryza sativa (japonica
  misc_feature (1)..(189): Homolog of NCBI NO: 18389232 NR Description: unknown protein [Arabidopsis thaliana]
  misc_feature (1)..(189): Homolog of NCBI NO: 22331912 NR Description: expressed protein [Arabidopsis thaliana]
  misc_feature (1)..(171): Homolog of NCBI NO: 27262831 NR Description: dsRNA-binding protein [Brassica oleracea var.
MYKNQLQELAQRSCFNLPSYTCIREGPDHAPRFKASVNFNGEIFESPTYCSTLRQAEHAAAEVSLNVLSSRVPSKSLTAKILDETGIYKNLLQETAHRAGLDLPMYTSVRSGSCHFPGFSCTVELAGMTFTGESAKTKKQAEKNAAIAAWSSLKKMSSLDSQDEEKEQEAVARVLSRFKPKEVRRRETTNQWRRRTSQQDSNKDLLIERLRWINLLTNQASSSSSTSTPNQHKNSSFISLIPPPPPPKSSKILPFIQQYKDRSSQEAKTETATEMINSKAKVNETSTRLSKQMPFSDMNRYNFVGGCSVNPYSLAPAVQMRSVIPVFAAPPPKPNPNLNPSSLSSSVNEFTSSNNSCSVLNTPGLGGQEKKNLTREMIKLGSESRILDQTHDS

SEQ ID NO: 98648 - protein, 289 aa, Arabidopsis thaliana
  peptide (1)..(289): Ceres Seq. ID no. 13601199
  misc_feature (1)..(289): Homolog of NCBI NO: 30693732 NR Description: expressed protein [Arabidopsis thaliana]
  misc_feature (1)..(289): Homolog of NCBI NO: 9759153 NR Description: gb|AAD20688.1~gene_id:MEE6.14~similar to unknown
  misc_feature (1)..(237): Homolog of NCBI NO: 11994159 NR Description: gb|AAD20688.1~gene_id:MQP17.5~similar to unknown
  misc_feature (1)..(237): Homolog of NCBI NO: 15231653 NR Description: hypothetical protein [Arabidopsis thaliana]
  misc_feature (1)..(78): Homolog of NCBI NO: 18401724 NR Description: expressed protein [Arabidopsis thaliana]
  misc_feature (1)..(78): Homolog of NCBI NO: 37535422 NR Description: putative extensin [Oryza sativa (japonica
  misc_feature (1)..(164): Homolog of NCBI NO: 40788412 NR Description: hypothetical protein [Oryza sativa (japonica
  misc_feature (1)..(85): Homolog of NCBI NO: 18389232 NR Description: unknown protein [Arabidopsis thaliana]
  misc_feature (1)..(85): Homolog of NCBI NO: 22331912 NR Description: expressed protein [Arabidopsis thaliana]
  misc_feature (1)..(67): Homolog of NCBI NO: 27262831 NR Description: dsRNA-binding protein [Brassica oleracea var.
MYTSVRSGSCHFPGFSCTVELAGMTFTGESAKTKKQAEKNAAIAAWSSLKKMSSLDSQDEEKEQEAVARVLSRFKPKEVRRRETTNQWRRRTSQQDSNKDLLIERLRWINLLTNQASSSSSTSTPNQHKNSSFISLIPPPPPPKSSKILPFIQQYKDRSSQEAKTETATEMINSKAKVNETSTRLSKQMPFSDMNRYNFVGGCSVNPYSLAPAVQMRSVIPVFAAPPPKPNPNLNPSSLSSSVNEFTSSNNSCSVLNTPGLGGQEKKNLTREMIKLGSESRILDQTHDS

SEQ ID NO: 98649 - protein, 266 aa, Arabidopsis thaliana
  peptide (1)..(266): Ceres Seq. ID no. 13601200
  misc_feature (1)..(266): Homolog of NCBI NO: 30693732 NR Description: expressed protein [Arabidopsis thaliana]
  misc_feature (1)..(266): Homolog of NCBI NO: 9759153 NR Description: gb|AAD20688.1~gene_id:MEE6.14~similar to unknown
  misc_feature (1)..(214): Homolog of NCBI NO: 11994159 NR Description: gb|AAD20688.1~gene_id:MQP17.5~similar to unknown
  misc_feature (1)..(214): Homolog of NCBI NO: 15231653 NR Description: hypothetical protein [Arabidopsis thaliana]
  misc_feature (1)..(55): Homolog of NCBI NO: 18401724 NR Description: expressed protein [Arabidopsis thaliana]
  misc_feature (1)..(55): Homolog of NCBI NO: 37535422 NR Description: putative extensin [Oryza sativa (japonica
  misc_feature (1)..(141): Homolog of NCBI NO: 40788412 NR Description: hypothetical protein [Oryza sativa (japonica
  misc_feature (1)..(62): Homolog of NCBI NO: 18389232 NR Description: unknown protein [Arabidopsis thaliana]
  misc_feature (1)..(62): Homolog of NCBI NO: 22331912 NR Description: expressed protein [Arabidopsis thaliana]
  misc_feature (1)..(44): Homolog of NCBI NO: 27262831 NR Description: dsRNA-binding protein [Brassica oleracea var.
MTFTGESAKTKKQAEKNAAIAAWSSLKKMSSLDSQDEEKEQEAVARVLSRFKPKEVRRRETTNQWRRRTSQQDSNKDLLIERLRWINLLTNQASSSSSTSTPNQHKNSSFISLIPPPPPPKSSKILPFIQQYKDRSSQEAKTETATEMINSKAKVNETSTRLSKQMPFSDMNRYNFVGGCSVNPYSLAPAVQMRSVIPVFAAPPPKPNPNLNPSSLSSSVNEFTSSNNSCSVLNTPGLGGQEKKNLTREMIKLGSESRILDQTHDS

SEQ ID NO: 98650 - DNA, 3631 bp, Arabidopsis thaliana
  misc_feature (1)..(3631): Ceres Seq. ID no. 13601204
  misc_feature: MA Experiment ID: 20000171 Result: Down-regulated in Transcription
  misc_feature: MA Experiment 20000171 PARAMETER Experiment Name: At_42deg_Heat_P Parameter: Age (day) Value: 14
  misc_feature: MA Experiment 20000171 PARAMETER Experiment Name: At_42deg_Heat_P Parameter: Organism Value: A. thaliana
  misc_feature: MA Experiment 20000171 PARAMETER Experiment Name: At_42deg_Heat_P Parameter: Plant Line Value: WS
  misc_feature: MA Experiment 20000171 PARAMETER Experiment Name: At_42deg_Heat_P Parameter: Temperature (deg C) Value: 42 vs. 22
  misc_feature: MA Experiment 20000171 PARAMETER Experiment Name: At_42deg_Heat_P Parameter: Timepoint (hr) Value: 1
  misc_feature: MA Experiment 20000171 PARAMETER Experiment Name: At_42deg_Heat_P Parameter: Tissue Value: Aerial
  misc_feature: MA Experiment ID: 20000173 Result: Down-regulated in Transcription
  misc_feature: MA Experiment 20000173 PARAMETER Experiment Name: At_42deg_Heat_P Parameter: Age (day) Value: 14
  misc_feature: MA Experiment 20000173 PARAMETER Experiment Name: At_42deg_Heat_P Parameter: Organism Value: A. thaliana
  misc_feature: MA Experiment 20000173 PARAMETER Experiment Name: At_42deg_Heat_P Parameter: Plant Line Value: WS
  misc_feature: MA Experiment 20000173 PARAMETER Experiment Name: At_42deg_Heat_P Parameter: Temperature (deg C) Value: 42 vs. 22
  misc_feature: MA Experiment 20000173 PARAMETER Experiment Name: At_42deg_Heat_P Parameter: Timepoint (hr) Value: 6
  misc_feature: MA Experiment 20000173 PARAMETER Experiment Name: At_42deg_Heat_P Parameter: Tissue Value: Aerial
  misc_feature: MA Experiment ID: 20000184 Result: Down-regulated in Transcription
  misc_feature: MA Experiment 20000184 PARAMETER Experiment Name: At_Shoots__P Parameter: Age (day) Value: 7
  misc_feature: MA Experiment 20000184 PARAMETER Experiment Name: At_Shoots__P Parameter: Tissue Value: Shoots vs. Whole Plant
  misc_feature: MA Experiment ID: 20000495 Result: Up-regulated in Transcription
  misc_feature: MA Experiment 20000495 PARAMETER Experiment Name: At_Guard_Cells_P Parameter: Harvest Date Value: 8/2/2002
  misc_feature: MA Experiment 20000495 PARAMETER Experiment Name: At_Guard_Cells_P Parameter: Organism Value: A. thaliana
  misc_feature: MA Experiment 20000495 PARAMETER Experiment Name: At_Guard_Cells_P Parameter: Tissue Value: Guard Cells vs. Leaves
  misc_feature: MA Experiment ID: 20000794 Result: Up-regulated in Transcription
  misc_feature: MA Experiment 20000794 PARAMETER Experiment Name: At_Petals_P Parameter: Age (day) Value: 23-25 days
  misc_feature: MA Experiment 20000794 PARAMETER Experiment Name: At_Petals_P Parameter: Plant Line Value: WS
  misc_feature: MA Experiment 20000794 PARAMETER Experiment Name: At_Petals_P Parameter: Tissue Value: Petals vs. Whole plant
  misc_feature: MA Experiment ID: 20001451 Result: Up-regulated in Transcription
  misc_feature: MA Experiment 20001451 PARAMETER Experiment Name: At_Far-red-induction_P Parameter: Age (day) Value: 7
  misc_feature: MA Experiment 20001451 PARAMETER Experiment Name: At_Far-red-induction_P Parameter: Light Value: Far-red vs. White
  misc_feature: MA Experiment 20001451 PARAMETER Experiment Name: At_Far-red-induction_P Parameter: Organism Value: A. thaliana
  misc_feature: MA Experiment 20001451 PARAMETER Experiment Name: At_Far-red-induction_P Parameter: Plant Line Value: Columbia
  misc_feature: MA Experiment 20001451 PARAMETER Experiment Name: At_Far-red-induction_P Parameter: Timepoint (hr) Value: 24
  misc_feature: MA Experiment 20001451 PARAMETER Experiment Name: At_Far-red-induction_P Parameter: Tissue Value: Whole Plant
atggtttcaaagagaaagtcaagaacttcaaagactatagaagattcttgtatccatctatgttctgtcttcttcagattcttgtactatactcttcctgcattatttctcttcttctttcttctttatctttgtttatctttcaccaccggaatctcctacaacaacttccatatgtgtatcttctctcgaaagttcaacgacccttattgtaacacggctggttctaaacccggtttccaaataatttctgaagaaaatgtaactttcgccggagagatcgcaggagatagagtttctaaggatcacaacaagattcttaattcagttcctgttcaagaacacaaaacaaagaacaaggttgatctcaattcactcattgaactaaaagccgaggaagaatacagcaaatacatcaaacctacgagtgaagatgagggatatgcgttaagggcagccatcaagtatctttacctacaaagatcatggctatctccgggagatgaaaacctcaataaaccgcgatcgtgtgaaggtaaaggagtttacgtttatgatttaccgtcaaaattcaacagcgatttgttggtaggatgcaacgatatacttccaggggttaacttgtgtagctacttcaagaatgaaggctttggagaagctattaagaatcttggcaaaggttggtttgctacacacatgtattctcttgagcccatcttacactctagggttttgaagcatccttgtagggtttacaacgagacccaagctaagctcttctttgtcccttactatggcgggtatgatgttttgagatggcactataggaatgtttctgaagatgtgaaggaccgtttggggatcgaggttttaaaatggcttaattcaaaggaatcatggaggagaaacgccgggaaagatcatgtgttcgttctaggaaaaataacttgggattttaggagagataaggacccttggggctcaaggttccttgagctacaagaaatgcaaaaccctaccaagctactcatagaaagacagccatggcaggtcaacgacatcgccattcctcacccaacttatttccatccgcgaacagatgatgatatcacccgctggcagatcaagatcatgagtaaacttcgccggaatctagtaagcttcgcgggaggtgcaagacccgataaccctaataacatccgatcaacgctaatcgagcaatgcatatcttccaaccaatgtcggttcttaaattgtacaaacgaaagctgcacgaatcccaagaatgtccttgatttgtttcaagattcagagttttgtctgcagccgcctggagatagtgcaacaaggagatcagtatttgattcactaatctccggctgcattccggtgatctttactccgtacacagcttattaccagtacgcgtggcatcttcctgaggatcatcggaagtactcagtgtatataagcgaacaagatgtgaaggaaaagagagtaaatgtggtggagatattgaaggcaaagactctaaaggagaaaaaggatatgaaaagttacatagttcaacagcttttgcctggattggtatatggagactccaatgctaagtttgaaaagtttcgagatgcttttgatattacttttgattgtttacttaagaaaatcaacagtgttctgaaaactttttccgatacacaaaatcggaggaagaagaagatgaagctcaaagtgtatgcggataggatgtcacagccatctcgtgctgtcctcatattctgcaaggttaacgaaatccaattcgacgagattttgatttccttggggaaacgtcaacagttatcccctgaattcaaagaaattaacccaatggggaaagttccagctattgttgatggcagacttaagctatttgagagtcacgctatattgatatatctttcctcagcatacgcaagtgtagttgatcattggtacccgaatgatctttccaaaagagccaagattcactccgttttggattggcatcacaccaatttacgccctggtgcatctggatatgttctgaatagcgttctagctccagctcttggtcttccactgaatccgaaagcagctgctgaagctgagaacatactaacaaactctctgtccactctagagactttttggcttaagggcagtgccaagtttttactcgggggcaagcaaccatctatagctgatctcagccttgtatgtgaacttatgcagctgcaggttttggatgacaaagatcgtcttagattgcttagccctcataagaaagttgaacaatggattgagagtacgagaaaagcgacaatgcctcactctgatgaggtccatgaggtccttttcagagccaaagatagatttcagaagcagcgagagatggcaaccgcatctaaaccgggtcctcaatctaagattatccaatttagtagtattggtgggacgagtgatggtccaaacctcgttcaagacacaaccgatcgtaaagctcgaagacgcaaatggagtccacctgacgatgtcattctcattagtgcttggttaaatactagtaaggatcgtaaagttgtcgtttatgatgaacaacaagcacatactttttggaagagaattggtgcacatgtttcaaatagcgcttcacttgcaaatctaccaaagcgagagtggaatcactgcaggcaaagatggaggaaaattaacgactacgtctgcaaatttgttggatgttatgatcaagctttgaatcaaagagctagtggtcaatctgaagatgatgttttccaagttgcataccaattgtactacaacaattacatgagtaatttcaaacttgagcatgcatggcgggagctccgacacaataaaaaatggtgtagtacatacacctctgaaaattctaaggggggtggaagctcaaagagaacaaagttgaatggaggtggtgtatattcttcaagctgtaatccggagagtgtgcctatagctctagatggagaggagcaagttatggatcgccctcttggtgtgaagtcgtcaaagcaaaaagagaagaaagttgctactaaaacaatgcttgaagaaagggaggccgattctagatcaagacttgagaacttgtgggtactagatgaagaggagcaagttatggatcttcctcttggtgtgaagtcatcgaagcagaaagagaggaaagttgctactaaaacaatgattgaagaaagggaggcagccaattttcgatcaagacttgggaacttgtggctactaaaggagaaagaagaaagggaggcagattcccgatcaagacttgagaacttgtgggcactgaaggagaaagacatagaagagcaaaagaaactaacaaggatggaagtccttaaaagtcttcttggaagaagaacaggtgaaacttctgaaaaggaagaaactttgaagaacaagctcattgatgagatgctctaatctctatgttctcgttgtatttatctctttattttctctatgtttatctcactatcaacttagtgacaggctatagacggcttttctagaaatagatactaactgaatcttccttaactatgttcaacgtttgttt

SEQ ID NO: 98651 - protein, 1164 aa, Arabidopsis thaliana
  peptide (1)..(1164): Ceres Seq. ID no. 13601205
  misc_feature (182)..(521): Pfam Name: Exostosin family Pfam Description: Exostosin family
  misc_feature (1)..(557): Homolog of NCBI NO: 15237602 NR Description: hypothetical protein [Arabidopsis thaliana] gb|AAF19708.1~gene_id:K1O13.4~strong similarity to unknown
  misc_feature (574)..(1164): Homolog of NCBI NO: 15237595 NR Description: glutathione transferase, putative [Arabidopsis
  misc_feature (76)..(556): Homolog of NCBI NO: 6633849 NR Description: F2K11.17 [Arabidopsis thaliana]
  misc_feature (76)..(556): Homolog of NCBI NO: 15222439 NR Description: hypothetical protein [Arabidopsis thaliana]
  misc_feature (3)..(81): Homolog of NCBI NO: 6633849 NR Description: F2K11.17 [Arabidopsis thaliana]
  misc_feature (3)..(81): Homolog of NCBI NO: 15222439 NR Description: hypothetical protein [Arabidopsis thaliana]
  misc_feature (574)..(817): Homolog of NCBI NO: 25453559 NR Description: glutathione transferase (EC 2.5.1.18) GST 10b - Arabidopsis thaliana >gi|4218144|emb|CAA10662.1| glutathione
  misc_feature (574)..(817): Homolog of NCBI NO: 10177768 NR Description: glutathione transferase [Arabidopsis thaliana]
  misc_feature (574)..(817): Homolog of NCBI NO: 15237583 NR Description: glutathione transferase, putative [Arabidopsis >gi|11357307|pir||T51594 glutathione transferase (EC 2.5.1.18)
  misc_feature (950)..(1145): Homolog of NCBI NO: 10177767 NR Description: gb|AAF19708.1~gene_id:K1O13.2~similar to unknown
MVSKRKSRTSKTIEDSCIHLCSVFFRFLYYTLPALFLFFFLLYLCLSFTTGISYNNFHMCIFSRKFNDPYCNTAGSKPGFQIISEENVTFAGEIAGDRVSKDHNKILNSVPVQEHKTKNKVDLNSLIELKAEEEYSKYIKPTSEDEGYALRAAIKYLYLQRSWLSPGDENLNKPRSCEGKGVYVYDLPSKFNSDLLVGCNDILPGVNLCSYFKNEGFGEAIKNLGKGWFATHMYSLEPILHSRVLKHPCRVYNETQAKLFFVPYYGGYDVLRWHYRNVSEDVKDRLGIEVLKWLNSKESWRRNAGKDHVFVLGKITWDFRRDKDPWGSRFLELQEMQNPTKLLIERQPWQVNDIAIPHPTYFHPRTDDDITRWQIKIMSKLRRNLVSFAGGARPDNPNNIRSTLIEQCISSNQCRFLNCTNESCTNPKNVLDLFQDSEFCLQPPGDSATRRSVFDSLISGCIPVIFTPYTAYYQYAWHLPEDHRKYSVYISEQDVKEKRVNVVEILKAKTLKEKKDMKSYIVQQLLPGLVYGDSNAKFEKFRDAFDITFDCLLKKINSVLKTFSDTQNRRKKKMKLKVYADRMSQPSRAVLIFCKVNEIQFDEILISLGKRQQLSPEFKEINPMGKVPAIVDGRLKLFESHAILIYLSSAYASVVDHWYPNDLSKRAKIHSVLDWHHTNLRPGASGYVLNSVLAPALGLPLNPKAAAEAENILTNSLSTLETFWLKGSAKFLLGGKQPSIADLSLVCELMQLQVLDDKDRLRLLSPHKKVEQWIESTRKATMPHSDEVHEVLFRAKDRFQKQREMATASKPGPQSKIIQFSSIGGTSDGPNLVQDTTDRKARRRKWSPPDDVILISAWLNTSKDRKVVVYDEQQAHTFWKRIGAHVSNSASLANLPKREWNHCRQRWRKINDYVCKFVGCYDQALNQRASGQSEDDVFQVAYQLYYNNYMSNFKLEHAWRELRHNKKWCSTYTSENSKGGGSSKRTKLNGGGVYSSSCNPESVPIALDGEEQVMDRPLGVKSSKQKEKKVATKTMLEEREADSRSRLENLWVLDEEEQVMDLPLGVKSSKQKERKVATKTMIEEREAANFRSRLGNLWLLKEKEEREADSRSRLENLWALKEKDIEEQKKLTRMEVLKSLLGRRTGETSEKEETLKNKLIDEML

SEQ ID NO: 98652 - protein, 1106 aa, Arabidopsis thaliana
  peptide (1)..(1106): Ceres Seq. ID no. 13601206
  misc_feature (124)..(463): Pfam Name: Exostosin family Pfam Description: Exostosin family
  misc_feature (1)..(499): Homolog of NCBI NO: 15237602 NR Description: hypothetical protein [Arabidopsis thaliana] gb|AAF19708.1~gene_id:K1O13.4~strong similarity to unknown
  misc_feature (516)..(1106): Homolog of NCBI NO: 15237595 NR Description: glutathione transferase, putative [Arabidopsis
  misc_feature (18)..(498): Homolog of NCBI NO: 6633849 NR Description: F2K11.17 [Arabidopsis thaliana]
  misc_feature (18)..(498): Homolog of NCBI NO: 15222439 NR Description: hypothetical protein [Arabidopsis thaliana]
  misc_feature (1)..(23): Homolog of NCBI NO: 6633849 NR Description: F2K11.17 [Arabidopsis thaliana]
  misc_feature (1)..(23): Homolog of NCBI NO: 15222439 NR Description: hypothetical protein [Arabidopsis thaliana]
  misc_feature (516)..(759): Homolog of NCBI NO: 25453559 NR Description: glutathione transferase (EC 2.5.1.18) GST 10b - Arabidopsis thaliana >gi|4218144|emb|CAA10662.1| glutathione
  misc_feature (516)..(759): Homolog of NCBI NO: 10177768 NR Description: glutathione transferase [Arabidopsis thaliana]
  misc_feature (516)..(759): Homolog of NCBI NO: 15237583 NR Description: glutathione transferase, putative [Arabidopsis >gi|11357307|pir||T51594 glutathione transferase (EC 2.5.1.18)
  misc_feature (892)..(1087): Homolog of NCBI NO: 10177767 NR Description: gb|AAF19708.1~gene_id:K1O13.2~similar to unknown
MCIFSRKFNDPYCNTAGSKPGFQIISEENVTFAGEIAGDRVSKDHNKILNSVPVQEHKTKNKVDLNSLIELKAEEEYSKYIKPTSEDEGYALRAAIKYLYLQRSWLSPGDENLNKPRSCEGKGVYVYDLPSKFNSDLLVGCNDILPGVNLCSYFKNEGFGEAIKNLGKGWFATHMYSLEPILHSRVLKHPCRVYNETQAKLFFVPYYGGYDVLRWHYRNVSEDVKDRLGIEVLKWLNSKESWRRNAGKDHVFVLGKITWDFRRDKDPWGSRFLELQEMQNPTKLLIERQPWQVNDIAIPHPTYFHPRTDDDITRWQIKIMSKLRRNLVSFAGGARPDNPNNIRSTLIEQCISSNQCRFLNCTNESCTNPKNVLDLFQDSEFCLQPPGDSATRRSVFDSLISGCIPVIFTPYTAYYQYAWHLPEDHRKYSVYISEQDVKEKRVNVVEILKAKTLKEKKDMKSYIVQQLLPGLVYGDSNAKFEKFRDAFDITFDCLLKKINSVLKTFSDTQNRRKKKMKLKVYADRMSQPSRAVLIFCKVNEIQFDEILISLGKRQQLSPEFKEINPMGKVPAIVDGRLKLFESHAILIYLSSAYASVVDHWYPNDLSKRAKIHSVLDWHHTNLRPGASGYVLNSVLAPALGLPLNPKAAAEAENILTNSLSTLETFWLKGSAKFLLGGKQPSIADLSLVCELMQLQVLDDKDRLRLLSPHKKVEQWIESTRKATMPHSDEVHEVLFRAKDRFQKQREMATASKPGPQSKIIQFSSIGGTSDGPNLVQDTTDRKARRRKWSPPDDVILISAWLNTSKDRKVVVYDEQQAHTFWKRIGAHVSNSASLANLPKREWNHCRQRWRKINDYVCKFVGCYDQALNQRASGQSEDDVFQVAYQLYYNNYMSNFKLEHAWRELRHNKKWCSTYTSENSKGGGSSKRTKLNGGGVYSSSCNPESVPIALDGEEQVMDRPLGVKSSKQKEKKVATKTMLEEREADSRSRLENLWVLDEEEQVMDLPLGVKSSKQKERKVATKTMIEEREAANFRSRLGNLWLLKEKEEREADSRSRLENLWALKEKDIEEQKKLTRMEVLKSLLGRRTGETSEKEETLKNKLIDEML

SEQ ID NO: 98653 - protein, 932 aa, Arabidopsis thaliana
  peptide (1)..(932): Ceres Seq. ID no. 13601207
  misc_feature (1)..(289): Pfam Name: Exostosin family Pfam Description: Exostosin family
  misc_feature (1)..(325): Homolog of NCBI NO: 15237602 NR Description: hypothetical protein [Arabidopsis thaliana] gb|AAF19708.1~gene_id:K1O13.4~strong similarity to unknown
  misc_feature (342)..(932): Homolog of NCBI NO: 15237595 NR Description: glutathione transferase, putative [Arabidopsis
  misc_feature (1)..(324): Homolog of NCBI NO: 6633849 NR Description: F2K11.17 [Arabidopsis thaliana]
  misc_feature (1)..(324): Homolog of NCBI NO: 15222439 NR Description: hypothetical protein [Arabidopsis thaliana]
  misc_feature (342)..(585): Homolog of NCBI NO: 25453559 NR Description: glutathione transferase (EC 2.5.1.18) GST 10b - Arabidopsis thaliana >gi|4218144|emb|CAA10662.1| glutathione
  misc_feature (342)..(585): Homolog of NCBI NO: 10177768 NR Description: glutathione transferase [Arabidopsis thaliana]
  misc_feature (342)..(585): Homolog of NCBI NO: 15237583 NR Description: glutathione transferase, putative [Arabidopsis >gi|11357307|pir||T51594 glutathione transferase (EC 2.5.1.18)
  misc_feature (718)..(913): Homolog of NCBI NO: 10177767 NR Description: gb|AAF19708.1~gene_id:K1O13.2~similar to unknown
MYSLEPILHSRVLKHPCRVYNETQAKLFFVPYYGGYDVLRWHYRNVSEDVKDRLGIEVLKWLNSKESWRRNAGKDHVFVLGKITWDFRRDKDPWGSRFLELQEMQNPTKLLIERQPWQVNDIAIPHPTYFHPRTDDDITRWQIKIMSKLRRNLVSFAGGARPDNPNNIRSTLIEQCISSNQCRFLNCTNESCTNPKNVLDLFQDSEFCLQPPGDSATRRSVFDSLISGCIPVIFTPYTAYYQYAWHLPEDHRKYSVYISEQDVKEKRVNVVEILKAKTLKEKKDMKSYIVQQLLPGLVYGDSNAKFEKFRDAFDITFDCLLKKINSVLKTFSDTQNRRKKKMKLKVYADRMSQPSRAVLIFCKVNEIQFDEILISLGKRQQLSPEFKEINPMGKVPAIVDGRLKLFESHAILIYLSSAYASVVDHWYPNDLSKRAKIHSVLDWHHTNLRPGASGYVLNSVLAPALGLPLNPKAAAEAENILTNSLSTLETFWLKGSAKFLLGGKQPSIADLSLVCELMQLQVLDDKDRLRLLSPHKKVEQWIESTRKATMPHSDEVHEVLFRAKDRFQKQREMATASKPGPQSKIIQFSSIGGTSDGPNLVQDTTDRKARRRKWSPPDDVILISAWLNTSKDRKVVVYDEQQAHTFWKRIGAHVSNSASLANLPKREWNHCRQRWRKINDYVCKFVGCYDQALNQRASGQSEDDVFQVAYQLYYNNYMSNFKLEHAWRELRHNKKWCSTYTSENSKGGGSSKRTKLNGGGVYSSSCNPESVPIALDGEEQVMDRPLGVKSSKQKEKKVATKTMLEEREADSRSRLENLWVLDEEEQVMDLPLGVKSSKQKERKVATKTMIEEREAANFRSRLGNLWLLKEKEEREADSRSRLENLWALKEKDIEEQKKLTRMEVLKSLLGRRTGETSEKEETLKNKLIDEML

SEQ ID NO: 98654 - DNA, 797 bp, Arabidopsis thaliana
  misc_feature (1)..(797): Ceres Seq. ID no. 13601208
  misc_feature: MA Experiment ID: 108462 Result: Up-regulated in Transcription
  misc_feature: MA Experiment 108462 PARAMETER Experiment Name: At_Germinating_Seeds_cDNA_P Parameter: Age (day) Value: 2 vs. 0
  misc_feature: MA Experiment 108462 PARAMETER Experiment Name: At_Germinating_Seeds_cDNA_P Parameter: Tissue Value: Germinating Seeds
  misc_feature: MA Experiment ID: 108463 Result: Up-regulated in Transcription
  misc_feature: MA Experiment 108463 PARAMETER Experiment Name: At_Germinating_Seeds_cDNA_P Parameter: Age (day) Value: 3 vs. 0
  misc_feature: MA Experiment 108463 PARAMETER Experiment Name: At_Germinating_Seeds_cDNA_P Parameter: Tissue Value: Germinating Seeds
  misc_feature: MA Experiment ID: 108464 Result: Up-regulated in Transcription
  misc_feature: MA Experiment 108464 PARAMETER Experiment Name: At_Germinating_Seeds_cDNA_P Parameter: Age (day) Value: 4 vs. 0
  misc_feature: MA Experiment 108464 PARAMETER Experiment Name: At_Germinating_Seeds_cDNA_P Parameter: Tissue Value: Germinating Seeds
  misc_feature: MA Experiment ID: 108488 Result: Down-regulated in Transcription
  misc_feature: MA Experiment ID: 108501 Result: Up-regulated in Transcription
  misc_feature: MA Experiment 108501 PARAMETER Experiment Name: At_ap2_floral_buds_cDNA_P Parameter: Plant Line Value: ap2 (Ler.)
  misc_feature: MA Experiment 108501 PARAMETER Experiment Name: At_ap2_floral_buds_cDNA_P Parameter: Tissue Value: Closed Flower
  misc_feature: MA Experiment ID: 108594 Result: Down-regulated in Transcription
  misc_feature: MA Experiment 108594 PARAMETER Experiment Name: At_Ler-rhl_Root_cDNA_P Parameter: Plant Line Value: null
  misc_feature: MA Experiment ID: 108608 Result: Up-regulated in Transcription
  misc_feature: MA Experiment 108608 PARAMETER Experiment Name: At_100uM_ABA_cDNA_P Parameter: Timepoint (hr) Value: 1
  misc_feature: MA Experiment 108608 PARAMETER Experiment Name: At_100uM_ABA_cDNA_P Parameter: Tissue Value: Aerial
  misc_feature: MA Experiment 108608 PARAMETER Experiment Name: At_100uM_ABA_cDNA_P Parameter: Treatment Value: 100uM ABA vs. No Treatment
  misc_feature: MA Experiment ID: 20000089 Result: Down-regulated in Transcription
  misc_feature: MA Experiment ID: 20000112 Result: Down-regulated in Transcription
  misc_feature: MA Experiment 20000112 PARAMETER Experiment Name: At_42deg_Heat_cDNA_P Parameter: Temperature (deg C) Value: 42 vs. 22
  misc_feature: MA Experiment 20000112 PARAMETER Experiment Name: At_42deg_Heat_cDNA_P Parameter: Timepoint (hr) Value: 2
  misc_feature: MA Experiment 20000112 PARAMETER Experiment Name: At_42deg_Heat_cDNA_P Parameter: Tissue Value: Aerial
  misc_feature: MA Experiment ID: 20000144 Result: Down-regulated in Transcription
  misc_feature: MA Experiment 20000144 PARAMETER Experiment Name: At_42deg_Heat_cDNA_P Parameter: Temperature (deg C) Value: 42 vs. 22
  misc_feature: MA Experiment 20000144 PARAMETER Experiment Name: At_42deg_Heat_cDNA_P Parameter: Timepoint (hr) Value: 1
  misc_feature: MA Experiment 20000144 PARAMETER Experiment Name: At_42deg_Heat_cDNA_P Parameter: Tissue Value: Aerial
  misc_feature: MA Experiment ID: 20000180 Result: Up-regulated in Transcription
  misc_feature: MA Experiment 20000180 PARAMETER Experiment Name: At_Germinating_Seeds_P Parameter: Age (hr) Value: 24 vs. 0
  misc_feature: MA Experiment 20000180 PARAMETER Experiment Name: At_Germinating_Seeds_P Parameter: Tissue Value: Germinating Seeds
  misc_feature: MA Experiment ID: 20000227 Result: Down-regulated in Transcription
  misc_feature: MA Experiment 20000227 PARAMETER Experiment Name: At_Root-Tips-vs-Tops_P Parameter: Tissue Value: Root Tips vs. Root Tops
  misc_feature: MA Experiment ID: 20000265 Result: Down-regulated in Transcription
  misc_feature: MA Experiment 20000265 PARAMETER Experiment Name: At_Open_Flower_P Parameter: Age (day) Value: 21
  misc_feature: MA Experiment 20000265 PARAMETER Experiment Name: At_Open_Flower_P Parameter: Plant Line Value: WS
  misc_feature: MA Experiment 20000265 PARAMETER Experiment Name: At_Open_Flower_P Parameter: Tissue Value: Closed Flower vs. Whole Plant
  misc_feature: MA Experiment ID: 20000444 Result: Up-regulated in Transcription
  misc_feature: MA Experiment 20000444 PARAMETER Experiment Name: At_100uM_NAA__P Parameter: Age (day) Value: 14
  misc_feature: MA Experiment 20000444 PARAMETER Experiment Name: At_100uM_NAA__P Parameter: Organism Value: A. thaliana
  misc_feature: MA Experiment 20000444 PARAMETER Experiment Name: At_100uM_NAA__P Parameter: Plant Line Value: WS
  misc_feature: MA Experiment 20000444 PARAMETER Experiment Name: At_100uM_NAA__P Parameter: Timepoint (hr) Value: 1
  misc_feature: MA Experiment 20000444 PARAMETER Experiment Name: At_100uM_NAA__P Parameter: Tissue Value: Aerial
  misc_feature: MA Experiment 20000444 PARAMETER Experiment Name: At_100uM_NAA__P Parameter: Treatment Value: 100uM NAA vs. No Treatment
  misc_feature: MA Experiment ID: 20000445 Result: Up-regulated in Transcription
  misc_feature: MA Experiment 20000445 PARAMETER Experiment Name: At_100uM_NAA__P Parameter: Age (day) Value: 14
  misc_feature: MA Experiment 20000445 PARAMETER Experiment Name: At_100uM_NAA__P Parameter: Organism Value: A. thaliana
  misc_feature: MA Experiment 20000445 PARAMETER Experiment Name: At_100uM_NAA__P Parameter: Plant Line Value: WS
  misc_feature: MA Experiment 20000445 PARAMETER Experiment Name: At_100uM_NAA__P Parameter: Timepoint (hr) Value: 6
  misc_feature: MA Experiment 20000445 PARAMETER Experiment Name: At_100uM_NAA__P Parameter: Tissue Value: Aerial
  misc_feature: MA Experiment 20000445 PARAMETER Experiment Name: At_100uM_NAA__P Parameter: Treatment Value: 100uM NAA vs. No Treatment
  misc_feature: MA Experiment ID: 20000794 Result: Up-regulated in Transcription
  misc_feature: MA Experiment 20000794 PARAMETER Experiment Name: At_Petals_P Parameter: Age (day) Value: 23-25 days
  misc_feature: MA Experiment 20000794 PARAMETER Experiment Name: At_Petals_P Parameter: Plant Line Value: WS
  misc_feature: MA Experiment 20000794 PARAMETER Experiment Name: At_Petals_P Parameter: Tissue Value: Petals vs. Whole plant
  misc_feature: MA Experiment ID: 20001457 Result: Down-regulated in Transcription
  misc_feature: MA Experiment 20001457 PARAMETER Experiment Name: At_50mM_NH4NO3_L-to-H_P Parameter: Age (day) Value: Undefined
  misc_feature: MA Experiment 20001457 PARAMETER Experiment Name: At_50mM_NH4NO3_L-to-H_P Parameter: Organism Value: Undefined
  misc_feature: MA Experiment 20001457 PARAMETER Experiment Name: At_50mM_NH4NO3_L-to-H_P Parameter: Plant Line Value: Undefined
  misc_feature: MA Experiment 20001457 PARAMETER Experiment Name: At_50mM_NH4NO3_L-to-H_P Parameter: Timepoint (hr) Value: 0.5
  misc_feature: MA Experiment 20001457 PARAMETER Experiment Name: At_50mM_NH4NO3_L-to-H_P Parameter: Tissue Value: Siliques
  misc_feature: MA Experiment 20001457 PARAMETER Experiment Name: At_50mM_NH4NO3_L-to-H_P Parameter: Treatment Value: 50mM NH4NO3 vs. 100mM Manitol
  misc_feature: MA Experiment ID: 20001554 Result: Up-regulated in Transcription
  misc_feature: MA Experiment 20001554 PARAMETER Experiment Name: At_Drought_Soil_Dry_P Parameter: Age (day) Value: 21
  misc_feature: MA Experiment 20001554 PARAMETER Experiment Name: At_Drought_Soil_Dry_P Parameter: Organism Value: A. thaliana
  misc_feature: MA Experiment 20001554 PARAMETER Experiment Name: At_Drought_Soil_Dry_P Parameter: Plant Line Value: WS
  misc_feature: MA Experiment 20001554 PARAMETER Experiment Name: At_Drought_Soil_Dry_P Parameter: Post Timepoint (hr) Value: None
  misc_feature: MA Experiment 20001554 PARAMETER Experiment Name: At_Drought_Soil_Dry_P Parameter: Post-Treatment Value: None
  misc_feature: MA Experiment 20001554 PARAMETER Experiment Name: At_Drought_Soil_Dry_P Parameter: Timepoint (day) Value: 7
  misc_feature: MA Experiment 20001554 PARAMETER Experiment Name: At_Drought_Soil_Dry_P Parameter: Treatment Value: Drought vs. No Drought
  misc_feature: MA Experiment ID: 20001555 Result: Up-regulated in Transcription
  misc_feature: MA Experiment 20001555 PARAMETER Experiment Name: At_Drought_Soil_Dry_P Parameter: Age (day) Value: 24
  misc_feature: MA Experiment 20001555 PARAMETER Experiment Name: At_Drought_Soil_Dry_P Parameter: Organism Value: A. thaliana
  misc_feature: MA Experiment 20001555 PARAMETER Experiment Name: At_Drought_Soil_Dry_P Parameter: Plant Line Value: WS
  misc_feature: MA Experiment 20001555 PARAMETER Experiment Name: At_Drought_Soil_Dry_P Parameter: Post Timepoint (hr) Value: None
  misc_feature: MA Experiment 20001555 PARAMETER Experiment Name: At_Drought_Soil_Dry_P Parameter: Post-Treatment Value: None
  misc_feature: MA Experiment 20001555 PARAMETER Experiment Name: At_Drought_Soil_Dry_P Parameter: Timepoint (day) Value: 10
  misc_feature: MA Experiment 20001555 PARAMETER Experiment Name: At_Drought_Soil_Dry_P Parameter: Treatment Value: Drought vs. No Drought
gttcccaactccttacgcgctctctctctatctctttagctttctctttctagcggcgaagccatgggttatccggtggggtacactgagctcctcctcccaagaatcttccttcacttactctctctcttaggcttaatacgaacactcatagacacgggttttcggatattgggtctacccgactttctcgaatccgacccggtttcatcgtcatcgtcatggctggaaccaccgtatatgtccacggcggcgcatcatcaccaagaaagctcatttttcttcccagtggcggcgaggctagctggagaaatcttgcccgtcatcagattctcggagctaactcgacccggattcggatccggatccgattgctgcgcggtgtgcctccacgagttcgagaacgatgacgagatccgacggctgacgaattgtcaacacatatttcaccggagctgtttagaccgttggatgatgggttataatcagatgacgtgtccactttgtagaacgccgtttatttctgatgagttacaagttgcttttaaccaacgagtttggtctgaatctgaacttctcgcagaatcaaattagaatctttcttgtttgggtggaattagtttctactaatgagaaaattaatttctatcttttttttttttttttgtttaatctttagctgagtggttgatatatgtaaatataaaattataggtggtgatgcttagtaaattagaagaatgaaatttgtattatccgttgaggaaaaaaaagaaatgaatggaaatcttaatttt

SEQ ID NO: 98655 - protein, 176 aa, Arabidopsis thaliana; identical to SEQ ID NO: 43604
  peptide (1)..(176): Ceres Seq. ID no. 13601209
  misc_feature (105)..(148): Pfam Name: Zinc finger, C3HC4 type (RING finger) Pfam Description: Zinc finger, C3HC4 type (RING finger)
  misc_feature (1)..(176): Homolog of NCBI NO: 15238072 NR Description: RING-H2 zinc finger protein, putative
  misc_feature (1)..(176): Homolog of NCBI NO: 21554155 NR Description: RING zinc finger protein-like [Arabidopsis
  misc_feature (1)..(173): Homolog of NCBI NO: 15222553 NR Description: RING-H2 finger protein, putative [Arabidopsis >gi|25404448|pir||E96663 probable RING zinc finger protein
  misc_feature (1)..(169): Homolog of NCBI NO: 15233117 NR Description: BRH1 RING finger protein [Arabidopsis thaliana]
  misc_feature (1)..(176): Homolog of NCBI NO: 32488512 NR Description: OSJNBa0011J08.19 [Oryza sativa (japonica
  misc_feature (58)..(170): Homolog of NCBI NO: 15233350 NR Description: RING-H2 finger protein RHA1b [Arabidopsis
  misc_feature (77)..(170): Homolog of NCBI NO: 11358777 NR Description: RING-H2 finger protein RHA1b [imported] -
  misc_feature (77)..(166): Homolog of NCBI NO: 15233352 NR Description: RING-H2 finger protein, putative [Arabidopsis
  misc_feature (77)..(156): Homolog of NCBI NO: 11358776 NR Description: RING-H2 finger protein RHA1a [imported] -
  misc_feature (1)..(153): Homolog of NCBI NO: 34897812 NR Description: P0514G12.26 [Oryza sativa (japonica

SEQ ID NO: 98656 - protein, 117 aa, Arabidopsis thaliana; identical to SEQ ID NO: 43605
  peptide (1)..(117): Ceres Seq. ID no. 13601210
  misc_feature (46)..(89): Pfam Name: Zinc finger, C3HC4 type (RING finger) Pfam Description: Zinc finger, C3HC4 type (RING finger)
  misc_feature (1)..(117): Homolog of NCBI NO: 15238072 NR Description: RING-H2 zinc finger protein, putative
  misc_feature (1)..(117): Homolog of NCBI NO: 21554155 NR Description: RING zinc finger protein-like [Arabidopsis
  misc_feature (1)..(114): Homolog of NCBI NO: 15222553 NR Description: RING-H2 finger protein, putative [Arabidopsis >gi|25404448|pir||E96663 probable RING zinc finger protein
  misc_feature (1)..(110): Homolog of NCBI NO: 15233117 NR Description: BRH1 RING finger protein [Arabidopsis thaliana]
  misc_feature (1)..(117): Homolog of NCBI NO: 32488512 NR Description: OSJNBa0011J08.19 [Oryza sativa (japonica
  misc_feature (1)..(111): Homolog of NCBI NO: 15233350 NR Description: RING-H2 finger protein RHA1b [Arabidopsis
  misc_feature (18)..(111): Homolog of NCBI NO: 11358777 NR Description: RING-H2 finger protein RHA1b [imported] -
  misc_feature (18)..(107): Homolog of NCBI NO: 15233352 NR Description: RING-H2 finger protein, putative [Arabidopsis
  misc_feature (18)..(97): Homolog of NCBI NO: 11358776 NR Description: RING-H2 finger protein RHA1a [imported] -
  misc_feature (1)..(94): Homolog of NCBI NO: 34897812 NR Description: P0514G12.26 [Oryza sativa (japonica

SEQ ID NO: 98657 - DNA, 747 bp, Arabidopsis thaliana
  misc_feature (1)..(747): Ceres Seq. ID no. 13601223
  misc_feature: MA Experiment ID: 108462 Result: Up-regulated in Transcription
  misc_feature: MA Experiment 108462 PARAMETER Experiment Name: At_Germinating_Seeds_cDNA_P Parameter: Age (day) Value: 2 vs. 0
  misc_feature: MA Experiment 108462 PARAMETER Experiment Name: At_Germinating_Seeds_cDNA_P Parameter: Tissue Value: Germinating Seeds
  misc_feature: MA Experiment ID: 108464 Result: Up-regulated in Transcription
  misc_feature: MA Experiment 108464 PARAMETER Experiment Name: At_Germinating_Seeds_cDNA_P Parameter: Age (day) Value: 4 vs. 0
  misc_feature: MA Experiment 108464 PARAMETER Experiment Name: At_Germinating_Seeds_cDNA_P Parameter: Tissue Value: Germinating Seeds
  misc_feature: MA Experiment ID: 20000113 Result: Up-regulated in Transcription
  misc_feature: MA Experiment 20000113 PARAMETER Experiment Name: At_42deg_Heat_cDNA_P Parameter: Temperature (deg C) Value: 42 vs. 22
  misc_feature: MA Experiment 20000113 PARAMETER Experiment Name: At_42deg_Heat_cDNA_P Parameter: Timepoint (hr) Value: 8
  misc_feature: MA Experiment 20000113 PARAMETER Experiment Name: At_42deg_Heat_cDNA_P Parameter: Tissue Value: Aerial
  misc_feature: MA Experiment ID: 20000355 Result: Down-regulated in Transcription
  misc_feature: MA Experiment 20000355 PARAMETER Experiment Name: At_Siliques_Sub_P Parameter: Age (day) Value: 21
  misc_feature: MA Experiment 20000355 PARAMETER Experiment Name: At_Siliques_Sub_P Parameter: Organism Value: A. thaliana
  misc_feature: MA Experiment 20000355 PARAMETER Experiment Name: At_Siliques_Sub_P Parameter: Plant Line Value: WS
  misc_feature: MA Experiment 20000355 PARAMETER Experiment Name: At_Siliques_Sub_P Parameter: Tissue Value: Less Than 5mm Siliques vs. Whole Plant
attcgcttccgtttcttaaagcataaaaaccaaaactttctctttcgttttgctttcttccaatcatctgcaggagtgaatcgcaaaaccaaatttggaggattctttctgaggggtttctcagtgagaaaatggcttcgaaacggatcttgaaggagctgaaggatctccagaaagaccctccaacctcctgcagtgcaggtccagttgctgaagacatgtttcattggcaagctacaattatgggtcctgcagagagtccgtattcaggcggtgtgtttctcgttaccattcacttccctccggactatccattcaaaccaccaaaggttgcatttaggacgaaggtgtttcaccctaatatcaacagcaacggaagcatttgccttgacattttgaaagaacaatggagccctgccctcaccatttccaaggtgttgctctcgatatgttcgctgttaacagatccaaatccagatgaccctttggtaccagagattgcacacatgtacaaaaccgacagagccaaatacgaggctactgcaagaaactggactcagaagtatgccatgggctaaacaaagattcgtatgcttcagcacctgtttatgttttcatgtctgtttctttcttcttcttgttttaactttaataaaaatgtctaaaatatcaactttttcgtctgtactatatatgtttatgggttttattatcatcatctttatctgaaatttgaagatggaattc

SEQ ID NO: 98658 - protein, 148 aa, Arabidopsis thaliana; identical to SEQ ID NO: 98183
  peptide (1)..(148): Ceres Seq. ID no. 13601224
  misc_feature (1)..(148): Homolog of NCBI NO: 30693863 NR Description: ubiquitin-conjugating enzyme 8 (UBC8)
  misc_feature (1)..(148): Homolog of NCBI NO: 21553796 NR Description: E2, ubiquitin-conjugating enzyme UBC8
  misc_feature (1)..(148): Homolog of NCBI NO: 30693871 NR Description: ubiquitin-conjugating enzyme 8 (UBC8)
  misc_feature (1)..(148): Homolog of NCBI NO: 18408001 NR Description: ubiquitin-conjugating enzyme [Arabidopsis >gi|14326529|gb|AAK60309.1|AF385718_1 At1g64230/F22C12_17 thaliana] >gi|20136192|gb|AAM11574.1|AF480945_1 ubiquitin
  misc_feature (1)..(148): Homolog of NCBI NO: 11762186 NR Description: AT4g27960 [Arabidopsis thaliana]
  misc_feature (1)..(148): Homolog of NCBI NO: 18417097 NR Description: ubiquitin-conjugating enzyme 9 (UBC9)

SEQ ID NO: 98659 - protein, 119 aa, Arabidopsis thaliana; identical to SEQ ID NO: 98184
  peptide (1)..(119): Ceres Seq. ID no. 13601225
  misc_feature (1)..(119): Homolog of NCBI NO: 30693863 NR Description: ubiquitin-conjugating enzyme 8 (UBC8)
  misc_feature (1)..(119): Homolog of NCBI NO: 21553796 NR Description: E2, ubiquitin-conjugating enzyme UBC8
  misc_feature (1)..(119): Homolog of NCBI NO: 30693871 NR Description: ubiquitin-conjugating enzyme 8 (UBC8)
  misc_feature (1)..(119): Homolog of NCBI NO: 18408001 NR Description: ubiquitin-conjugating enzyme [Arabidopsis >gi|14326529|gb|AAK60309.1|AF385718_1 At1g64230/F22C12_17 thaliana] >gi|20136192|gb|AAM11574.1|AF480945_1 ubiquitin
  misc_feature (1)..(119): Homolog of NCBI NO: 11762186 NR Description: AT4g27960 [Arabidopsis thaliana]
  misc_feature (1)..(119): Homolog of NCBI NO: 18417097 NR Description: ubiquitin-conjugating enzyme 9 (UBC9)

SEQ ID NO: 98660 - protein, 111 aa, Arabidopsis thaliana; identical to SEQ ID NO: 98185
  peptide (1)..(111): Ceres Seq. ID no. 13601226
  misc_feature (1)..(111): Homolog of NCBI NO: 30693863 NR Description: ubiquitin-conjugating enzyme 8 (UBC8)
  misc_feature (1)..(111): Homolog of NCBI NO: 21553796 NR Description: E2, ubiquitin-conjugating enzyme UBC8
  misc_feature (1)..(111): Homolog of NCBI NO: 30693871 NR Description: ubiquitin-conjugating enzyme 8 (UBC8)
  misc_feature (1)..(111): Homolog of NCBI NO: 18408001 NR Description: ubiquitin-conjugating enzyme [Arabidopsis >gi|14326529|gb|AAK60309.1|AF385718_1 At1g64230/F22C12_17 thaliana] >gi|20136192|gb|AAM11574.1|AF480945_1 ubiquitin
  misc_feature (1)..(111): Homolog of NCBI NO: 11762186 NR Description: AT4g27960 [Arabidopsis thaliana]
  misc_feature (1)..(111): Homolog of NCBI NO: 18417097 NR Description: ubiquitin-conjugating enzyme 9 (UBC9)

SEQ ID NO: 98661 - DNA, 2271 bp, Arabidopsis thaliana
  misc_feature (1)..(2271): Ceres Seq. ID no. 13601247
  misc_feature: MA Experiment ID: 108573 Result: Up-regulated in Transcription
  misc_feature: MA Experiment 108573 PARAMETER Experiment Name: At_Drought_cDNA_P Parameter: Timepoint (hr) Value: 6
  misc_feature: MA Experiment 108573 PARAMETER Experiment Name: At_Drought_cDNA_P Parameter: Tissue Value: Aerial
  misc_feature: MA Experiment 108573 PARAMETER Experiment Name: At_Drought_cDNA_P Parameter: Treatment Value: Drought vs. No Drought
  misc_feature: MA Experiment ID: 108595 Result: Down-regulated in Transcription
  misc_feature: MA Experiment 108595 PARAMETER Experiment Name: At_Ler-pi_Ovule_cDNA_P Parameter: Plant Line Value: null
  misc_feature: MA Experiment ID: 20000068 Result: Down-regulated in Transcription
  misc_feature: MA Experiment ID: 20000069 Result: Down-regulated in Transcription
  misc_feature: MA Experiment 20000069 PARAMETER Experiment Name: At_100uM_ABA_Mutants_cDNA_P Parameter: Plant Line Value: CS23
  misc_feature: MA Experiment 20000069 PARAMETER Experiment Name: At_100uM_ABA_Mutants_cDNA_P Parameter: Timepoint (hr) Value: 6
  misc_feature: MA Experiment 20000069 PARAMETER Experiment Name: At_100uM_ABA_Mutants_cDNA_P Parameter: Tissue Value: Aerial
  misc_feature: MA Experiment 20000069 PARAMETER Experiment Name: At_100uM_ABA_Mutants_cDNA_P Parameter: Treatment Value: 100uM ABA vs. No Treatment
  misc_feature: MA Experiment ID: 20000087 Result: Down-regulated in Transcription
  misc_feature: MA Experiment 20000087 PARAMETER Experiment Name: At_100uM_ABA_Mutants_cDNA_P Parameter: Plant Line Value: WS
  misc_feature: MA Experiment 20000087 PARAMETER Experiment Name: At_100uM_ABA_Mutants_cDNA_P Parameter: Timepoint (hr) Value: 6
  misc_feature: MA Experiment 20000087 PARAMETER Experiment Name: At_100uM_ABA_Mutants_cDNA_P Parameter: Tissue Value: Aerial
  misc_feature: MA Experiment 20000087 PARAMETER Experiment Name: At_100uM_ABA_Mutants_cDNA_P Parameter: Treatment Value: 100uM ABA vs. No Treatment
  misc_feature: MA Experiment ID: 20000113 Result: Down-regulated in Transcription
  misc_feature: MA Experiment 20000113 PARAMETER Experiment Name: At_42deg_Heat_cDNA_P Parameter: Temperature (deg C) Value: 42 vs. 22
  misc_feature: MA Experiment 20000113 PARAMETER Experiment Name: At_42deg_Heat_cDNA_P Parameter: Timepoint (hr) Value: 8
  misc_feature: MA Experiment 20000113 PARAMETER Experiment Name: At_42deg_Heat_cDNA_P Parameter: Tissue Value: Aerial
  misc_feature: MA Experiment ID: 20000224 Result: Down-regulated in Transcription
aacactagcaagcaaaaattcttcatcgactcaaattcaaaaactcatctctctctatctctatttctctggttccatagctcaccgtcgcatcgcagatctactccttccgcaataaattttaccggcggaggtatcagatctcgccgatctgttgtagcagctactgtattttgggcttctcatttgatattggggaaacgaggagtagaggacgatggaaaatctgatctctctggttaacaagatacagagagcttgcacggctttaggagaccatggagactccagcgctttacctactctttgggattccttgcctgcgatcgccgtcgttggtggtcagagctcagggaagtcttcagtcctggagagcatcgtgggaaaggactttttaccccgtggatctggcattgttactcgaaggccccttgtcttacagttgcaaaagatcgatgatggaacccgggagtatgcagagtttcttcacctcccgaggaaaaagtttactgattttgctgctgtgaggaaggagattcaagatgagactgacagagagactggacgcagcaaggctatttctagtgttcccattcaccttagcatatactctcccaatgttgtcaacttgacactgatagatcttccagggcttacaaaagttgctgttgatggacaatctgatagtatagtgaaggacattgaaaacatggttcggtcctacattgaaaagcccaactgcatcattttggcaatctcacctgcaaaccaagatcttgctacctcagatgcaattaaaatttcccgtgaggttgatccatcgggggacagaacatttggtgtcttgacaaagattgatcttatggacaaggggacggatgcagtggaaattctggaagggagatcttttaaacttaaatatccgtgggttggtgtcgtcaaccgttcccaagcagatattaacaagaatgtcgacatgattgcggctcggaaaagagagagggagtacttttccaatactactgagtataggcaccttgctaataaaatgggttccgagcatttggcaaagatgctctccaagcatctagaacgtgtgatcaagtcgagaattcctggcattcagtcacttattaacaaaacagtattagagctggaaactgaactaagtcgccttggaaagcctattgcagctgatgcaggggggaagttgtactcaataatggagatatgtcggctttttgatcaaatattcaaagagcatcttgatggagtgcgtgctggtggtgaaaaagtgtacaacgtgtttgataaccagcttcctgcggctctgaagagactccaatttgacaagcagctagcgatggacaacatccggaagctggtcactgaggctgatggttaccagcctcacttgattgctcctgagcaaggttaccgtcgtctcattgagtcttctattgtctccatcagaggccctgctgaagcatctgttgacaccgttcatgctatcttaaaggatctggttcacaagtctgtgaatgaaactgtggaactaaaacaatacccagctctgagagtggaggtgacaaatgcggcgatagagtcgctggataaaatgcgggaaggaagtaagaaagcaacactgcagctggttgacatggagtgcagttacctcactgttgatttcttcaggaaacttccccaggatgttgagaagggtggtaaccccacacactccattttcgaccgctacaacgattcctatctcagacgaatcggatccaatgttttgtcttacgtgaacatggtctgtgctggcctgcggaattcaatccccaagtccatcgtatactgccaagtccgagaagcgaagcgcagtctcctcgaccatttctttgcggagctcggtaccatggatatgaagaggctctcgtcgctattgaacgaagatccagcaatcatggagagacgcagtgccatctcaaagcggctagaattgtatcgagcagcccaatccgagatcgatgctgttgcttggtccaagtgataccggcatgtcatgtccactgttttgctcggttctggtcggtgtggctcagactcggagcagagatttagggtctgtaatttgtataagatgatcttcccgataccatgcagtatcgttttatataacatccacattgtttgtcctacctctatgttttttgtccatcacccgatatgttacgtatcgttttataacatccacattgtttgtcctgcctc

SEQ ID NO: 98662 - protein, 610 aa, Arabidopsis thaliana; identical to SEQ ID NO: 97587
  peptide (1)..(610): Ceres Seq. ID no. 13601248
  misc_feature (1)..(610): Homolog of NCBI NO: 2129826 NR Description: phragmoplastin 5 - soybean
  misc_feature (1)..(610): Homolog of NCBI NO: 2129825 NR Description: phragmoplastin 12 - soybean
  misc_feature (1)..(610): Homolog of NCBI NO: 5931765 NR Description: phragmoplastin [Nicotiana tabacum]
  misc_feature (1)..(610): Homolog of NCBI NO: 2267213 NR Description: dynamin-like GTP binding protein [Arabidopsis
  misc_feature (74)..(610): Homolog of NCBI NO: 11357274 NR Description: dynamin-like protein - Arabidopsis thaliana
  misc_feature (1)..(123): Homolog of NCBI NO: 11357274 NR Description: dynamin-like protein - Arabidopsis thaliana
  misc_feature (1)..(610): Homolog of NCBI NO: 30695480 NR Description: dynamin-related protein [Arabidopsis thaliana]
  misc_feature (134)..(610): Homolog of NCBI NO: 34911188 NR Description: putative dynamin-like protein [Oryza sativa
  misc_feature (1)..(152): Homolog of NCBI NO: 34911188 NR Description: putative dynamin-like protein [Oryza sativa
  misc_feature (1)..(610): Homolog of NCBI NO: 37536976 NR Description: putative phragmoplastin [Oryza sativa (japonica group)] >gi|18854996|gb|AAL79688.1| putative phragmoplastin sativa] >gi|31433579|gb|AAP55077.1| putative phragmoplastin

SEQ ID NO: 98663 - protein, 446 aa, Arabidopsis thaliana; identical to SEQ ID NO: 97588
  peptide (1)..(446): Ceres Seq. ID no. 13601249
  misc_feature (1)..(446): Homolog of NCBI NO: 2129826 NR Description: phragmoplastin 5 - soybean
  misc_feature (1)..(446): Homolog of NCBI NO: 2129825 NR Description: phragmoplastin 12 - soybean
  misc_feature (1)..(446): Homolog of NCBI NO: 5931765 NR Description: phragmoplastin [Nicotiana tabacum]
  misc_feature (1)..(446): Homolog of NCBI NO: 2267213 NR Description: dynamin-like GTP binding protein [Arabidopsis
  misc_feature (1)..(446): Homolog of NCBI NO: 11357274 NR Description: dynamin-like protein - Arabidopsis thaliana
  misc_feature (1)..(446): Homolog of NCBI NO: 30695480 NR Description: dynamin-related protein [Arabidopsis thaliana]
  misc_feature (1)..(446): Homolog of NCBI NO: 34911188 NR Description: putative dynamin-like protein [Oryza sativa
  misc_feature (1)..(446): Homolog of NCBI NO: 37536976 NR Description: putative phragmoplastin [Oryza sativa (japonica group)] >gi|18854996|gb|AAL79688.1| putative phragmoplastin sativa] >gi|31433579|gb|AAP55077.1| putative phragmoplastin
  misc_feature (1)..(326): Homolog of NCBI NO: 539581 NR Description: dynamin, internal form 2, short C-terminal form -
  misc_feature (1)..(326): Homolog of NCBI NO: 4758182 NR Description: dynamin 1; dynamin; dynamin1; Dynamin-1 [Homo

SEQ ID NO: 98664 - protein, 395 aa, Arabidopsis thaliana; identical to SEQ ID NO: 97589
  peptide (1)..(395): Ceres Seq. ID no. 13601250
  misc_feature (1)..(395): Homolog of NCBI NO: 2129826 NR Description: phragmoplastin 5 - soybean
  misc_feature (1)..(395): Homolog of NCBI NO: 2129825 NR Description: phragmoplastin 12 - soybean
  misc_feature (1)..(395): Homolog of NCBI NO: 5931765 NR Description: phragmoplastin [Nicotiana tabacum]
  misc_feature (1)..(395): Homolog of NCBI NO: 2267213 NR Description: dynamin-like GTP binding protein [Arabidopsis
  misc_feature (1)..(395): Homolog of NCBI NO: 11357274 NR Description: dynamin-like protein - Arabidopsis thaliana
  misc_feature (1)..(395): Homolog of NCBI NO: 30695480 NR Description: dynamin-related protein [Arabidopsis thaliana]
  misc_feature (1)..(395): Homolog of NCBI NO: 34911188 NR Description: putative dynamin-like protein [Oryza sativa
  misc_feature (1)..(395): Homolog of NCBI NO: 37536976 NR Description: putative phragmoplastin [Oryza sativa (japonica group)] >gi|18854996|gb|AAL79688.1| putative phragmoplastin sativa] >gi|31433579|gb|AAP55077.1| putative phragmoplastin
  misc_feature (1)..(275): Homolog of NCBI NO: 539581 NR Description: dynamin, internal form 2, short C-terminal form -
  misc_feature (1)..(275): Homolog of NCBI NO: 4758182 NR Description: dynamin 1; dynamin; dynamin1; Dynamin-1 [Homo

SEQ ID NO: 98665 - DNA, 1588 bp, Arabidopsis thaliana
  misc_feature (1)..(1588): Ceres Seq. ID no. 13601255
  misc_feature: MA Experiment ID: 108434 Result: Up-regulated in Transcription
  misc_feature: MA Experiment 108434 PARAMETER Experiment Name: At_Root_Tips_cDNA_P Parameter: Tissue Value: Root Tips
  misc_feature: MA Experiment ID: 108463 Result: Down-regulated in Transcription
  misc_feature: MA Experiment 108463 PARAMETER Experiment Name: At_Germinating_Seeds_cDNA_P Parameter: Age (day) Value: 3 vs. 0
  misc_feature: MA Experiment 108463 PARAMETER Experiment Name: At_Germinating_Seeds_cDNA_P Parameter: Tissue Value: Germinating Seeds
  misc_feature: MA Experiment ID: 108576 Result: Down-regulated in Transcription
  misc_feature: MA Experiment 108576 PARAMETER Experiment Name: At_42deg_Heat_cDNA_P Parameter: Temperature (deg C) Value: 42 vs. 22
  misc_feature: MA Experiment 108576 PARAMETER Experiment Name: At_42deg_Heat_cDNA_P Parameter: Timepoint (hr) Value: 1
  misc_feature: MA Experiment 108576 PARAMETER Experiment Name: At_42deg_Heat_cDNA_P Parameter: Tissue Value: Aerial
  misc_feature: MA Experiment ID: 108577 Result: Down-regulated in Transcription
  misc_feature: MA Experiment 108577 PARAMETER Experiment Name: At_42deg_Heat_cDNA_P Parameter: Temperature (deg C) Value: 42 vs. 22
  misc_feature: MA Experiment 108577 PARAMETER Experiment Name: At_42deg_Heat_cDNA_P Parameter: Timepoint (hr) Value: 6
  misc_feature: MA Experiment 108577 PARAMETER Experiment Name: At_42deg_Heat_cDNA_P Parameter: Tissue Value: Aerial
  misc_feature: MA Experiment ID: 108585 Result: Up-regulated in Transcription
  misc_feature: MA Experiment 108585 PARAMETER Experiment Name: At_5mM_NaNP_cDNA_P Parameter: Timepoint (hr) Value: 6
  misc_feature: MA Experiment 108585 PARAMETER Experiment Name: At_5mM_NaNP_cDNA_P Parameter: Tissue Value: Aerial
  misc_feature: MA Experiment 108585 PARAMETER Experiment Name: At_5mM_NaNP_cDNA_P Parameter: Treatment Value: null
  misc_feature: MA Experiment ID: 108668 Result: Down-regulated in Transcription
  misc_feature: MA Experiment 108668 PARAMETER Experiment Name: At_2mM_SA_cDNA_P Parameter: Plant Line Value: WS
  misc_feature: MA Experiment 108668 PARAMETER Experiment Name: At_2mM_SA_cDNA_P Parameter: Timepoint (hr) Value: 6
  misc_feature: MA Experiment 108668 PARAMETER Experiment Name: At_2mM_SA_cDNA_P Parameter: Treatment Value: 2mM SA vs. No Treatment
  misc_feature: MA Experiment ID: 20000069 Result: Down-regulated in Transcription
  misc_feature: MA Experiment 20000069 PARAMETER Experiment Name: At_100uM_ABA_Mutants_cDNA_P Parameter: Plant Line Value: CS23
  misc_feature: MA Experiment 20000069 PARAMETER Experiment Name: At_100uM_ABA_Mutants_cDNA_P Parameter: Timepoint (hr) Value: 6
  misc_feature: MA Experiment 20000069 PARAMETER Experiment Name: At_100uM_ABA_Mutants_cDNA_P Parameter: Tissue Value: Aerial
  misc_feature: MA Experiment 20000069 PARAMETER Experiment Name: At_100uM_ABA_Mutants_cDNA_P Parameter: Treatment Value: 100uM ABA vs. No Treatment
  misc_feature: MA Experiment ID: 20000071 Result: Down-regulated in Transcription
  misc_feature: MA Experiment 20000071 PARAMETER Experiment Name: At_100uM_ABA_Mutants_cDNA_P Parameter: Plant Line Value: CS8104
  misc_feature: MA Experiment 20000071 PARAMETER Experiment Name: At_100uM_ABA_Mutants_cDNA_P Parameter: Timepoint (hr) Value: 6
  misc_feature: MA Experiment 20000071 PARAMETER Experiment Name: At_100uM_ABA_Mutants_cDNA_P Parameter: Tissue Value: Aerial
  misc_feature: MA Experiment 20000071 PARAMETER Experiment Name: At_100uM_ABA_Mutants_cDNA_P Parameter: Treatment Value: 100uM ABA vs. No Treatment
  misc_feature: MA Experiment ID: 20000072 Result: Down-regulated in Transcription
  misc_feature: MA Experiment 20000072 PARAMETER Experiment Name: At_100uM_ABA_Mutants_cDNA_P Parameter: Plant Line Value: CS8105
  misc_feature: MA Experiment 20000072 PARAMETER Experiment Name: At_100uM_ABA_Mutants_cDNA_P Parameter: Timepoint (hr) Value: 6
  misc_feature: MA Experiment 20000072 PARAMETER Experiment Name: At_100uM_ABA_Mutants_cDNA_P Parameter: Tissue Value: Aerial
  misc_feature: MA Experiment 20000072 PARAMETER Experiment Name: At_100uM_ABA_Mutants_cDNA_P Parameter: Treatment Value: 100uM ABA vs. No Treatment
  misc_feature: MA Experiment ID: 20000086 Result: Down-regulated in Transcription
  misc_feature: MA Experiment 20000086 PARAMETER Experiment Name: At_100uM_ABA_Mutants_cDNA_P Parameter: Plant Line Value: CS22
  misc_feature: MA Experiment 20000086 PARAMETER Experiment Name: At_100uM_ABA_Mutants_cDNA_P Parameter: Timepoint (hr) Value: 6
  misc_feature: MA Experiment 20000086 PARAMETER Experiment Name: At_100uM_ABA_Mutants_cDNA_P Parameter: Tissue Value: Aerial
  misc_feature: MA Experiment 20000086 PARAMETER Experiment Name: At_100uM_ABA_Mutants_cDNA_P Parameter: Treatment Value: 100uM ABA vs. No Treatment
  misc_feature: MA Experiment ID: 20000087 Result: Down-regulated in Transcription
  misc_feature: MA Experiment 20000087 PARAMETER Experiment Name: At_100uM_ABA_Mutants_cDNA_P Parameter: Plant Line Value: WS
  misc_feature: MA Experiment 20000087 PARAMETER Experiment Name: At_100uM_ABA_Mutants_cDNA_P Parameter: Timepoint (hr) Value: 6
  misc_feature: MA Experiment 20000087 PARAMETER Experiment Name: At_100uM_ABA_Mutants_cDNA_P Parameter: Tissue Value: Aerial
  misc_feature: MA Experiment 20000087 PARAMETER Experiment Name: At_100uM_ABA_Mutants_cDNA_P Parameter: Treatment Value: 100uM ABA vs. No Treatment
  misc_feature: MA Experiment ID: 20000089 Result: Down-regulated in Transcription
  misc_feature: MA Experiment ID: 20000090 Result: Down-regulated in Transcription
  misc_feature: MA Experiment ID: 20000093 Result: Down-regulated in Transcription
  misc_feature: MA Experiment 20000093 PARAMETER Experiment Name: At_42deg_Heat_cDNA_P Parameter: Temperature (deg C) Value: 42 vs. 22
  misc_feature: MA Experiment 20000093 PARAMETER Experiment Name: At_42deg_Heat_cDNA_P Parameter: Timepoint (hr) Value: 0.5
  misc_feature: MA Experiment 20000093 PARAMETER Experiment Name: At_42deg_Heat_cDNA_P Parameter: Tissue Value: Aerial
  misc_feature: MA Experiment ID: 20000111 Result: Down-regulated in Transcription
  misc_feature: MA Experiment 20000111 PARAMETER Experiment Name: At_42deg_Heat_cDNA_P Parameter: Temperature (deg C) Value: 42 vs. 22
  misc_feature: MA Experiment 20000111 PARAMETER Experiment Name: At_42deg_Heat_cDNA_P Parameter: Timepoint (hr) Value: 6
  misc_feature: MA Experiment 20000111 PARAMETER Experiment Name: At_42deg_Heat_cDNA_P Parameter: Tissue Value: Aerial
  misc_feature: MA Experiment ID: 20000112 Result: Down-regulated in Transcription
  misc_feature: MA Experiment 20000112 PARAMETER Experiment Name: At_42deg_Heat_cDNA_P Parameter: Temperature (deg C) Value: 42 vs. 22
  misc_feature: MA Experiment 20000112 PARAMETER Experiment Name: At_42deg_Heat_cDNA_P Parameter: Timepoint (hr) Value: 2
  misc_feature: MA Experiment 20000112 PARAMETER Experiment Name: At_42deg_Heat_cDNA_P Parameter: Tissue Value: Aerial
  misc_feature: MA Experiment ID: 20000113 Result: Down-regulated in Transcription
  misc_feature: MA Experiment 20000113 PARAMETER Experiment Name: At_42deg_Heat_cDNA_P Parameter: Temperature (deg C) Value: 42 vs. 22
  misc_feature: MA Experiment 20000113 PARAMETER Experiment Name: At_42deg_Heat_cDNA_P Parameter: Timepoint (hr) Value: 8
  misc_feature: MA Experiment 20000113 PARAMETER Experiment Name: At_42deg_Heat_cDNA_P Parameter: Tissue Value: Aerial
  misc_feature: MA Experiment ID: 20000117 Result: Down-regulated in Transcription
  misc_feature: MA Experiment 20000117 PARAMETER Experiment Name: At_100uM_ABA_Mutants_cDNA_P Parameter: Plant Line Value: Columbia
  misc_feature: MA Experiment 20000117 PARAMETER Experiment Name: At_100uM_ABA_Mutants_cDNA_P Parameter: Timepoint (hr) Value: 6
  misc_feature: MA Experiment 20000117 PARAMETER Experiment Name: At_100uM_ABA_Mutants_cDNA_P Parameter: Tissue Value: Aerial
  misc_feature: MA Experiment 20000117 PARAMETER Experiment Name: At_100uM_ABA_Mutants_cDNA_P Parameter: Treatment Value: 100uM ABA vs. No Treatment
  misc_feature: MA Experiment ID: 20000144 Result: Down-regulated in Transcription
  misc_feature: MA Experiment 20000144 PARAMETER Experiment Name: At_42deg_Heat_cDNA_P Parameter: Temperature (deg C) Value: 42 vs. 22
  misc_feature: MA Experiment 20000144 PARAMETER Experiment Name: At_42deg_Heat_cDNA_P Parameter: Timepoint (hr) Value: 1
  misc_feature: MA Experiment 20000144 PARAMETER Experiment Name: At_42deg_Heat_cDNA_P Parameter: Tissue Value: Aerial
  misc_feature: MA Experiment ID: 20000171 Result: Down-regulated in Transcription
  misc_feature: MA Experiment 20000171 PARAMETER Experiment Name: At_42deg_Heat_P Parameter: Age (day) Value: 14
  misc_feature: MA Experiment 20000171 PARAMETER Experiment Name: At_42deg_Heat_P Parameter: Organism Value: A. thaliana
  misc_feature: MA Experiment 20000171 PARAMETER Experiment Name: At_42deg_Heat_P Parameter: Plant Line Value: WS
  misc_feature: MA Experiment 20000171 PARAMETER Experiment Name: At_42deg_Heat_P Parameter: Temperature (deg C) Value: 42 vs. 22
  misc_feature: MA Experiment 20000171 PARAMETER Experiment Name: At_42deg_Heat_P Parameter: Timepoint (hr) Value: 1
  misc_feature: MA Experiment 20000171 PARAMETER Experiment Name: At_42deg_Heat_P Parameter: Tissue Value: Aerial
  misc_feature: MA Experiment ID: 20000173 Result: Down-regulated in Transcription
  misc_feature: MA Experiment 20000173 PARAMETER Experiment Name: At_42deg_Heat_P Parameter: Age (day) Value: 14
  misc_feature: MA Experiment 20000173 PARAMETER Experiment Name: At_42deg_Heat_P Parameter: Organism Value: A. thaliana
  misc_feature: MA Experiment 20000173 PARAMETER Experiment Name: At_42deg_Heat_P Parameter: Plant Line Value: WS
  misc_feature: MA Experiment 20000173 PARAMETER Experiment Name: At_42deg_Heat_P Parameter: Temperature (deg C) Value: 42 vs. 22
  misc_feature: MA Experiment 20000173 PARAMETER Experiment Name: At_42deg_Heat_P Parameter: Timepoint (hr) Value: 6
  misc_feature: MA Experiment 20000173 PARAMETER Experiment Name: At_42deg_Heat_P Parameter: Tissue Value: Aerial
  misc_feature: MA Experiment ID: 20000184 Result: Up-regulated in Transcription
  misc_feature: MA Experiment 20000184 PARAMETER Experiment Name: At_Shoots__P Parameter: Age (day) Value: 7
  misc_feature: MA Experiment 20000184 PARAMETER Experiment Name: At_Shoots__P Parameter: Tissue Value: Shoots vs. Whole Plant
  misc_feature: MA Experiment ID: 20000185 Result: Down-regulated in Transcription
  misc_feature: MA Experiment 20000185 PARAMETER Experiment Name: At_Roots__P Parameter: Age (day) Value: 7 vs. 21
  misc_feature: MA Experiment 20000185 PARAMETER Experiment Name: At_Roots__P Parameter: Organism Value: A. thaliana
  misc_feature: MA Experiment 20000185 PARAMETER Experiment Name: At_Roots__P Parameter: Tissue Value: Roots vs. Whole Plant
  misc_feature: MA Experiment ID: 20000234 Result: Up-regulated in Transcription
  misc_feature: MA Experiment 20000234 PARAMETER Experiment Name: At_Siliques_P Parameter: Age (day) Value: 21
  misc_feature: MA Experiment 20000234 PARAMETER Experiment Name: At_Siliques_P Parameter: Organism Value: A. thaliana
  misc_feature: MA Experiment 20000234 PARAMETER Experiment Name: At_Siliques_P Parameter: Plant Line Value: WS
  misc_feature: MA Experiment 20000234 PARAMETER Experiment Name: At_Siliques_P Parameter: Tissue Value: Less Than 5mm Siliques vs. Whole Plant
  misc_feature: MA Experiment ID: 20000235 Result: Up-regulated in Transcription
  misc_feature: MA Experiment 20000235 PARAMETER Experiment Name: At_Siliques_P Parameter: Age (day) Value: 21
  misc_feature: MA Experiment 20000235 PARAMETER Experiment Name: At_Siliques_P Parameter: Organism Value: A. thaliana
  misc_feature: MA Experiment 20000235 PARAMETER Experiment Name: At_Siliques_P Parameter: Plant Line Value: WS
  misc_feature: MA Experiment 20000235 PARAMETER Experiment Name: At_Siliques_P Parameter: Tissue Value: 5-10mm Siliques vs. Whole Plant
  misc_feature: MA Experiment ID: 20000437 Result: Down-regulated in Transcription
  misc_feature: MA Experiment 20000437 PARAMETER Experiment Name: At_Drought_P Parameter: Age (day) Value: 8
  misc_feature: MA Experiment 20000437 PARAMETER Experiment Name: At_Drought_P Parameter: Organism Value: A. thaliana
  misc_feature: MA Experiment 20000437 PARAMETER Experiment Name: At_Drought_P Parameter: Plant Line Value: WS
  misc_feature: MA Experiment 20000437 PARAMETER Experiment Name: At_Drought_P Parameter: Timepoint (hr) Value: 24
  misc_feature: MA Experiment 20000437 PARAMETER Experiment Name: At_Drought_P Parameter: Tissue Value: Whole Plant
  misc_feature: MA Experiment 20000437 PARAMETER Experiment Name: At_Drought_P Parameter: Treatment Value: Drought vs. No Drought
  misc_feature: MA Experiment ID: 20000439 Result: Down-regulated in Transcription
  misc_feature: MA Experiment 20000439 PARAMETER Experiment Name: At_Roots__P Parameter: Age (day) Value: 14 vs. 21
  misc_feature: MA Experiment 20000439 PARAMETER Experiment Name: At_Roots__P Parameter: Organism Value: A. thaliana
  misc_feature: MA Experiment 20000439 PARAMETER Experiment Name: At_Roots__P Parameter: Tissue Value: Roots vs. Whole Plant
  misc_feature: MA Experiment ID: 20001247 Result: Up-regulated in Transcription
  misc_feature: MA Experiment 20001247 PARAMETER Experiment Name: At_Far-red-induction_P Parameter: Age (day) Value: 7
  misc_feature: MA Experiment 20001247 PARAMETER Experiment Name: At_Far-red-induction_P Parameter: Light Value: Far-red vs. White
  misc_feature: MA Experiment 20001247 PARAMETER Experiment Name: At_Far-red-induction_P Parameter: Organism Value: A. thaliana
  misc_feature: MA Experiment 20001247 PARAMETER Experiment Name: At_Far-red-induction_P Parameter: Plant Line Value: Columbia
  misc_feature: MA Experiment 20001247 PARAMETER Experiment Name: At_Far-red-induction_P Parameter: Timepoint (hr) Value: 1
  misc_feature: MA Experiment 20001247 PARAMETER Experiment Name: At_Far-red-induction_P Parameter: Tissue Value: Whole Plant
  misc_feature: MA Experiment ID: 20001905 Result: Down-regulated in Transcription
  misc_feature: MA Experiment 20001905 PARAMETER Experiment Name: At_Drought_Reproduction_P Parameter: Age (day) Value: 40
  misc_feature: MA Experiment 20001905 PARAMETER Experiment Name: At_Drought_Reproduction_P Parameter: Organism Value: A. thaliana
  misc_feature: MA Experiment 20001905 PARAMETER Experiment Name: At_Drought_Reproduction_P Parameter: Plant Line Value: WS
  misc_feature: MA Experiment 20001905 PARAMETER Experiment Name: At_Drought_Reproduction_P Parameter: Timepoint (day) Value: 10
  misc_feature: MA Experiment 20001905 PARAMETER Experiment Name: At_Drought_Reproduction_P Parameter: Tissue Value: Rosettes
  misc_feature: MA Experiment 20001905 PARAMETER Experiment Name: At_Drought_Reproduction_P Parameter: Treatment Value: Drought vs. No Drought
  misc_feature: MA Experiment ID: 20001911 Result: Down-regulated in Transcription
  misc_feature: MA Experiment 20001911 PARAMETER Experiment Name: At_Drought_Reproduction_P Parameter: Age (day) Value: 40
  misc_feature: MA Experiment 20001911 PARAMETER Experiment Name: At_Drought_Reproduction_P Parameter: Organism Value: A. thaliana
  misc_feature: MA Experiment 20001911 PARAMETER Experiment Name: At_Drought_Reproduction_P Parameter: Plant Line Value: WS
  misc_feature: MA Experiment 20001911 PARAMETER Experiment Name: At_Drought_Reproduction_P Parameter: Timepoint (day) Value: 10
  misc_feature: MA Experiment 20001911 PARAMETER Experiment Name: At_Drought_Reproduction_P Parameter: Tissue Value: Flowers
  misc_feature: MA Experiment 20001911 PARAMETER Experiment Name: At_Drought_Reproduction_P Parameter: Treatment Value: Drought vs. No Drought
ctctctctctctctctctcacttcatctatggcttcttcttctctgcagtctctcttctctctgttttgccttgctctgttctctcttcctctcatcgtctcctccatcggcatcaactatggccaggtcgctaacaaccttcctccccctaaaaacgtcatccctctcctcaagtctgtgggagctacaaaagtcaagctctatgacgccgatccacaagccctacgtgccttcgccggctccggcttcgagctcaccgtggccctcggtaacgagtacctggctcagatgagcgaccctattaaagcccaaggctgggtgaaggagaacgtccaagcttacctcccaaacaccaagatcgtggccatcgtagtgggaaacgaagtcctcacctcaaaccagtcagccctcacggcagccctcttcccggctatgcaaagcatccacggtgctctggtggattgtggcctaaacaagcagatctttgtgacgacggctcactcactagccatcttggatgtatcctaccctccctcggccacttccttccgccgcgacctcctcggctccctcactcccatcttggacttccacgtcaagactggctcaccaatcctcatcaacgcctaccctttcttcgcctacgaagaaaaccccaaacacgtttctctcgacttcgtactcttccaaccaaatcaaggcttcaccgatcctggctctaatttccactacgacaacatgctcttcgctcaggtcgacgcagtctatcacgctcttgacgctgtcggcatcagctacaagaaagttcccattgtcgtctccgagaccggatggccttccaacggtgacccgcaagaagtcggagccacctgcgacaatgctcgcaagtacaatgggaatctgatcaagatgatgatgagcaagaagatgaggacgcctatacgacctgagtgcgatctcaccatcttcgtctttgctctctttaacgagaacatgaagcctggaccaacctccgagaggaactacggtctcttcaaccctgacggaactccggtttactcacttgggatcaagacctcttccactcatagtagtggtagtggtagcagcaactccactggtggtagtagcagtggcggtggcggtaacactggtggctcttccagcggtggtggcatctatcagccagtcacgggtaacccatcaccggattacatgtccatttcctccgccgggggaaaaggcagattcgttgagtgtgtgttgttcttcttcttgctttgcatcatcaagcttcggttgtaaaagcttctccactagatctcgtcggctttgtacttttactcggttgatgacgtgatatagcccccaaatttaatttaattagttttgtgttggtgttttggtcggaggatgatttaggagacataccatctttgttgtgccgacctcctctccaactctttttttttttccttttccattctcctttttcttgtttaagcatagattatttaaataatgaatcttagttgattagatttttctaaagaagatgatgattttcgataattgtataacttgaag

SEQ ID NO: 98666 - protein, 434 aa, Arabidopsis thaliana; identical to SEQ ID NO: 28815
  peptide (1)..(434): Ceres Seq. ID no. 13601256
  misc_feature (36)..(357): Pfam Name: Glycosyl hydrolases family 17 Pfam Description: Glycosyl hydrolases family 17
  misc_feature (10)..(434): Homolog of NCBI NO: 15238298 NR Description: glycosyl hydrolase family 17 [Arabidopsis
  misc_feature (10)..(430): Homolog of NCBI NO: 25316443 NR Description: CDS protein F9L11.6 [imported] - Arabidopsis
  misc_feature (10)..(426): Homolog of NCBI NO: 30692765 NR Description: glycosyl hydrolase family 17 [Arabidopsis
  misc_feature (20)..(386): Homolog of NCBI NO: 419789 NR Description: hypothetical protein - potato
  misc_feature (36)..(408): Homolog of NCBI NO: 37531294 NR Description: putative beta-1,3-glucanase [Oryza sativa
  misc_feature (34)..(394): Homolog of NCBI NO: 6006371 NR Description: Similar to hypothetical protein - potato (S31196)
  misc_feature (10)..(358): Homolog of NCBI NO: 18401444 NR Description: glycosyl hydrolase family 17 [Arabidopsis
  misc_feature (10)..(358): Homolog of NCBI NO: 25316425 NR Description: probable beta-1,3-glucanase [imported] -
  misc_feature (35)..(375): Homolog of NCBI NO: 38346337 NR Description: OSJNBa0073L04.8 [Oryza sativa (japonica
  misc_feature (12)..(366): Homolog of NCBI NO: 34908492 NR Description: putative beta-1,3-glucanase [Oryza sativa

SEQ ID NO: 98667 - protein, 425 aa, Arabidopsis thaliana; identical to SEQ ID NO: 28816
  peptide (1)..(425): Ceres Seq. ID no. 13601257
  misc_feature (27)..(348): Pfam Name: Glycosyl hydrolases family 17 Pfam Description: Glycosyl hydrolases family 17
  misc_feature (1)..(425): Homolog of NCBI NO: 15238298 NR Description: glycosyl hydrolase family 17 [Arabidopsis
  misc_feature (1)..(421): Homolog of NCBI NO: 25316443 NR Description: CDS protein F9L11.6 [imported] - Arabidopsis
  misc_feature (1)..(417): Homolog of NCBI NO: 30692765 NR Description: glycosyl hydrolase family 17 [Arabidopsis
  misc_feature (11)..(377): Homolog of NCBI NO: 419789 NR Description: hypothetical protein - potato
  misc_feature (27)..(399): Homolog of NCBI NO: 37531294 NR Description: putative beta-1,3-glucanase [Oryza sativa
  misc_feature (25)..(385): Homolog of NCBI NO: 6006371 NR Description: Similar to hypothetical protein - potato (S31196)
  misc_feature (1)..(349): Homolog of NCBI NO: 18401444 NR Description: glycosyl hydrolase family 17 [Arabidopsis
  misc_feature (1)..(349): Homolog of NCBI NO: 25316425 NR Description: probable beta-1,3-glucanase [imported] -
  misc_feature (26)..(366): Homolog of NCBI NO: 38346337 NR Description: OSJNBa0073L04.8 [Oryza sativa (japonica
  misc_feature (3)..(357): Homolog of NCBI NO: 34908492 NR Description: putative beta-1,3-glucanase [Oryza sativa

SEQ ID NO: 98668 - protein, 338 aa, Arabidopsis thaliana; identical to SEQ ID NO: 28817
  peptide (1)..(338): Ceres Seq. ID no. 13601258
  misc_feature (1)..(261): Pfam Name: Glycosyl hydrolases family 17 Pfam Description: Glycosyl hydrolases family 17
  misc_feature (1)..(338): Homolog of NCBI NO: 15238298 NR Description: glycosyl hydrolase family 17 [Arabidopsis
  misc_feature (1)..(334): Homolog of NCBI NO: 25316443 NR Description: CDS protein F9L11.6 [imported] - Arabidopsis
  misc_feature (1)..(330): Homolog of NCBI NO: 30692765 NR Description: glycosyl hydrolase family 17 [Arabidopsis
  misc_feature (1)..(290): Homolog of NCBI NO: 419789 NR Description: hypothetical protein - potato
  misc_feature (1)..(312): Homolog of NCBI NO: 37531294 NR Description: putative beta-1,3-glucanase [Oryza sativa
  misc_feature (1)..(298): Homolog of NCBI NO: 6006371 NR Description: Similar to hypothetical protein - potato (S31196)
  misc_feature (1)..(262): Homolog of NCBI NO: 18401444 NR Description: glycosyl hydrolase family 17 [Arabidopsis
  misc_feature (1)..(262): Homolog of NCBI NO: 25316425 NR Description: probable beta-1,3-glucanase [imported] -
  misc_feature (1)..(279): Homolog of NCBI NO: 38346337 NR Description: OSJNBa0073L04.8 [Oryza sativa (japonica
  misc_feature (1)..(270): Homolog of NCBI NO: 34908492 NR Description: putative beta-1,3-glucanase [Oryza sativa

SEQ ID NO: 98669 - DNA, 786 bp, Arabidopsis thaliana
  misc_feature (1)..(786): Ceres Seq. ID no. 13601270
  misc_feature: MA Experiment ID: 108434 Result: Down-regulated in Transcription
  misc_feature: MA Experiment 108434 PARAMETER Experiment Name: At_Root_Tips_cDNA_P Parameter: Tissue Value: Root Tips
  misc_feature: MA Experiment ID: 108464 Result: Up-regulated in Transcription
  misc_feature: MA Experiment 108464 PARAMETER Experiment Name: At_Germinating_Seeds_cDNA_P Parameter: Age (day) Value: 4 vs. 0
  misc_feature: MA Experiment 108464 PARAMETER Experiment Name: At_Germinating_Seeds_cDNA_P Parameter: Tissue Value: Germinating Seeds
  misc_feature: MA Experiment ID: 108561 Result: Up-regulated in Transcription
  misc_feature: MA Experiment 108561 PARAMETER Experiment Name: At_100uM_ABA_cDNA_P Parameter: Timepoint (hr) Value: 6
  misc_feature: MA Experiment 108561 PARAMETER Experiment Name: At_100uM_ABA_cDNA_P Parameter: Tissue Value: Aerial
  misc_feature: MA Experiment 108561 PARAMETER Experiment Name: At_100uM_ABA_cDNA_P Parameter: Treatment Value: 100uM ABA vs. No Treatment
  misc_feature: MA Experiment ID: 108594 Result: Down-regulated in Transcription
  misc_feature: MA Experiment 108594 PARAMETER Experiment Name: At_Ler-rhl_Root_cDNA_P Parameter: Plant Line Value: null
  misc_feature: MA Experiment ID: 108595 Result: Up-regulated in Transcription
  misc_feature: MA Experiment 108595 PARAMETER Experiment Name: At_Ler-pi_Ovule_cDNA_P Parameter: Plant Line Value: null
  misc_feature: MA Experiment ID: 108605 Result: Up-regulated in Transcription
  misc_feature: MA Experiment 108605 PARAMETER Experiment Name: At_100uM_ABA_cDNA_P Parameter: Timepoint (hr) Value: 6
  misc_feature: MA Experiment 108605 PARAMETER Experiment Name: At_100uM_ABA_cDNA_P Parameter: Tissue Value: Aerial
  misc_feature: MA Experiment 108605 PARAMETER Experiment Name: At_100uM_ABA_cDNA_P Parameter: Treatment Value: 100uM ABA vs. No Treatment
  misc_feature: MA Experiment ID: 108607 Result: Up-regulated in Transcription
  misc_feature: MA Experiment 108607 PARAMETER Experiment Name: At_100uM_ABA_cDNA_P Parameter: Timepoint (hr) Value: 4
  misc_feature: MA Experiment 108607 PARAMETER Experiment Name: At_100uM_ABA_cDNA_P Parameter: Tissue Value: Aerial
  misc_feature: MA Experiment 108607 PARAMETER Experiment Name: At_100uM_ABA_cDNA_P Parameter: Treatment Value: 100uM ABA vs. No Treatment
  misc_feature: MA Experiment ID: 108609 Result: Up-regulated in Transcription
  misc_feature: MA Experiment 108609 PARAMETER Experiment Name: At_100uM_ABA_cDNA_P Parameter: Timepoint (hr) Value: 24
  misc_feature: MA Experiment 108609 PARAMETER Experiment Name: At_100uM_ABA_cDNA_P Parameter: Tissue Value: Aerial
  misc_feature: MA Experiment 108609 PARAMETER Experiment Name: At_100uM_ABA_cDNA_P Parameter: Treatment Value: 100uM ABA vs. No Treatment
  misc_feature: MA Experiment ID: 108668 Result: Down-regulated in Transcription
  misc_feature: MA Experiment 108668 PARAMETER Experiment Name: At_2mM_SA_cDNA_P Parameter: Plant Line Value: WS
  misc_feature: MA Experiment 108668 PARAMETER Experiment Name: At_2mM_SA_cDNA_P Parameter: Timepoint (hr) Value: 6
  misc_feature: MA Experiment 108668 PARAMETER Experiment Name: At_2mM_SA_cDNA_P Parameter: Treatment Value: 2mM SA vs. No Treatment
  misc_feature: MA Experiment ID: 20000069 Result: Up-regulated in Transcription
  misc_feature: MA Experiment 20000069 PARAMETER Experiment Name: At_100uM_ABA_Mutants_cDNA_P Parameter: Plant Line Value: CS23
  misc_feature: MA Experiment 20000069 PARAMETER Experiment Name: At_100uM_ABA_Mutants_cDNA_P Parameter: Timepoint (hr) Value: 6
  misc_feature: MA Experiment 20000069 PARAMETER Experiment Name: At_100uM_ABA_Mutants_cDNA_P Parameter: Tissue Value: Aerial
  misc_feature: MA Experiment 20000069 PARAMETER Experiment Name: At_100uM_ABA_Mutants_cDNA_P Parameter: Treatment Value: 100uM ABA vs. No Treatment
  misc_feature: MA Experiment ID: 20000070 Result: Up-regulated in Transcription
  misc_feature: MA Experiment 20000070 PARAMETER Experiment Name: At_100uM_ABA_Mutants_cDNA_P Parameter: Plant Line Value: CS24
  misc_feature: MA Experiment 20000070 PARAMETER Experiment Name: At_100uM_ABA_Mutants_cDNA_P Parameter: Timepoint (hr) Value: 6
  misc_feature: MA Experiment 20000070 PARAMETER Experiment Name: At_100uM_ABA_Mutants_cDNA_P Parameter: Tissue Value: Aerial
  misc_feature: MA Experiment 20000070 PARAMETER Experiment Name: At_100uM_ABA_Mutants_cDNA_P Parameter: Treatment Value: 100uM ABA vs. No Treatment
  misc_feature: MA Experiment ID: 20000071 Result: Up-regulated in Transcription
  misc_feature: MA Experiment 20000071 PARAMETER Experiment Name: At_100uM_ABA_Mutants_cDNA_P Parameter: Plant Line Value: CS8104
  misc_feature: MA Experiment 20000071 PARAMETER Experiment Name: At_100uM_ABA_Mutants_cDNA_P Parameter: Timepoint (hr) Value: 6
  misc_feature: MA Experiment 20000071 PARAMETER Experiment Name: At_100uM_ABA_Mutants_cDNA_P Parameter: Tissue Value: Aerial
  misc_feature: MA Experiment 20000071 PARAMETER Experiment Name: At_100uM_ABA_Mutants_cDNA_P Parameter: Treatment Value: 100uM ABA vs. No Treatment
  misc_feature: MA Experiment ID: 20000086 Result: Up-regulated in Transcription
  misc_feature: MA Experiment 20000086 PARAMETER Experiment Name: At_100uM_ABA_Mutants_cDNA_P Parameter: Plant Line Value: CS22
  misc_feature: MA Experiment 20000086 PARAMETER Experiment Name: At_100uM_ABA_Mutants_cDNA_P Parameter: Timepoint (hr) Value: 6
  misc_feature: MA Experiment 20000086 PARAMETER Experiment Name: At_100uM_ABA_Mutants_cDNA_P Parameter: Tissue Value: Aerial
  misc_feature: MA Experiment 20000086 PARAMETER Experiment Name: At_100uM_ABA_Mutants_cDNA_P Parameter: Treatment Value: 100uM ABA vs. No Treatment
  misc_feature: MA Experiment ID: 20000087 Result: Up-regulated in Transcription
  misc_feature: MA Experiment 20000087 PARAMETER Experiment Name: At_100uM_ABA_Mutants_cDNA_P Parameter: Plant Line Value: WS
  misc_feature: MA Experiment 20000087 PARAMETER Experiment Name: At_100uM_ABA_Mutants_cDNA_P Parameter: Timepoint (hr) Value: 6
  misc_feature: MA Experiment 20000087 PARAMETER Experiment Name: At_100uM_ABA_Mutants_cDNA_P Parameter: Tissue Value: Aerial
  misc_feature: MA Experiment 20000087 PARAMETER Experiment Name: At_100uM_ABA_Mutants_cDNA_P Parameter: Treatment Value: 100uM ABA vs. No Treatment
  misc_feature: MA Experiment ID: 20000117 Result: Up-regulated in Transcription
  misc_feature: MA Experiment 20000117 PARAMETER Experiment Name: At_100uM_ABA_Mutants_cDNA_P Parameter: Plant Line Value: Columbia
  misc_feature: MA Experiment 20000117 PARAMETER Experiment Name: At_100uM_ABA_Mutants_cDNA_P Parameter: Timepoint (hr) Value: 6
  misc_feature: MA Experiment 20000117 PARAMETER Experiment Name: At_100uM_ABA_Mutants_cDNA_P Parameter: Tissue Value: Aerial
  misc_feature: MA Experiment 20000117 PARAMETER Experiment Name: At_100uM_ABA_Mutants_cDNA_P Parameter: Treatment Value: 100uM ABA vs. No Treatment
  misc_feature: MA Experiment ID: 20000169 Result: Up-regulated in Transcription
  misc_feature: MA Experiment 20000169 PARAMETER Experiment Name: At_100uM_ABA_P Parameter: Age (day) Value: 14
  misc_feature: MA Experiment 20000169 PARAMETER Experiment Name: At_100uM_ABA_P Parameter: Organism Value: A. thaliana
  misc_feature: MA Experiment 20000169 PARAMETER Experiment Name: At_100uM_ABA_P Parameter: Plant Line Value: WS
  misc_feature: MA Experiment 20000169 PARAMETER Experiment Name: At_100uM_ABA_P Parameter: Timepoint (hr) Value: 6
  misc_feature: MA Experiment 20000169 PARAMETER Experiment Name: At_100uM_ABA_P Parameter: Tissue Value: Aerial
  misc_feature: MA Experiment 20000169 PARAMETER Experiment Name: At_100uM_ABA_P Parameter: Treatment Value: 100uM ABA vs. No Treatment
  misc_feature: MA Experiment ID: 20000214 Result: Down-regulated in Transcription
  misc_feature: MA Experiment 20000214 PARAMETER Experiment Name: At_4deg_Cold_P Parameter: Timepoint (hr) Value: 6
  misc_feature: MA Experiment ID: 20000265 Result: Down-regulated in Transcription
  misc_feature: MA Experiment 20000265 PARAMETER Experiment Name: At_Open_Flower_P Parameter: Age (day) Value: 21
  misc_feature: MA Experiment 20000265 PARAMETER Experiment Name: At_Open_Flower_P Parameter: Plant Line Value: WS
  misc_feature: MA Experiment 20000265 PARAMETER Experiment Name: At_Open_Flower_P Parameter: Tissue Value: Closed Flower vs. Whole Plant
  misc_feature: MA Experiment ID: 20000439 Result: Down-regulated in Transcription
  misc_feature: MA Experiment 20000439 PARAMETER Experiment Name: At_Roots__P Parameter: Age (day) Value: 14 vs. 21
  misc_feature: MA Experiment 20000439 PARAMETER Experiment Name: At_Roots__P Parameter: Organism Value: A. thaliana
  misc_feature: MA Experiment 20000439 PARAMETER Experiment Name: At_Roots__P Parameter: Tissue Value: Roots vs. Whole Plant
  misc_feature: MA Experiment ID: 20000453 Result: Up-regulated in Transcription
  misc_feature: MA Experiment 20000453 PARAMETER Experiment Name: At_100uM_ABA_P Parameter: Age (day) Value: 15
  misc_feature: MA Experiment 20000453 PARAMETER Experiment Name: At_100uM_ABA_P Parameter: Organism Value: A. thaliana
  misc_feature: MA Experiment 20000453 PARAMETER Experiment Name: At_100uM_ABA_P Parameter: Plant Line Value: WS
  misc_feature: MA Experiment 20000453 PARAMETER Experiment Name: At_100uM_ABA_P Parameter: Timepoint (hr) Value: 24
  misc_feature: MA Experiment 20000453 PARAMETER Experiment Name: At_100uM_ABA_P Parameter: Tissue Value: Aerial
  misc_feature: MA Experiment 20000453 PARAMETER Experiment Name: At_100uM_ABA_P Parameter: Treatment Value: 100uM ABA vs. No Treatment
  misc_feature: MA Experiment ID: 20001248 Result: Up-regulated in Transcription
  misc_feature: MA Experiment 20001248 PARAMETER Experiment Name: At_Far-red-induction_P Parameter: Age (day) Value: 7
  misc_feature: MA Experiment 20001248 PARAMETER Experiment Name: At_Far-red-induction_P Parameter: Light Value: Far-red vs. White
  misc_feature: MA Experiment 20001248 PARAMETER Experiment Name: At_Far-red-induction_P Parameter: Organism Value: A. thaliana
  misc_feature: MA Experiment 20001248 PARAMETER Experiment Name: At_Far-red-induction_P Parameter: Plant Line Value: Columbia
  misc_feature: MA Experiment 20001248 PARAMETER Experiment Name: At_Far-red-induction_P Parameter: Timepoint (hr) Value: 4
  misc_feature: MA Experiment 20001248 PARAMETER Experiment Name: At_Far-red-induction_P Parameter: Tissue Value: Whole Plant
  misc_feature: MA Experiment ID: 20001910 Result: Up-regulated in Transcription
  misc_feature: MA Experiment 20001910 PARAMETER Experiment Name: At_Drought_Reproduction_P Parameter: Age (day) Value: 37
  misc_feature: MA Experiment 20001910 PARAMETER Experiment Name: At_Drought_Reproduction_P Parameter: Organism Value: A. thaliana
  misc_feature: MA Experiment 20001910 PARAMETER Experiment Name: At_Drought_Reproduction_P Parameter: Plant Line Value: WS
  misc_feature: MA Experiment 20001910 PARAMETER Experiment Name: At_Drought_Reproduction_P Parameter: Timepoint (day) Value: 7
  misc_feature: MA Experiment 20001910 PARAMETER Experiment Name: At_Drought_Reproduction_P Parameter: Tissue Value: Flowers
  misc_feature: MA Experiment 20001910 PARAMETER Experiment Name: At_Drought_Reproduction_P Parameter: Treatment Value: Drought vs. No Drought
aacaacacttagagaacaagcagaggaatataactttttttttctttttcctttttgcttttttacaaccaaaaaaataaagcaagccgtagagagcaagagacggtgtaaagatgcactacacacgcatctcgccggctttagtaccatctctatcaccaaccgccgcggctgaatctagcggtggtgggacgatgatagctactgttttcatggcccttctcctcccctgcgtcggcatgtgcatcgtcttcctaatctatctattcctcttgtggtgctccacacggcgtcgtatcgaacgccttcgatttgctgaaccggttaaaccggtcacaggtaaaggcctttcggtgttggagctcgagaaaatccctaaactcaccggaagagagctagccgtaatagctagatcaacggaatgtgctgtttgccttgaagatatagagagtggtcaatcgactcgtctagttcccggttgcaaccatgggtttcaccaattatgtgctgatacgtggctatctaaccacacggtttgtccagtttgccgcgccgagctggctccgaacctacctcaatgtaatgaaaatcaaagtccatgttagaaacagaattttcaaaaacattctttccttcttttttactcgttttgtgtacttctcttgtttttcccttttcttagttttgtgtaagcgttatagagagagaagtttccaggttgtaactagccttgttgtttttttttgtacatgaaattagttttagagtaaattacgaaatttacag

SEQ ID NO: 98670 - protein, 163 aa, Arabidopsis thaliana; identical to SEQ ID NO: 26881
  peptide (1)..(163): Ceres Seq. ID no. 13601271
  misc_feature (104)..(145): Pfam Name: Zinc finger, C3HC4 type (RING finger) Pfam Description: Zinc finger, C3HC4 type (RING finger)
  misc_feature (1)..(163): Homolog of NCBI NO: 15238323 NR Description: zinc finger (C3HC4-type RING finger) protein [Arabidopsis thaliana] >gi|9757965|dbj|BAB08453.1| to unknown protein [Arabidopsis thaliana]
  misc_feature (1)..(163): Homolog of NCBI NO: 21593762 NR Description: unknown [Arabidopsis thaliana]
  misc_feature (10)..(158): Homolog of NCBI NO: 15218042 NR Description: RING zinc finger protein -related [Arabidopsis
  misc_feature (10)..(158): Homolog of NCBI NO: 15223041 NR Description: RING zinc finger protein -related [Arabidopsis
  misc_feature (10)..(158): Homolog of NCBI NO: 21555237 NR Description: putative RING zinc finger protein [Arabidopsis
  misc_feature (2)..(146): Homolog of NCBI NO: 15222071 NR Description: RING-H2 finger protein RHA3a -related
  misc_feature (20)..(147): Homolog of NCBI NO: 34903920 NR Description: OSJNBa0038J17.5 [Oryza sativa (japonica
  misc_feature (9)..(146): Homolog of NCBI NO: 15222069 NR Description: RING-H2 finger protein RHA3a -related
  misc_feature (9)..(146): Homolog of NCBI NO: 7770352 NR Description: F27J15.3 [Arabidopsis thaliana]
  misc_feature (2)..(146): Homolog of NCBI NO: 25405963 NR Description: protein F27J15.2 [imported] - Arabidopsis >gi|7770353|gb|AAF69723.1|AC016041_28 F27J15.2 [Arabidopsis

SEQ ID NO: 98671 - protein, 136 aa, Arabidopsis thaliana; identical to SEQ ID NO: 26882
  peptide (1)..(136): Ceres Seq. ID no. 13601272
  misc_feature (77)..(118): Pfam Name: Zinc finger, C3HC4 type (RING finger) Pfam Description: Zinc finger, C3HC4 type (RING finger)
  misc_feature (1)..(136): Homolog of NCBI NO: 15238323 NR Description: zinc finger (C3HC4-type RING finger) protein [Arabidopsis thaliana] >gi|9757965|dbj|BAB08453.1| to unknown protein [Arabidopsis thaliana]
  misc_feature (1)..(136): Homolog of NCBI NO: 21593762 NR Description: unknown [Arabidopsis thaliana]
  misc_feature (1)..(131): Homolog of NCBI NO: 15218042 NR Description: RING zinc finger protein -related [Arabidopsis
  misc_feature (1)..(131): Homolog of NCBI NO: 15223041 NR Description: RING zinc finger protein -related [Arabidopsis
  misc_feature (1)..(131): Homolog of NCBI NO: 21555237 NR Description: putative RING zinc finger protein [Arabidopsis
  misc_feature (1)..(119): Homolog of NCBI NO: 15222071 NR Description: RING-H2 finger protein RHA3a -related
  misc_feature (1)..(120): Homolog of NCBI NO: 34903920 NR Description: OSJNBa0038J17.5 [Oryza sativa (japonica
  misc_feature (1)..(119): Homolog of NCBI NO: 15222069 NR Description: RING-H2 finger protein RHA3a -related
  misc_feature (1)..(119): Homolog of NCBI NO: 7770352 NR Description: F27J15.3 [Arabidopsis thaliana]
  misc_feature (1)..(119): Homolog of NCBI NO: 25405963 NR Description: protein F27J15.2 [imported] - Arabidopsis >gi|7770353|gb|AAF69723.1|AC016041_28 F27J15.2 [Arabidopsis

SEQ ID NO: 98672 - protein, 130 aa, Arabidopsis thaliana; identical to SEQ ID NO: 26883
  peptide (1)..(130): Ceres Seq. ID no. 13601273
  misc_feature (71)..(112): Pfam Name: Zinc finger, C3HC4 type (RING finger) Pfam Description: Zinc finger, C3HC4 type (RING finger)
  misc_feature (1)..(130): Homolog of NCBI NO: 15238323 NR Description: zinc finger (C3HC4-type RING finger) protein [Arabidopsis thaliana] >gi|9757965|dbj|BAB08453.1| to unknown protein [Arabidopsis thaliana]
  misc_feature (1)..(130): Homolog of NCBI NO: 21593762 NR Description: unknown [Arabidopsis thaliana]
  misc_feature (1)..(125): Homolog of NCBI NO: 15218042 NR Description: RING zinc finger protein -related [Arabidopsis
  misc_feature (1)..(125): Homolog of NCBI NO: 15223041 NR Description: RING zinc finger protein -related [Arabidopsis
  misc_feature (1)..(125): Homolog of NCBI NO: 21555237 NR Description: putative RING zinc finger protein [Arabidopsis
  misc_feature (1)..(113): Homolog of NCBI NO: 15222071 NR Description: RING-H2 finger protein RHA3a -related
  misc_feature (1)..(114): Homolog of NCBI NO: 34903920 NR Description: OSJNBa0038J17.5 [Oryza sativa (japonica
  misc_feature (1)..(113): Homolog of NCBI NO: 15222069 NR Description: RING-H2 finger protein RHA3a -related
  misc_feature (1)..(113): Homolog of NCBI NO: 7770352 NR Description: F27J15.3 [Arabidopsis thaliana]
  misc_feature (1)..(113): Homolog of NCBI NO: 25405963 NR Description: protein F27J15.2 [imported] - Arabidopsis >gi|7770353|gb|AAF69723.1|AC016041_28 F27J15.2 [Arabidopsis

SEQ ID NO: 98673 - DNA, 1352 bp, Arabidopsis thaliana
  misc_feature (1)..(1352): Ceres Seq. ID no. 13601278
  misc_feature: MA Experiment ID: 108435 Result: Down-regulated in Transcription
  misc_feature: MA Experiment 108435 PARAMETER Experiment Name: At_stm_Mutants_cDNA_P Parameter: Plant Line Value: wt Landsburg vs stm
  misc_feature: MA Experiment 108435 PARAMETER Experiment Name: At_stm_Mutants_cDNA_P Parameter: Tissue Value: Shoot Apical Meristem Region
  misc_feature: MA Experiment ID: 108461 Result: Down-regulated in Transcription
  misc_feature: MA Experiment 108461 PARAMETER Experiment Name: At_Germinating_Seeds_cDNA_P Parameter: Age (day) Value: 1 vs. 0
  misc_feature: MA Experiment 108461 PARAMETER Experiment Name: At_Germinating_Seeds_cDNA_P Parameter: Tissue Value: Germinating Seeds
  misc_feature: MA Experiment ID: 108462 Result: Down-regulated in Transcription
  misc_feature: MA Experiment 108462 PARAMETER Experiment Name: At_Germinating_Seeds_cDNA_P Parameter: Age (day) Value: 2 vs. 0
  misc_feature: MA Experiment 108462 PARAMETER Experiment Name: At_Germinating_Seeds_cDNA_P Parameter: Tissue Value: Germinating Seeds
  misc_feature: MA Experiment ID: 108463 Result: Down-regulated in Transcription
  misc_feature: MA Experiment 108463 PARAMETER Experiment Name: At_Germinating_Seeds_cDNA_P Parameter: Age (day) Value: 3 vs. 0
  misc_feature: MA Experiment 108463 PARAMETER Experiment Name: At_Germinating_Seeds_cDNA_P Parameter: Tissue Value: Germinating Seeds
  misc_feature: MA Experiment ID: 108464 Result: Down-regulated in Transcription
  misc_feature: MA Experiment 108464 PARAMETER Experiment Name: At_Germinating_Seeds_cDNA_P Parameter: Age (day) Value: 4 vs. 0
  misc_feature: MA Experiment 108464 PARAMETER Experiment Name: At_Germinating_Seeds_cDNA_P Parameter: Tissue Value: Germinating Seeds
  misc_feature: MA Experiment ID: 108668 Result: Up-regulated in Transcription
  misc_feature: MA Experiment 108668 PARAMETER Experiment Name: At_2mM_SA_cDNA_P Parameter: Plant Line Value: WS
  misc_feature: MA Experiment 108668 PARAMETER Experiment Name: At_2mM_SA_cDNA_P Parameter: Timepoint (hr) Value: 6
  misc_feature: MA Experiment 108668 PARAMETER Experiment Name: At_2mM_SA_cDNA_P Parameter: Treatment Value: 2mM SA vs. No Treatment
  misc_feature: MA Experiment ID: 20000068 Result: Down-regulated in Transcription
  misc_feature: MA Experiment ID: 20000111 Result: Down-regulated in Transcription
  misc_feature: MA Experiment 20000111 PARAMETER Experiment Name: At_42deg_Heat_cDNA_P Parameter: Temperature (deg C) Value: 42 vs. 22
  misc_feature: MA Experiment 20000111 PARAMETER Experiment Name: At_42deg_Heat_cDNA_P Parameter: Timepoint (hr) Value: 6
  misc_feature: MA Experiment 20000111 PARAMETER Experiment Name: At_42deg_Heat_cDNA_P Parameter: Tissue Value: Aerial
  misc_feature: MA Experiment ID: 20000180 Result: Down-regulated in Transcription
  misc_feature: MA Experiment 20000180 PARAMETER Experiment Name: At_Germinating_Seeds_P Parameter: Age (hr) Value: 24 vs. 0
  misc_feature: MA Experiment 20000180 PARAMETER Experiment Name: At_Germinating_Seeds_P Parameter: Tissue Value: Germinating Seeds
  misc_feature: MA Experiment ID: 20000182 Result: Up-regulated in Transcription
  misc_feature: MA Experiment 20000182 PARAMETER Experiment Name: At_2mM_SA_P Parameter: Age (day) Value: 14
  misc_feature: MA Experiment 20000182 PARAMETER Experiment Name: At_2mM_SA_P Parameter: Organism Value: A. thaliana
  misc_feature: MA Experiment 20000182 PARAMETER Experiment Name: At_2mM_SA_P Parameter: Plant Line Value: WS
  misc_feature: MA Experiment 20000182 PARAMETER Experiment Name: At_2mM_SA_P Parameter: Timepoint (hr) Value: 6
  misc_feature: MA Experiment 20000182 PARAMETER Experiment Name: At_2mM_SA_P Parameter: Tissue Value: Aerial
  misc_feature: MA Experiment 20000182 PARAMETER Experiment Name: At_2mM_SA_P Parameter: Treatment Value: 2mM SA vs. No Treatment
  misc_feature: MA Experiment ID: 20000185 Result: Up-regulated in Transcription
  misc_feature: MA Experiment 20000185 PARAMETER Experiment Name: At_Roots__P Parameter: Age (day) Value: 7 vs. 21
  misc_feature: MA Experiment 20000185 PARAMETER Experiment Name: At_Roots__P Parameter: Organism Value: A. thaliana
  misc_feature: MA Experiment 20000185 PARAMETER Experiment Name: At_Roots__P Parameter: Tissue Value: Roots vs. Whole Plant
  misc_feature: MA Experiment ID: 20000234 Result: Down-regulated in Transcription
  misc_feature: MA Experiment 20000234 PARAMETER Experiment Name: At_Siliques_P Parameter: Age (day) Value: 21
  misc_feature: MA Experiment 20000234 PARAMETER Experiment Name: At_Siliques_P Parameter: Organism Value: A. thaliana
  misc_feature: MA Experiment 20000234 PARAMETER Experiment Name: At_Siliques_P Parameter: Plant Line Value: WS
  misc_feature: MA Experiment 20000234 PARAMETER Experiment Name: At_Siliques_P Parameter: Tissue Value: Less Than 5mm Siliques vs. Whole Plant
  misc_feature: MA Experiment ID: 20000235 Result: Down-regulated in Transcription
  misc_feature: MA Experiment 20000235 PARAMETER Experiment Name: At_Siliques_P Parameter: Age (day) Value: 21
  misc_feature: MA Experiment 20000235 PARAMETER Experiment Name: At_Siliques_P Parameter: Organism Value: A. thaliana
  misc_feature: MA Experiment 20000235 PARAMETER Experiment Name: At_Siliques_P Parameter: Plant Line Value: WS
  misc_feature: MA Experiment 20000235 PARAMETER Experiment Name: At_Siliques_P Parameter: Tissue Value: 5-10mm Siliques vs. Whole Plant
  misc_feature: MA Experiment ID: 20000265 Result: Down-regulated in Transcription
  misc_feature: MA Experiment 20000265 PARAMETER Experiment Name: At_Open_Flower_P Parameter: Age (day) Value: 21
  misc_feature: MA Experiment 20000265 PARAMETER Experiment Name: At_Open_Flower_P Parameter: Plant Line Value: WS
  misc_feature: MA Experiment 20000265 PARAMETER Experiment Name: At_Open_Flower_P Parameter: Tissue Value: Closed Flower vs. Whole Plant
  misc_feature: MA Experiment ID: 20000437 Result: Down-regulated in Transcription
  misc_feature: MA Experiment 20000437 PARAMETER Experiment Name: At_Drought_P Parameter: Age (day) Value: 8
  misc_feature: MA Experiment 20000437 PARAMETER Experiment Name: At_Drought_P Parameter: Organism Value: A. thaliana
  misc_feature: MA Experiment 20000437 PARAMETER Experiment Name: At_Drought_P Parameter: Plant Line Value: WS
  misc_feature: MA Experiment 20000437 PARAMETER Experiment Name: At_Drought_P Parameter: Timepoint (hr) Value: 24
  misc_feature: MA Experiment 20000437 PARAMETER Experiment Name: At_Drought_P Parameter: Tissue Value: Whole Plant
  misc_feature: MA Experiment 20000437 PARAMETER Experiment Name: At_Drought_P Parameter: Treatment Value: Drought vs. No Drought
  misc_feature: MA Experiment ID: 20000495 Result: Down-regulated in Transcription
  misc_feature: MA Experiment 20000495 PARAMETER Experiment Name: At_Guard_Cells_P Parameter: Harvest Date Value: 8/2/2002
  misc_feature: MA Experiment 20000495 PARAMETER Experiment Name: At_Guard_Cells_P Parameter: Organism Value: A. thaliana
  misc_feature: MA Experiment 20000495 PARAMETER Experiment Name: At_Guard_Cells_P Parameter: Tissue Value: Guard Cells vs. Leaves
  misc_feature: MA Experiment ID: 20000527 Result: Down-regulated in Transcription
  misc_feature: MA Experiment 20000527 PARAMETER Experiment Name: At_10percent_PEG_P Parameter: Age (day) Value: 20
  misc_feature: MA Experiment 20000527 PARAMETER Experiment Name: At_10percent_PEG_P Parameter: Organism Value: A. thaliana
  misc_feature: MA Experiment 20000527 PARAMETER Experiment Name: At_10percent_PEG_P Parameter: Plant Line Value: WS
  misc_feature: MA Experiment 20000527 PARAMETER Experiment Name: At_10percent_PEG_P Parameter: Timepoint (day) Value: 20
  misc_feature: MA Experiment 20000527 PARAMETER Experiment Name: At_10percent_PEG_P Parameter: Tissue Value: Whole Plant
  misc_feature: MA Experiment 20000527 PARAMETER Experiment Name: At_10percent_PEG_P Parameter: Treatment Value: 10percent PEG vs. No Treatment
  misc_feature: MA Experiment ID: 20000794 Result: Up-regulated in Transcription
  misc_feature: MA Experiment 20000794 PARAMETER Experiment Name: At_Petals_P Parameter: Age (day) Value: 23-25 days
  misc_feature: MA Experiment 20000794 PARAMETER Experiment Name: At_Petals_P Parameter: Plant Line Value: WS
  misc_feature: MA Experiment 20000794 PARAMETER Experiment Name: At_Petals_P Parameter: Tissue Value: Petals vs. Whole plant
  misc_feature: MA Experiment ID: 20001247 Result: Up-regulated in Transcription
  misc_feature: MA Experiment 20001247 PARAMETER Experiment Name: At_Far-red-induction_P Parameter: Age (day) Value: 7
  misc_feature: MA Experiment 20001247 PARAMETER Experiment Name: At_Far-red-induction_P Parameter: Light Value: Far-red vs. White
  misc_feature: MA Experiment 20001247 PARAMETER Experiment Name: At_Far-red-induction_P Parameter: Organism Value: A. thaliana
  misc_feature: MA Experiment 20001247 PARAMETER Experiment Name: At_Far-red-induction_P Parameter: Plant Line Value: Columbia
  misc_feature: MA Experiment 20001247 PARAMETER Experiment Name: At_Far-red-induction_P Parameter: Timepoint (hr) Value: 1
  misc_feature: MA Experiment 20001247 PARAMETER Experiment Name: At_Far-red-induction_P Parameter: Tissue Value: Whole Plant
  misc_feature: MA Experiment ID: 20001248 Result: Down-regulated in Transcription
  misc_feature: MA Experiment 20001248 PARAMETER Experiment Name: At_Far-red-induction_P Parameter: Age (day) Value: 7
  misc_feature: MA Experiment 20001248 PARAMETER Experiment Name: At_Far-red-induction_P Parameter: Light Value: Far-red vs. White
  misc_feature: MA Experiment 20001248 PARAMETER Experiment Name: At_Far-red-induction_P Parameter: Organism Value: A. thaliana
  misc_feature: MA Experiment 20001248 PARAMETER Experiment Name: At_Far-red-induction_P Parameter: Plant Line Value: Columbia
  misc_feature: MA Experiment 20001248 PARAMETER Experiment Name: At_Far-red-induction_P Parameter: Timepoint (hr) Value: 4
  misc_feature: MA Experiment 20001248 PARAMETER Experiment Name: At_Far-red-induction_P Parameter: Tissue Value: Whole Plant
  misc_feature: MA Experiment ID: 20001555 Result: Down-regulated in Transcription
  misc_feature: MA Experiment 20001555 PARAMETER Experiment Name: At_Drought_Soil_Dry_P Parameter: Age (day) Value: 24
  misc_feature: MA Experiment 20001555 PARAMETER Experiment Name: At_Drought_Soil_Dry_P Parameter: Organism Value: A. thaliana
  misc_feature: MA Experiment 20001555 PARAMETER Experiment Name: At_Drought_Soil_Dry_P Parameter: Plant Line Value: WS
  misc_feature: MA Experiment 20001555 PARAMETER Experiment Name: At_Drought_Soil_Dry_P Parameter: Post Timepoint (hr) Value: None
  misc_feature: MA Experiment 20001555 PARAMETER Experiment Name: At_Drought_Soil_Dry_P Parameter: Post-Treatment Value: None
  misc_feature: MA Experiment 20001555 PARAMETER Experiment Name: At_Drought_Soil_Dry_P Parameter: Timepoint (day) Value: 10
  misc_feature: MA Experiment 20001555 PARAMETER Experiment Name: At_Drought_Soil_Dry_P Parameter: Treatment Value: Drought vs. No Drought
  misc_feature: MA Experiment ID: 20001556 Result: Down-regulated in Transcription
  misc_feature: MA Experiment 20001556 PARAMETER Experiment Name: At_Drought_Soil_Dry_P Parameter: Age (day) Value: 26
  misc_feature: MA Experiment 20001556 PARAMETER Experiment Name: At_Drought_Soil_Dry_P Parameter: Organism Value: A. thaliana
  misc_feature: MA Experiment 20001556 PARAMETER Experiment Name: At_Drought_Soil_Dry_P Parameter: Plant Line Value: WS
  misc_feature: MA Experiment 20001556 PARAMETER Experiment Name: At_Drought_Soil_Dry_P Parameter: Post Timepoint (hr) Value: None
  misc_feature: MA Experiment 20001556 PARAMETER Experiment Name: At_Drought_Soil_Dry_P Parameter: Post-Treatment Value: None
  misc_feature: MA Experiment 20001556 PARAMETER Experiment Name: At_Drought_Soil_Dry_P Parameter: Timepoint (day) Value: 12
  misc_feature: MA Experiment 20001556 PARAMETER Experiment Name: At_Drought_Soil_Dry_P Parameter: Treatment Value: Drought vs. No Drought
  misc_feature: MA Experiment ID: 20001557 Result: Down-regulated in Transcription
  misc_feature: MA Experiment 20001557 PARAMETER Experiment Name: At_Drought_Soil_Dry_P Parameter: Age (day) Value: 27
  misc_feature: MA Experiment 20001557 PARAMETER Experiment Name: At_Drought_Soil_Dry_P Parameter: Organism Value: A. thaliana
  misc_feature: MA Experiment 20001557 PARAMETER Experiment Name: At_Drought_Soil_Dry_P Parameter: Plant Line Value: WS
  misc_feature: MA Experiment 20001557 PARAMETER Experiment Name: At_Drought_Soil_Dry_P Parameter: Post Timepoint (hr) Value: 3
  misc_feature: MA Experiment 20001557 PARAMETER Experiment Name: At_Drought_Soil_Dry_P Parameter: Post-Treatment Value: Re-Water vs. No Drought
  misc_feature: MA Experiment 20001557 PARAMETER Experiment Name: At_Drought_Soil_Dry_P Parameter: Timepoint (day) Value: 13
  misc_feature: MA Experiment 20001557 PARAMETER Experiment Name: At_Drought_Soil_Dry_P Parameter: Treatment Value: Drought vs. No Drought
  misc_feature: MA Experiment ID: 20001558 Result: Down-regulated in Transcription
  misc_feature: MA Experiment 20001558 PARAMETER Experiment Name: At_Drought_Soil_Dry_P Parameter: Age (day) Value: 27
  misc_feature: MA Experiment 20001558 PARAMETER Experiment Name: At_Drought_Soil_Dry_P Parameter: Organism Value: A. thaliana
  misc_feature: MA Experiment 20001558 PARAMETER Experiment Name: At_Drought_Soil_Dry_P Parameter: Plant Line Value: WS
  misc_feature: MA Experiment 20001558 PARAMETER Experiment Name: At_Drought_Soil_Dry_P Parameter: Post Timepoint (hr) Value: 6
  misc_feature: MA Experiment 20001558 PARAMETER Experiment Name: At_Drought_Soil_Dry_P Parameter: Post-Treatment Value: Re-Water vs. No Drought
  misc_feature: MA Experiment 20001558 PARAMETER Experiment Name: At_Drought_Soil_Dry_P Parameter: Timepoint (day) Value: 13
  misc_feature: MA Experiment 20001558 PARAMETER Experiment Name: At_Drought_Soil_Dry_P Parameter: Treatment Value: Drought vs. No Drought
  misc_feature: MA Experiment ID: 20001560 Result: Down-regulated in Transcription
  misc_feature: MA Experiment 20001560 PARAMETER Experiment Name: At_Drought_Soil_Dry_P Parameter: Age (day) Value: 28
  misc_feature: MA Experiment 20001560 PARAMETER Experiment Name: At_Drought_Soil_Dry_P Parameter: Organism Value: A. thaliana
  misc_feature: MA Experiment 20001560 PARAMETER Experiment Name: At_Drought_Soil_Dry_P Parameter: Plant Line Value: WS
  misc_feature: MA Experiment 20001560 PARAMETER Experiment Name: At_Drought_Soil_Dry_P Parameter: Post Timepoint (hr) Value: None
  misc_feature: MA Experiment 20001560 PARAMETER Experiment Name: At_Drought_Soil_Dry_P Parameter: Post-Treatment Value: None
  misc_feature: MA Experiment 20001560 PARAMETER Experiment Name: At_Drought_Soil_Dry_P Parameter: Timepoint (day) Value: 14
  misc_feature: MA Experiment 20001560 PARAMETER Experiment Name: At_Drought_Soil_Dry_P Parameter: Treatment Value: Drought vs. No Drought
  misc_feature: MA Experiment ID: 20001904 Result: Down-regulated in Transcription
  misc_feature: MA Experiment 20001904 PARAMETER Experiment Name: At_Drought_Reproduction_P Parameter: Age (day) Value: 37
  misc_feature: MA Experiment 20001904 PARAMETER Experiment Name: At_Drought_Reproduction_P Parameter: Organism Value: A. thaliana
  misc_feature: MA Experiment 20001904 PARAMETER Experiment Name: At_Drought_Reproduction_P Parameter: Plant Line Value: WS
  misc_feature: MA Experiment 20001904 PARAMETER Experiment Name: At_Drought_Reproduction_P Parameter: Timepoint (day) Value: 7
  misc_feature: MA Experiment 20001904 PARAMETER Experiment Name: At_Drought_Reproduction_P Parameter: Tissue Value: Rosettes
  misc_feature: MA Experiment 20001904 PARAMETER Experiment Name: At_Drought_Reproduction_P Parameter: Treatment Value: Drought vs. No Drought
  misc_feature: MA Experiment ID: 20001905 Result: Down-regulated in Transcription
  misc_feature: MA Experiment 20001905 PARAMETER Experiment Name: At_Drought_Reproduction_P Parameter: Age (day) Value: 40
  misc_feature: MA Experiment 20001905 PARAMETER Experiment Name: At_Drought_Reproduction_P Parameter: Organism Value: A. thaliana
  misc_feature: MA Experiment 20001905 PARAMETER Experiment Name: At_Drought_Reproduction_P Parameter: Plant Line Value: WS
  misc_feature: MA Experiment 20001905 PARAMETER Experiment Name: At_Drought_Reproduction_P Parameter: Timepoint (day) Value: 10
  misc_feature: MA Experiment 20001905 PARAMETER Experiment Name: At_Drought_Reproduction_P Parameter: Tissue Value: Rosettes
  misc_feature: MA Experiment 20001905 PARAMETER Experiment Name: At_Drought_Reproduction_P Parameter: Treatment Value: Drought vs. No Drought
  misc_feature: MA Experiment ID: 20001911 Result: Down-regulated in Transcription
  misc_feature: MA Experiment 20001911 PARAMETER Experiment Name: At_Drought_Reproduction_P Parameter: Age (day) Value: 40
  misc_feature: MA Experiment 20001911 PARAMETER Experiment Name: At_Drought_Reproduction_P Parameter: Organism Value: A. thaliana
  misc_feature: MA Experiment 20001911 PARAMETER Experiment Name: At_Drought_Reproduction_P Parameter: Plant Line Value: WS
  misc_feature: MA Experiment 20001911 PARAMETER Experiment Name: At_Drought_Reproduction_P Parameter: Timepoint (day) Value: 10
  misc_feature: MA Experiment 20001911 PARAMETER Experiment Name: At_Drought_Reproduction_P Parameter: Tissue Value: Flowers
  misc_feature: MA Experiment 20001911 PARAMETER Experiment Name: At_Drought_Reproduction_P Parameter: Treatment Value: Drought vs. No Drought
accagaaaaacacacaccaaacaaaacaaaacaaaaaacagagagatggaaaacggaaactcctccagcgacaacaaatcttcacataaaccgatccgatgcaaagcggcggttagtaggaaggctggagagccgttggtgatggaagaaatcatggtggcgccgccgcagcctttcgaggttcggattcgaatcatctgcaccgcgttatgtcacagtgacgtcactttctggaaactccaagttcctccagcctgctttccgaggatactaggccacgaggcaataggcgtagtggaaagtgttggtgaaaatgtgaaggaagtggtagaaggagacaccgtactaccaacgttcatgcctgactgtggtgactgtgttgattgcaaatctcacaaaagcaacttatgtagcaaatttcctttcaaggtatccccttggatgccaagatacgataattccagcagattcaccgacctcaatggcgaaactctctttcatttcttgaacgtctccagcttcagcgaatacacggttcttgatgtcgctaacgttgttaagattgattcttcgattcctcctagtcgtgcttgcctcctaagctgcggagtctccaccggtgttggtgctgcttgggagaccgccaaagttgaaaaaggatcaaccgttgtgattttcggacttggttctatcggattagcggttgcagagggtgcgagactttgtggtgcctctagaatcattggtgtggatataaaccctaccaaattccaagttggccagaaatttggagttaccgagtttgtaaactctatgacatgtgagaaaaaccgtgttagcgaggtgatcaatgagatgactgatgggggagcggactattgcttcgaatgtgttggaagtagttctttggttcaagaagcttatgcttgctgtagacagggatggggaaagacaataactttaggggtggacaagccgggttcacaaatatgtttagattcgtttgatgttcttcaccatgggaagattctgatgggttcgttgtttggaggtttaaaggctaaaacacacattccaattcttcttaaacgctacttgagcaatgaacttgaattggataagtttgtgacacatgagatgaaattcgaggagatcaacgacgcattccagctacttcttgaagggaaatgcatcaggtgtgtcttatggatgggctaagtgaattgacttattttatctttccatcttttgcatcaatttcatatgtttcatgtttaactatttttattggtttgtaatcaaaacaagcaaatgccaaagtgacagcaaaataaaaagtcaatgaattgtaa

SEQ ID NO: 98674 - protein, 405 aa, Arabidopsis thaliana; identical to SEQ ID NO: 35100
  peptide (1)..(405): Ceres Seq. ID no. 13601279
  misc_feature (16)..(405): Homolog of NCBI NO: 15238330 NR Description: alcohol dehydrogenase (ADH), putative thaliana] >gi|10177010|dbj|BAB10198.1| alcohol dehydrogenase thaliana] >gi|19698971|gb|AAL91221.1| alcohol dehydrogenase
  misc_feature (30)..(404): Homolog of NCBI NO: 7705214 NR Description: alcohol dehydrogenase ADH [Lycopersicon
  misc_feature (30)..(404): Homolog of NCBI NO: 1076579 NR Description: probable alcohol dehydrogenase (EC 1.1.1.1) ADH3a
  misc_feature (22)..(404): Homolog of NCBI NO: 7705215 NR Description: alcohol dehydrogenase ADH [Lycopersicon
  misc_feature (22)..(404): Homolog of NCBI NO: 1076580 NR Description: probable alcohol dehydrogenase (EC 1.1.1.1) ADH3b
  misc_feature (30)..(404): Homolog of NCBI NO: 18415840 NR Description: alcohol dehydrogenase (ADH), putative
  misc_feature (30)..(404): Homolog of NCBI NO: 21618210 NR Description: alcohol dehydrogenase like protein [Arabidopsis
  misc_feature (30)..(404): Homolog of NCBI NO: 15219882 NR Description: alcohol dehydrogenase (ADH), putative
  misc_feature (30)..(404): Homolog of NCBI NO: 15219884 NR Description: alcohol dehydrogenase (ADH), putative
  misc_feature (28)..(404): Homolog of NCBI NO: 113409 NR Description: Alcohol dehydrogenase class III (Alcohol

SEQ ID NO: 98675 - protein, 390 aa, Arabidopsis thaliana; identical to SEQ ID NO: 35101
  peptide (1)..(390): Ceres Seq. ID no. 13601280
  misc_feature (1)..(390): Homolog of NCBI NO: 15238330 NR Description: alcohol dehydrogenase (ADH), putative thaliana] >gi|10177010|dbj|BAB10198.1| alcohol dehydrogenase thaliana] >gi|19698971|gb|AAL91221.1| alcohol dehydrogenase
  misc_feature (15)..(389): Homolog of NCBI NO: 7705214 NR Description: alcohol dehydrogenase ADH [Lycopersicon
  misc_feature (15)..(389): Homolog of NCBI NO: 1076579 NR Description: probable alcohol dehydrogenase (EC 1.1.1.1) ADH3a
  misc_feature (7)..(389): Homolog of NCBI NO: 7705215 NR Description: alcohol dehydrogenase ADH [Lycopersicon
  misc_feature (7)..(389): Homolog of NCBI NO: 1076580 NR Description: probable alcohol dehydrogenase (EC 1.1.1.1) ADH3b
  misc_feature (15)..(389): Homolog of NCBI NO: 18415840 NR Description: alcohol dehydrogenase (ADH), putative
  misc_feature (15)..(389): Homolog of NCBI NO: 21618210 NR Description: alcohol dehydrogenase like protein [Arabidopsis
  misc_feature (15)..(389): Homolog of NCBI NO: 15219882 NR Description: alcohol dehydrogenase (ADH), putative
  misc_feature (15)..(389): Homolog of NCBI NO: 15219884 NR Description: alcohol dehydrogenase (ADH), putative
  misc_feature (13)..(389): Homolog of NCBI NO: 113409 NR Description: Alcohol dehydrogenase class III (Alcohol

SEQ ID NO: 98676 - protein, 358 aa, Arabidopsis thaliana; identical to SEQ ID NO: 35102
  peptide (1)..(358): Ceres Seq. ID no. 13601281
  misc_feature (1)..(358): Homolog of NCBI NO: 15238330 NR Description: alcohol dehydrogenase (ADH), putative thaliana] >gi|10177010|dbj|BAB10198.1| alcohol dehydrogenase thaliana] >gi|19698971|gb|AAL91221.1| alcohol dehydrogenase
  misc_feature (1)..(357): Homolog of NCBI NO: 7705214 NR Description: alcohol dehydrogenase ADH [Lycopersicon
  misc_feature (1)..(357): Homolog of NCBI NO: 1076579 NR Description: probable alcohol dehydrogenase (EC 1.1.1.1) ADH3a
  misc_feature (1)..(357): Homolog of NCBI NO: 7705215 NR Description: alcohol dehydrogenase ADH [Lycopersicon
  misc_feature (1)..(357): Homolog of NCBI NO: 1076580 NR Description: probable alcohol dehydrogenase (EC 1.1.1.1) ADH3b
  misc_feature (1)..(357): Homolog of NCBI NO: 18415840 NR Description: alcohol dehydrogenase (ADH), putative
  misc_feature (1)..(357): Homolog of NCBI NO: 21618210 NR Description: alcohol dehydrogenase like protein [Arabidopsis
  misc_feature (1)..(357): Homolog of NCBI NO: 15219882 NR Description: alcohol dehydrogenase (ADH), putative
  misc_feature (1)..(357): Homolog of NCBI NO: 15219884 NR Description: alcohol dehydrogenase (ADH), putative
  misc_feature (1)..(357): Homolog of NCBI NO: 113409 NR Description: Alcohol dehydrogenase class III (Alcohol

SEQ ID NO: 98677 - DNA, 1351 bp, Arabidopsis thaliana
  misc_feature (1)..(1351): Ceres Seq. ID no. 13601282
  misc_feature: MA Experiment ID: 20000086 Result: Down-regulated in Transcription
  misc_feature: MA Experiment 20000086 PARAMETER Experiment Name: At_100uM_ABA_Mutants_cDNA_P Parameter: Plant Line Value: CS22
  misc_feature: MA Experiment 20000086 PARAMETER Experiment Name: At_100uM_ABA_Mutants_cDNA_P Parameter: Timepoint (hr) Value: 6
  misc_feature: MA Experiment 20000086 PARAMETER Experiment Name: At_100uM_ABA_Mutants_cDNA_P Parameter: Tissue Value: Aerial
  misc_feature: MA Experiment 20000086 PARAMETER Experiment Name: At_100uM_ABA_Mutants_cDNA_P Parameter: Treatment Value: 100uM ABA vs. No Treatment
  misc_feature: MA Experiment ID: 20000180 Result: Down-regulated in Transcription
  misc_feature: MA Experiment 20000180 PARAMETER Experiment Name: At_Germinating_Seeds_P Parameter: Age (hr) Value: 24 vs. 0
  misc_feature: MA Experiment 20000180 PARAMETER Experiment Name: At_Germinating_Seeds_P Parameter: Tissue Value: Germinating Seeds
  misc_feature: MA Experiment ID: 20000495 Result: Down-regulated in Transcription
  misc_feature: MA Experiment 20000495 PARAMETER Experiment Name: At_Guard_Cells_P Parameter: Harvest Date Value: 8/2/2002
  misc_feature: MA Experiment 20000495 PARAMETER Experiment Name: At_Guard_Cells_P Parameter: Organism Value: A. thaliana
  misc_feature: MA Experiment 20000495 PARAMETER Experiment Name: At_Guard_Cells_P Parameter: Tissue Value: Guard Cells vs. Leaves
  misc_feature: MA Experiment ID: 20000496 Result: Down-regulated in Transcription
  misc_feature: MA Experiment 20000496 PARAMETER Experiment Name: At_Guard_Cells_P Parameter: Harvest Date Value: 7/19/2002
  misc_feature: MA Experiment 20000496 PARAMETER Experiment Name: At_Guard_Cells_P Parameter: Organism Value: Canola
  misc_feature: MA Experiment 20000496 PARAMETER Experiment Name: At_Guard_Cells_P Parameter: Tissue Value: Guard Cells vs. Leaves
  misc_feature: MA Experiment ID: 20001451 Result: Down-regulated in Transcription
  misc_feature: MA Experiment 20001451 PARAMETER Experiment Name: At_Far-red-induction_P Parameter: Age (day) Value: 7
  misc_feature: MA Experiment 20001451 PARAMETER Experiment Name: At_Far-red-induction_P Parameter: Light Value: Far-red vs. White
  misc_feature: MA Experiment 20001451 PARAMETER Experiment Name: At_Far-red-induction_P Parameter: Organism Value: A. thaliana
  misc_feature: MA Experiment 20001451 PARAMETER Experiment Name: At_Far-red-induction_P Parameter: Plant Line Value: Columbia
  misc_feature: MA Experiment 20001451 PARAMETER Experiment Name: At_Far-red-induction_P Parameter: Timepoint (hr) Value: 24
  misc_feature: MA Experiment 20001451 PARAMETER Experiment Name: At_Far-red-induction_P Parameter: Tissue Value: Whole Plant
cggtcgggatatttggcgagccgacccgtcgcgtcgtgggtttaggtttaacgtattggcgcgccagtgaagaaaatagacgacgatggcgatgatgcatcctccgcagccgccgcaaggctcctatcaccatcctcagacgctcgaagaagttcgaactctttggattggtgatttgcagtactgggtcgacgaaaattacctcacttcctgcttctcccaaaccggcgagctcgtttctgtcaaggtaatacgtaacaagatcacgggacagccagaggggtatggttttatagagtttatatctcatgcagcagcagagagaactctgcagacgtacaatgggacacagatgcctggaactgagttaacttttcggttaaattgggcttcttttggttcaggacagaaagttgatgctggacctgatcattctatctttgttggagatttagcacctgatgttacagattatcttcttcaagagacattccgtgttcattattcttctgttagaggtgccaaggttgttactgatccaagtactggacgatcaaagggttatggatttgtaaaatttgcagaggaaagtgaaaggaatcgggctatggctgaaatgaatggtttgtattgctcaacaaggcctatgcgtattagcgcagcaacacctaaaaaaaacgtcggtgtgcagcaacaatatgtcaccaaagttacagtcccatctgcagttgctgcaccagtccaagcatacgttgctccacctgaaagtgatgtcacctgtacaacgatttcagttgccaatttggaccaaaatgttacagaggaagagctgaagaaagcattctcccaattaggagaggttatttatgtcaaaatacctgcaacaaagggatatggttatgttcaattcaaaaccaggccttctgcagaagaagctgttcaaagaatgcagggacaagtgattggtcaacaagcagttcgcatctcttggagtaaaaatccaggacaggatggttgggttacacaagcagatccgaatcagtggaatgggtattatggttatgggcaaggctatgatgcatatgcttatggggcaactcaagatccatccgtgtacgcatatggtggatatggctatccccagtatccgcaacagggagagggtacacaagacatttcgaactctgcggcgggtggagtagcaggtgcagagcaagagttgtatgatcctctggccactcctgatgtagacaagttaaatgctgcttacctttcggttcatgcaagtgccatattaggaaggccaatgtggcagcggacctcatcgctcacatcacaattgggcaaatga

SEQ ID NO: 98678 - protein, 421 aa, Arabidopsis thaliana
  peptide (1)..(421): Ceres Seq. ID no. 13601283
  misc_feature (26)..(97): Pfam Name: RNA recognition motif. (a.k.a. RRM, RBD, or RNP domain) Pfam Description: RNA recognition motif. (a.k.a. RRM, RBD, or RNP
  misc_feature (1)..(421): Homolog of NCBI NO: 15239715 NR Description: RNA binding protein 45 (RBP45), putative thaliana] >gi|18377731|gb|AAL67015.1| putative DNA binding ACBF [Arabidopsis thaliana] >gi|21281189|gb|AAM45052.1| putative
  misc_feature (9)..(356): Homolog of NCBI NO: 40253807 NR Description: putative RNA Binding Protein 45 [Oryza sativa
  misc_feature (2)..(356): Homolog of NCBI NO: 34896988 NR Description: putative RNA binding protein [Oryza sativa]
  misc_feature (1)..(357): Homolog of NCBI NO: 9663767 NR Description: RNA Binding Protein 45 [Nicotiana plumbaginifolia]
  misc_feature (6)..(357): Homolog of NCBI NO: 39545835 NR Description: OSJNBb0060E08.6 [Oryza sativa (japonica
  misc_feature (21)..(355): Homolog of NCBI NO: 7489196 NR Description: RNA binding protein homolog - common tobacco >gi|2708532|gb|AAB92518.1| putative RNA binding protein
  misc_feature (21)..(350): Homolog of NCBI NO: 9663769 NR Description: RNA Binding Protein 47 [Nicotiana plumbaginifolia]
  misc_feature (21)..(351): Homolog of NCBI NO: 7489112 NR Description: DNA binding protein ACBF - common tobacco
  misc_feature (12)..(362): Homolog of NCBI NO: 9758270 NR Description: contains similarity to polyadenylate-binding
  misc_feature (12)..(357): Homolog of NCBI NO: 18423684 NR Description: RNA binding protein 45 (RBP45), putative thaliana] >gi|11762114|gb|AAG40335.1|AF324983_1 AT5g54900
MAMMHPPQPPQGSYHHPQTLEEVRTLWIGDLQYWVDENYLTSCFSQTGELVSVKVIRNKITGQPEGYGFIEFISHAAAERTLQTYNGTQMPGTELTFRLNWASFGSGQKVDAGPDHSIFVGDLAPDVTDYLLQETFRVHYSSVRGAKVVTDPSTGRSKGYGFVKFAEESERNRAMAEMNGLYCSTRPMRISAATPKKNVGVQQQYVTKVTVPSAVAAPVQAYVAPPESDVTCTTISVANLDQNVTEEELKKAFSQLGEVIYVKIPATKGYGYVQFKTRPSAEEAVQRMQGQVIGQQAVRISWSKNPGQDGWVTQADPNQWNGYYGYGQGYDAYAYGATQDPSVYAYGGYGYPQYPQQGEGTQDISNSAAGGVAGAEQELYDPLATPDVDKLNAAYLSVHASAILGRPMWQRTSSLTSQLGK

SEQ ID NO: 98679 - protein, 419 aa, Arabidopsis thaliana
  peptide (1)..(419): Ceres Seq. ID no. 13601284
  misc_feature (24)..(95): Pfam Name: RNA recognition motif. (a.k.a. RRM, RBD, or RNP domain) Pfam Description: RNA recognition motif. (a.k.a. RRM, RBD, or RNP
  misc_feature (1)..(419): Homolog of NCBI NO: 15239715 NR Description: RNA binding protein 45 (RBP45), putative thaliana] >gi|18377731|gb|AAL67015.1| putative DNA binding ACBF [Arabidopsis thaliana] >gi|21281189|gb|AAM45052.1| putative
  misc_feature (7)..(354): Homolog of NCBI NO: 40253807 NR Description: putative RNA Binding Protein 45 [Oryza sativa
  misc_feature (1)..(354): Homolog of NCBI NO: 34896988 NR Description: putative RNA binding protein [Oryza sativa]
  misc_feature (1)..(355): Homolog of NCBI NO: 9663767 NR Description: RNA Binding Protein 45 [Nicotiana plumbaginifolia]
  misc_feature (4)..(355): Homolog of NCBI NO: 39545835 NR Description: OSJNBb0060E08.6 [Oryza sativa (japonica
  misc_feature (19)..(353): Homolog of NCBI NO: 7489196 NR Description: RNA binding protein homolog - common tobacco >gi|2708532|gb|AAB92518.1| putative RNA binding protein
  misc_feature (19)..(348): Homolog of NCBI NO: 9663769 NR Description: RNA Binding Protein 47 [Nicotiana plumbaginifolia]
  misc_feature (19)..(349): Homolog of NCBI NO: 7489112 NR Description: DNA binding protein ACBF - common tobacco
  misc_feature (10)..(360): Homolog of NCBI NO: 9758270 NR Description: contains similarity to polyadenylate-binding
  misc_feature (10)..(355): Homolog of NCBI NO: 18423684 NR Description: RNA binding protein 45 (RBP45), putative thaliana] >gi|11762114|gb|AAG40335.1|AF324983_1 AT5g54900
MMHPPQPPQGSYHHPQTLEEVRTLWIGDLQYWVDENYLTSCFSQTGELVSVKVIRNKITGQPEGYGFIEFISHAAAERTLQTYNGTQMPGTELTFRLNWASFGSGQKVDAGPDHSIFVGDLAPDVTDYLLQETFRVHYSSVRGAKVVTDPSTGRSKGYGFVKFAEESERNRAMAEMNGLYCSTRPMRISAATPKKNVGVQQQYVTKVTVPSAVAAPVQAYVAPPESDVTCTTISVANLDQNVTEEELKKAFSQLGEVIYVKIPATKGYGYVQFKTRPSAEEAVQRMQGQVIGQQAVRISWSKNPGQDGWVTQADPNQWNGYYGYGQGYDAYAYGATQDPSVYAYGGYGYPQYPQQGEGTQDISNSAAGGVAGAEQELYDPLATPDVDKLNAAYLSVHASAILGRPMWQRTSSLTSQLGK

SEQ ID NO: 98680 - protein, 418 aa, Arabidopsis thaliana
  peptide (1)..(418): Ceres Seq. ID no. 13601285
  misc_feature (23)..(94): Pfam Name: RNA recognition motif. (a.k.a. RRM, RBD, or RNP domain) Pfam Description: RNA recognition motif. (a.k.a. RRM, RBD, or RNP
  misc_feature (1)..(418): Homolog of NCBI NO: 15239715 NR Description: RNA binding protein 45 (RBP45), putative thaliana] >gi|18377731|gb|AAL67015.1| putative DNA binding ACBF [Arabidopsis thaliana] >gi|21281189|gb|AAM45052.1| putative
  misc_feature (6)..(353): Homolog of NCBI NO: 40253807 NR Description: putative RNA Binding Protein 45 [Oryza sativa
  misc_feature (1)..(353): Homolog of NCBI NO: 34896988 NR Description: putative RNA binding protein [Oryza sativa]
  misc_feature (1)..(354): Homolog of NCBI NO: 9663767 NR Description: RNA Binding Protein 45 [Nicotiana plumbaginifolia]
  misc_feature (3)..(354): Homolog of NCBI NO: 39545835 NR Description: OSJNBb0060E08.6 [Oryza sativa (japonica
  misc_feature (18)..(352): Homolog of NCBI NO: 7489196 NR Description: RNA binding protein homolog - common tobacco >gi|2708532|gb|AAB92518.1| putative RNA binding protein
  misc_feature (18)..(347): Homolog of NCBI NO: 9663769 NR Description: RNA Binding Protein 47 [Nicotiana plumbaginifolia]
  misc_feature (18)..(348): Homolog of NCBI NO: 7489112 NR Description: DNA binding protein ACBF - common tobacco
  misc_feature (9)..(359): Homolog of NCBI NO: 9758270 NR Description: contains similarity to polyadenylate-binding
  misc_feature (9)..(354): Homolog of NCBI NO: 18423684 NR Description: RNA binding protein 45 (RBP45), putative thaliana] >gi|11762114|gb|AAG40335.1|AF324983_1 AT5g54900
MHPPQPPQGSYHHPQTLEEVRTLWIGDLQYWVDENYLTSCFSQTGELVSVKVIRNKITGQPEGYGFIEFISHAAAERTLQTYNGTQMPGTELTFRLNWASFGSGQKVDAGPDHSIFVGDLAPDVTDYLLQETFRVHYSSVRGAKVVTDPSTGRSKGYGFVKFAEESERNRAMAEMNGLYCSTRPMRISAATPKKNVGVQQQYVTKVTVPSAVAAPVQAYVAPPESDVTCTTISVANLDQNVTEEELKKAFSQLGEVIYVKIPATKGYGYVQFKTRPSAEEAVQRMQGQVIGQQAVRISWSKNPGQDGWVTQADPNQWNGYYGYGQGYDAYAYGATQDPSVYAYGGYGYPQYPQQGEGTQDISNSAAGGVAGAEQELYDPLATPDVDKLNAAYLSVHASAILGRPMWQRTSSLTSQLGK

SEQ ID NO: 98681 - DNA, 1020 bp, Arabidopsis thaliana
  misc_feature (1)..(1020): Ceres Seq. ID no. 13601286
  misc_feature: MA Experiment ID: 108434 Result: Up-regulated in Transcription
  misc_feature: MA Experiment 108434 PARAMETER Experiment Name: At_Root_Tips_cDNA_P Parameter: Tissue Value: Root Tips
  misc_feature: MA Experiment ID: 108488 Result: Up-regulated in Transcription
  misc_feature: MA Experiment ID: 108595 Result: Down-regulated in Transcription
  misc_feature: MA Experiment 108595 PARAMETER Experiment Name: At_Ler-pi_Ovule_cDNA_P Parameter: Plant Line Value: null
  misc_feature: MA Experiment ID: 20000087 Result: Down-regulated in Transcription
  misc_feature: MA Experiment 20000087 PARAMETER Experiment Name: At_100uM_ABA_Mutants_cDNA_P Parameter: Plant Line Value: WS
  misc_feature: MA Experiment 20000087 PARAMETER Experiment Name: At_100uM_ABA_Mutants_cDNA_P Parameter: Timepoint (hr) Value: 6
  misc_feature: MA Experiment 20000087 PARAMETER Experiment Name: At_100uM_ABA_Mutants_cDNA_P Parameter: Tissue Value: Aerial
  misc_feature: MA Experiment 20000087 PARAMETER Experiment Name: At_100uM_ABA_Mutants_cDNA_P Parameter: Treatment Value: 100uM ABA vs. No Treatment
  misc_feature: MA Experiment ID: 20000184 Result: Up-regulated in Transcription
  misc_feature: MA Experiment 20000184 PARAMETER Experiment Name: At_Shoots__P Parameter: Age (day) Value: 7
  misc_feature: MA Experiment 20000184 PARAMETER Experiment Name: At_Shoots__P Parameter: Tissue Value: Shoots vs. Whole Plant
  misc_feature: MA Experiment ID: 20000185 Result: Down-regulated in Transcription
  misc_feature: MA Experiment 20000185 PARAMETER Experiment Name: At_Roots__P Parameter: Age (day) Value: 7 vs. 21
  misc_feature: MA Experiment 20000185 PARAMETER Experiment Name: At_Roots__P Parameter: Organism Value: A. thaliana
  misc_feature: MA Experiment 20000185 PARAMETER Experiment Name: At_Roots__P Parameter: Tissue Value: Roots vs. Whole Plant
  misc_feature: MA Experiment ID: 20000439 Result: Down-regulated in Transcription
  misc_feature: MA Experiment 20000439 PARAMETER Experiment Name: At_Roots__P Parameter: Age (day) Value: 14 vs. 21
  misc_feature: MA Experiment 20000439 PARAMETER Experiment Name: At_Roots__P Parameter: Organism Value: A. thaliana
  misc_feature: MA Experiment 20000439 PARAMETER Experiment Name: At_Roots__P Parameter: Tissue Value: Roots vs. Whole Plant
  misc_feature: MA Experiment ID: 20000794 Result: Down-regulated in Transcription
  misc_feature: MA Experiment 20000794 PARAMETER Experiment Name: At_Petals_P Parameter: Age (day) Value: 23-25 days
  misc_feature: MA Experiment 20000794 PARAMETER Experiment Name: At_Petals_P Parameter: Plant Line Value: WS
  misc_feature: MA Experiment 20000794 PARAMETER Experiment Name: At_Petals_P Parameter: Tissue Value: Petals vs. Whole plant
  misc_feature: MA Experiment ID: 20001451 Result: Down-regulated in Transcription
  misc_feature: MA Experiment 20001451 PARAMETER Experiment Name: At_Far-red-induction_P Parameter: Age (day) Value: 7
  misc_feature: MA Experiment 20001451 PARAMETER Experiment Name: At_Far-red-induction_P Parameter: Light Value: Far-red vs. White
  misc_feature: MA Experiment 20001451 PARAMETER Experiment Name: At_Far-red-induction_P Parameter: Organism Value: A. thaliana
  misc_feature: MA Experiment 20001451 PARAMETER Experiment Name: At_Far-red-induction_P Parameter: Plant Line Value: Columbia
  misc_feature: MA Experiment 20001451 PARAMETER Experiment Name: At_Far-red-induction_P Parameter: Timepoint (hr) Value: 24
  misc_feature: MA Experiment 20001451 PARAMETER Experiment Name: At_Far-red-induction_P Parameter: Tissue Value: Whole Plant
  misc_feature: MA Experiment ID: 20001905 Result: Down-regulated in Transcription
  misc_feature: MA Experiment 20001905 PARAMETER Experiment Name: At_Drought_Reproduction_P Parameter: Age (day) Value: 40
  misc_feature: MA Experiment 20001905 PARAMETER Experiment Name: At_Drought_Reproduction_P Parameter: Organism Value: A. thaliana
  misc_feature: MA Experiment 20001905 PARAMETER Experiment Name: At_Drought_Reproduction_P Parameter: Plant Line Value: WS
  misc_feature: MA Experiment 20001905 PARAMETER Experiment Name: At_Drought_Reproduction_P Parameter: Timepoint (day) Value: 10
  misc_feature: MA Experiment 20001905 PARAMETER Experiment Name: At_Drought_Reproduction_P Parameter: Tissue Value: Rosettes
  misc_feature: MA Experiment 20001905 PARAMETER Experiment Name: At_Drought_Reproduction_P Parameter: Treatment Value: Drought vs. No Drought
ttacccaaaagaacccataatgtttagagtgaccggaactctctcggcggcatcatctccagcggtggcggcggcgtctttctccgccgctctaagactttccataactcccactctcgctatcgcctctcctccccatctccgttggttctcgaagttttctcgtcaatttctcggcggacgcatctcttcactccgaccacgcattccttctccgtgcccgattcgactctctggtttcccggctctcaaaatgagagcttcgtttagcagtgggagtagtggaagtagtgcaagtagagagattctggtgcagcatttgcttgttaagaataatgatgttgagctctttgccgaactccaaaagaaattcttggatggagaggagatgagtgatcttgcggctgagtattcgatttgtccttccaaaaaggacggtggtatacttggatgggtaaaactgggtcaaatggtaccagagtttgaggaagctgcgtttaaagcagagctgaatcaggtggtgaggtgtagaacccaatttggcttgcacttattgcaagttctatctgagagagaaccggtgaaagatatccaggtagaggagctgcattccaaaatgcaagatccagttttcatggatgaggctcagttaattgatgtcagagaacccaatgagatagagatagcatccttgccaggattcaaagtgttcccactccgccaatttggaacatgggcaccagacatcacttcaaagctgaaccctgagaaggatacatttgtcttgtgcaaggttggtggcaggtcaatgcaggttgccaactggttacagtctcagggcttcaagagtgtgtacaacattactggtgggatacaagcttattctctcaaggttgacccatcaattcctacttactgaaattgagcatcttagtctctttttcttgtatcctcctaattccaaattagatttgcaaattcgtattcaataaactatataatataaggttcatttttgag

SEQ ID NO: 98682 - protein, 305 aa, Arabidopsis thaliana
  peptide (1)..(305): Ceres Seq. ID no. 13601287
  misc_feature (202)..(297): Pfam Name: Rhodanese-like domain Pfam Description: Rhodanese-like domain
  misc_feature (7)..(305): Homolog of NCBI NO: 18419898 NR Description: peptidyl-prolyl cis-trans isomerase - like protein
  misc_feature (7)..(305): Homolog of NCBI NO: 21554407 NR Description: peptidyl-prolyl cis-trans isomerase-like protein
  misc_feature (85)..(305): Homolog of NCBI NO: 25456107 NR Description: probable peptidylprolyl isomerase (EC 5.2.1.8)
  misc_feature (189)..(305): Homolog of NCBI NO: 23039944 NR Description: hypothetical protein [Trichodesmium erythraeum
  misc_feature (193)..(305): Homolog of NCBI NO: 16331613 NR Description: hypothetical protein [Synechocystis sp. PCC 6803]
  misc_feature (192)..(305): Homolog of NCBI NO: 17231535 NR Description: hypothetical protein [Nostoc sp. PCC 7120]
  misc_feature (194)..(305): Homolog of NCBI NO: 23127749 NR Description: hypothetical protein [Nostoc punctiforme]
  misc_feature (197)..(305): Homolog of NCBI NO: 22297588 NR Description: ORF_ID:tll0044~hypothetical protein
  misc_feature (193)..(305): Homolog of NCBI NO: 37523718 NR Description: hypothetical protein gll4149 [Gloeobacter
  misc_feature (101)..(195): Homolog of NCBI NO: 15893571 NR Description: Peptidil-prolyl cis-trans isomerase [Clostridium
YPKEPIMFRVTGTLSAASSPAVAAASFSAALRLSITPTLAIASPPHLRWFSKFSRQFLGGRISSLRPRIPSPCPIRLSGFPALKMRASFSSGSSGSSASREILVQHLLVKNNDVELFAELQKKFLDGEEMSDLAAEYSICPSKKDGGILGWVKLGQMVPEFEEAAFKAELNQVVRCRTQFGLHLLQVLSEREPVKDIQVEELHSKMQDPVFMDEAQLIDVREPNEIEIASLPGFKVFPLRQFGTWAPDITSKLNPEKDTFVLCKVGGRSMQVANWLQSQGFKSVYNITGGIQAYSLKVDPSIPTY

SEQ ID NO: 98683 - protein, 299 aa, Arabidopsis thaliana; identical to SEQ ID NO: 35921
  peptide (1)..(299): Ceres Seq. ID no. 13601288
  misc_feature (196)..(291): Pfam Name: Rhodanese-like domain Pfam Description: Rhodanese-like domain
  misc_feature (1)..(299): Homolog of NCBI NO: 18419898 NR Description: peptidyl-prolyl cis-trans isomerase - like protein
  misc_feature (1)..(299): Homolog of NCBI NO: 21554407 NR Description: peptidyl-prolyl cis-trans isomerase-like protein
  misc_feature (79)..(299): Homolog of NCBI NO: 25456107 NR Description: probable peptidylprolyl isomerase (EC 5.2.1.8)
  misc_feature (183)..(299): Homolog of NCBI NO: 23039944 NR Description: hypothetical protein [Trichodesmium erythraeum
  misc_feature (187)..(299): Homolog of NCBI NO: 16331613 NR Description: hypothetical protein [Synechocystis sp. PCC 6803]
  misc_feature (186)..(299): Homolog of NCBI NO: 17231535 NR Description: hypothetical protein [Nostoc sp. PCC 7120]
  misc_feature (188)..(299): Homolog of NCBI NO: 23127749 NR Description: hypothetical protein [Nostoc punctiforme]
  misc_feature (191)..(299): Homolog of NCBI NO: 22297588 NR Description: ORF_ID:tll0044~hypothetical protein
  misc_feature (187)..(299): Homolog of NCBI NO: 37523718 NR Description: hypothetical protein gll4149 [Gloeobacter
  misc_feature (95)..(189): Homolog of NCBI NO: 15893571 NR Description: Peptidil-prolyl cis-trans isomerase [Clostridium

SEQ ID NO: 98684 - protein, 221 aa, Arabidopsis thaliana; identical to SEQ ID NO: 35922
  peptide (1)..(221): Ceres Seq. ID no. 13601289
  misc_feature (118)..(213): Pfam Name: Rhodanese-like domain Pfam Description: Rhodanese-like domain
  misc_feature (1)..(221): Homolog of NCBI NO: 18419898 NR Description: peptidyl-prolyl cis-trans isomerase - like protein
  misc_feature (1)..(221): Homolog of NCBI NO: 21554407 NR Description: peptidyl-prolyl cis-trans isomerase-like protein
  misc_feature (1)..(221): Homolog of NCBI NO: 25456107 NR Description: probable peptidylprolyl isomerase (EC 5.2.1.8)
  misc_feature (105)..(221): Homolog of NCBI NO: 23039944 NR Description: hypothetical protein [Trichodesmium erythraeum
  misc_feature (109)..(221): Homolog of NCBI NO: 16331613 NR Description: hypothetical protein [Synechocystis sp. PCC 6803]
  misc_feature (108)..(221): Homolog of NCBI NO: 17231535 NR Description: hypothetical protein [Nostoc sp. PCC 7120]
  misc_feature (110)..(221): Homolog of NCBI NO: 23127749 NR Description: hypothetical protein [Nostoc punctiforme]
  misc_feature (113)..(221): Homolog of NCBI NO: 22297588 NR Description: ORF_ID:tll0044~hypothetical protein
  misc_feature (109)..(221): Homolog of NCBI NO: 37523718 NR Description: hypothetical protein gll4149 [Gloeobacter
  misc_feature (17)..(111): Homolog of NCBI NO: 15893571 NR Description: Peptidil-prolyl cis-trans isomerase [Clostridium

SEQ ID NO: 98685 - DNA, 1680 bp, Arabidopsis thaliana
  misc_feature (1)..(1680): Ceres Seq. ID no. 13601290
  misc_feature: MA Experiment ID: 108573 Result: Up-regulated in Transcription
  misc_feature: MA Experiment 108573 PARAMETER Experiment Name: At_Drought_cDNA_P Parameter: Timepoint (hr) Value: 6
  misc_feature: MA Experiment 108573 PARAMETER Experiment Name: At_Drought_cDNA_P Parameter: Tissue Value: Aerial
  misc_feature: MA Experiment 108573 PARAMETER Experiment Name: At_Drought_cDNA_P Parameter: Treatment Value: Drought vs. No Drought
  misc_feature: MA Experiment ID: 108576 Result: Down-regulated in Transcription
  misc_feature: MA Experiment 108576 PARAMETER Experiment Name: At_42deg_Heat_cDNA_P Parameter: Temperature (deg C) Value: 42 vs. 22
  misc_feature: MA Experiment 108576 PARAMETER Experiment Name: At_42deg_Heat_cDNA_P Parameter: Timepoint (hr) Value: 1
  misc_feature: MA Experiment 108576 PARAMETER Experiment Name: At_42deg_Heat_cDNA_P Parameter: Tissue Value: Aerial
gctcaaaagaaattgtgatacgcgaaagaaagaaaaaaattactttcaactaaaagaagcacacagcacaaaagaggtagtctcgttgtgatgtcagtataaagccagttgacgcaattccatctcccgatcgaacctgtacaaaccatggcaacaacgagctccgaccggttaatcgccggtttaacggcgtcgatcggctcaatcgaatctcgttacgcaaatccagctcaatccgtttctctaatctgtcgaaatcaaatcaatggcgcaccgcctatcgtcttgcggtcctctcgaaggtccaggctgtggttaatcgaggcgattcctccggcaaagtcctggaacggatctaacgatggcgacgaagatatcaagaagtcagacactcgtaattacgcgatcggtggaaccggtggtcacgcggtcgccggaaaagatgacagaacgatggagatagtaatagcagcggcgaccacggcggcgctgggtgtcgggaatcgcgtactgtataagctggctcttattcctctcaagcaatatcccttcttcctcgcgcaactctccacattcgggtatgtagctgtatacttttcgattttgtatttcagataccgagctggaattgttacaaaagagatgctatcagttccaaaacttccatttttaattgttggcgtcttggagtctcttgctctagctgctgggatggcggccgcatcaaatctttctggaccatctactacagttttatctcagacatttcttgtctggcaaattcttttctccattatatttctcgggaggagatatagaataaatcaaatattgggatgtactcttgtagcatttggtgtaatcgtcagtgtagcaagtgggtcgggtgccgctcattcatttaaagatacaggaatactttggagtcttcttatggtgttttcttttctgcttcaaggagcagatacagtaatgaaggaagtcatctttctagatagcaaaaagcgattgaagggtgcttcacttgatttgtttgttgtaaactcatatggttcaattttccaagtcatatgcattgcgttgcttcttccttttctttcaaagctttggggcataccgtttaaccaactaccgagctatatcagagacgggggtgcttgctttctaaatattggttctagaataacaggatgcgaaggggctccccttcttcctgtaatgtttgtcatgatgaacatggcttataacatctctcttctacgcctcatcaagatttcatctgcagttgtgtcgtctctggcatccaccgtttcagtgcccatagcggtgtactgtttcacgcttcccctaccataccttggggtggcatctacactaccaagggggtttgttgcaggcacaatcatccttgtagtcggcatgcttctatatgcttggacaccatctactaacacttccgattcaattatcccctcacccccatccacatagcggcaggaaaattggtttttgtaacattatttggtttccttctctcttctcatcttagcatatgctctttttttgtcaaataagaaatttttttatgcattctttacaaaagaatggttagttttcagttttgcttttcaaaaactatgcagaggataatgtactttgtaatgatgtatatcaattatc

SEQ ID NO: 98686 - protein, 447 aa, Arabidopsis thaliana
  peptide (1)..(447): Ceres Seq. ID no. 13601291
  misc_feature (1)..(447): Homolog of NCBI NO: 18419900 NR Description: expressed protein [Arabidopsis thaliana]
  misc_feature (1)..(447): Homolog of NCBI NO: 21553716 NR Description: unknown [Arabidopsis thaliana]
  misc_feature (1)..(447): Homolog of NCBI NO: 20260240 NR Description: unknown protein [Arabidopsis thaliana]
  misc_feature (1)..(447): Homolog of NCBI NO: 21536591 NR Description: unknown [Arabidopsis thaliana]
  misc_feature (105)..(436): Homolog of NCBI NO: 30686536 NR Description: expressed protein [Arabidopsis thaliana]
  misc_feature (166)..(447): Homolog of NCBI NO: 15239887 NR Description: expressed protein [Arabidopsis thaliana] gene_id:MXC9.13~pir||T09909~similar to unknown protein
  misc_feature (220)..(391): Homolog of NCBI NO: 7487326 NR Description: hypothetical protein T22A6.290 - Arabidopsis >gi|5051788|emb|CAB45081.1| hypothetical protein [Arabidopsis >gi|7269296|emb|CAB79356.1| hypothetical protein [Arabidopsis
  misc_feature (105)..(192): Homolog of NCBI NO: 7487326 NR Description: hypothetical protein T22A6.290 - Arabidopsis >gi|5051788|emb|CAB45081.1| hypothetical protein [Arabidopsis >gi|7269296|emb|CAB79356.1| hypothetical protein [Arabidopsis
  misc_feature (105)..(243): Homolog of NCBI NO: 28973717 NR Description: unknown protein [Arabidopsis thaliana]
  misc_feature (1)..(144): Homolog of NCBI NO: 15239886 NR Description: expressed protein [Arabidopsis thaliana] gene_id:MXC9.12~pir||T09909~similar to unknown protein
MATTSSDRLIAGLTASIGSIESRYANPAQSVSLICRNQINGAPPIVLRSSRRSRLWLIEAIPPAKSWNGSNDGDEDIKKSDTRNYAIGGTGGHAVAGKDDRTMEIVIAAATTAALGVGNRVLYKLALIPLKQYPFFLAQLSTFGYVAVYFSILYFRYRAGIVTKEMLSVPKLPFLIVGVLESLALAAGMAAASNLSGPSTTVLSQTFLVWQILFSIIFLGRRYRINQILGCTLVAFGVIVSVASGSGAAHSFKDTGILWSLLMVFSFLLQGADTVMKEVIFLDSKKRLKGASLDLFVVNSYGSIFQVICIALLLPFLSKLWGIPFNQLPSYIRDGGACFLNIGSRITGCEGAPLLPVMFVMMNMAYNISLLRLIKISSAVVSSLASTVSVPIAVYCFTLPLPYLGVASTLPRGFVAGTIILVVGMLLYAWTPSTNTSDSIIPSPPST

SEQ ID NO: 98687 - protein, 345 aa, Arabidopsis thaliana
  peptide (1)..(345): Ceres Seq. ID no. 13601292
  misc_feature (1)..(345): Homolog of NCBI NO: 18419900 NR Description: expressed protein [Arabidopsis thaliana]
  misc_feature (1)..(345): Homolog of NCBI NO: 21553716 NR Description: unknown [Arabidopsis thaliana]
  misc_feature (1)..(345): Homolog of NCBI NO: 20260240 NR Description: unknown protein [Arabidopsis thaliana]
  misc_feature (1)..(345): Homolog of NCBI NO: 21536591 NR Description: unknown [Arabidopsis thaliana]
  misc_feature (3)..(334): Homolog of NCBI NO: 30686536 NR Description: expressed protein [Arabidopsis thaliana]
  misc_feature (64)..(345): Homolog of NCBI NO: 15239887 NR Description: expressed protein [Arabidopsis thaliana] gene_id:MXC9.13~pir||T09909~similar to unknown protein
  misc_feature (118)..(289): Homolog of NCBI NO: 7487326 NR Description: hypothetical protein T22A6.290 - Arabidopsis >gi|5051788|emb|CAB45081.1| hypothetical protein [Arabidopsis >gi|7269296|emb|CAB79356.1| hypothetical protein [Arabidopsis
  misc_feature (3)..(90): Homolog of NCBI NO: 7487326 NR Description: hypothetical protein T22A6.290 - Arabidopsis >gi|5051788|emb|CAB45081.1| hypothetical protein [Arabidopsis >gi|7269296|emb|CAB79356.1| hypothetical protein [Arabidopsis
  misc_feature (3)..(141): Homolog of NCBI NO: 28973717 NR Description: unknown protein [Arabidopsis thaliana]
  misc_feature (1)..(42): Homolog of NCBI NO: 15239886 NR Description: expressed protein [Arabidopsis thaliana] gene_id:MXC9.12~pir||T09909~similar to unknown protein
MEIVIAAATTAALGVGNRVLYKLALIPLKQYPFFLAQLSTFGYVAVYFSILYFRYRAGIVTKEMLSVPKLPFLIVGVLESLALAAGMAAASNLSGPSTTVLSQTFLVWQILFSIIFLGRRYRINQILGCTLVAFGVIVSVASGSGAAHSFKDTGILWSLLMVFSFLLQGADTVMKEVIFLDSKKRLKGASLDLFVVNSYGSIFQVICIALLLPFLSKLWGIPFNQLPSYIRDGGACFLNIGSRITGCEGAPLLPVMFVMMNMAYNISLLRLIKISSAVVSSLASTVSVPIAVYCFTLPLPYLGVASTLPRGFVAGTIILVVGMLLYAWTPSTNTSDSIIPSPPST

SEQ ID NO: 98688 - protein, 282 aa, Arabidopsis thaliana
  peptide (1)..(282): Ceres Seq. ID no. 13601293
  misc_feature (1)..(282): Homolog of NCBI NO: 18419900 NR Description: expressed protein [Arabidopsis thaliana]
  misc_feature (1)..(282): Homolog of NCBI NO: 21553716 NR Description: unknown [Arabidopsis thaliana]
  misc_feature (1)..(282): Homolog of NCBI NO: 20260240 NR Description: unknown protein [Arabidopsis thaliana]
  misc_feature (1)..(282): Homolog of NCBI NO: 21536591 NR Description: unknown [Arabidopsis thaliana]
  misc_feature (1)..(271): Homolog of NCBI NO: 30686536 NR Description: expressed protein [Arabidopsis thaliana]
  misc_feature (1)..(282): Homolog of NCBI NO: 15239887 NR Description: expressed protein [Arabidopsis thaliana] gene_id:MXC9.13~pir||T09909~similar to unknown protein
  misc_feature (55)..(226): Homolog of NCBI NO: 7487326 NR Description: hypothetical protein T22A6.290 - Arabidopsis >gi|5051788|emb|CAB45081.1| hypothetical protein [Arabidopsis >gi|7269296|emb|CAB79356.1| hypothetical protein [Arabidopsis
  misc_feature (1)..(27): Homolog of NCBI NO: 7487326 NR Description: hypothetical protein T22A6.290 - Arabidopsis >gi|5051788|emb|CAB45081.1| hypothetical protein [Arabidopsis >gi|7269296|emb|CAB79356.1| hypothetical protein [Arabidopsis
  misc_feature (1)..(78): Homolog of NCBI NO: 28973717 NR Description: unknown protein [Arabidopsis thaliana]
  misc_feature (1)..(40): Homolog of NCBI NO: 20161872 NR Description: B1139B11.13 [Oryza sativa (japonica
MLSVPKLPFLIVGVLESLALAAGMAAASNLSGPSTTVLSQTFLVWQILFSIIFLGRRYRINQILGCTLVAFGVIVSVASGSGAAHSFKDTGILWSLLMVFSFLLQGADTVMKEVIFLDSKKRLKGASLDLFVVNSYGSIFQVICIALLLPFLSKLWGIPFNQLPSYIRDGGACFLNIGSRITGCEGAPLLPVMFVMMNMAYNISLLRLIKISSAVVSSLASTVSVPIAVYCFTLPLPYLGVASTLPRGFVAGTIILVVGMLLYAWTPSTNTSDSIIPSPPST

SEQ ID NO: 98689 - DNA, 1205 bp, Arabidopsis thaliana
  misc_feature (1)..(1205): Ceres Seq. ID no. 13601294
  misc_feature: MA Experiment ID: 108461 Result: Down-regulated in Transcription
  misc_feature: MA Experiment 108461 PARAMETER Experiment Name: At_Germinating_Seeds_cDNA_P Parameter: Age (day) Value: 1 vs. 0
  misc_feature: MA Experiment 108461 PARAMETER Experiment Name: At_Germinating_Seeds_cDNA_P Parameter: Tissue Value: Germinating Seeds
  misc_feature: MA Experiment ID: 108469 Result: Up-regulated in Transcription
  misc_feature: MA Experiment ID: 108572 Result: Up-regulated in Transcription
  misc_feature: MA Experiment 108572 PARAMETER Experiment Name: At_Drought_cDNA_P Parameter: Timepoint (hr) Value: 1
  misc_feature: MA Experiment 108572 PARAMETER Experiment Name: At_Drought_cDNA_P Parameter: Tissue Value: Aerial
  misc_feature: MA Experiment 108572 PARAMETER Experiment Name: At_Drought_cDNA_P Parameter: Treatment Value: Drought vs. No Drought
  misc_feature: MA Experiment ID: 108573 Result: Up-regulated in Transcription
  misc_feature: MA Experiment 108573 PARAMETER Experiment Name: At_Drought_cDNA_P Parameter: Timepoint (hr) Value: 6
  misc_feature: MA Experiment 108573 PARAMETER Experiment Name: At_Drought_cDNA_P Parameter: Tissue Value: Aerial
  misc_feature: MA Experiment 108573 PARAMETER Experiment Name: At_Drought_cDNA_P Parameter: Treatment Value: Drought vs. No Drought
  misc_feature: MA Experiment ID: 108574 Result: Up-regulated in Transcription
  misc_feature: MA Experiment 108574 PARAMETER Experiment Name: At_Wounding__cDNA_P Parameter: Timepoint (hr) Value: 1
  misc_feature: MA Experiment 108574 PARAMETER Experiment Name: At_Wounding__cDNA_P Parameter: Tissue Value: Aerial
  misc_feature: MA Experiment 108574 PARAMETER Experiment Name: At_Wounding__cDNA_P Parameter: Treatment Value: Wounding vs. No Wounding
  misc_feature: MA Experiment ID: 108585 Result: Up-regulated in Transcription
  misc_feature: MA Experiment 108585 PARAMETER Experiment Name: At_5mM_NaNP_cDNA_P Parameter: Timepoint (hr) Value: 6
  misc_feature: MA Experiment 108585 PARAMETER Experiment Name: At_5mM_NaNP_cDNA_P Parameter: Tissue Value: Aerial
  misc_feature: MA Experiment 108585 PARAMETER Experiment Name: At_5mM_NaNP_cDNA_P Parameter: Treatment Value: null
  misc_feature: MA Experiment ID: 108667 Result: Up-regulated in Transcription
  misc_feature: MA Experiment 108667 PARAMETER Experiment Name: At_2mM_SA_cDNA_P Parameter: Plant Line Value: WS
  misc_feature: MA Experiment 108667 PARAMETER Experiment Name: At_2mM_SA_cDNA_P Parameter: Timepoint (hr) Value: 1
  misc_feature: MA Experiment 108667 PARAMETER Experiment Name: At_2mM_SA_cDNA_P Parameter: Treatment Value: 2mM SA vs. No Treatment
  misc_feature: MA Experiment ID: 108668 Result: Up-regulated in Transcription
  misc_feature: MA Experiment 108668 PARAMETER Experiment Name: At_2mM_SA_cDNA_P Parameter: Plant Line Value: WS
  misc_feature: MA Experiment 108668 PARAMETER Experiment Name: At_2mM_SA_cDNA_P Parameter: Timepoint (hr) Value: 6
  misc_feature: MA Experiment 108668 PARAMETER Experiment Name: At_2mM_SA_cDNA_P Parameter: Treatment Value: 2mM SA vs. No Treatment
  misc_feature: MA Experiment ID: 20000086 Result: Up-regulated in Transcription
  misc_feature: MA Experiment 20000086 PARAMETER Experiment Name: At_100uM_ABA_Mutants_cDNA_P Parameter: Plant Line Value: CS22
  misc_feature: MA Experiment 20000086 PARAMETER Experiment Name: At_100uM_ABA_Mutants_cDNA_P Parameter: Timepoint (hr) Value: 6
  misc_feature: MA Experiment 20000086 PARAMETER Experiment Name: At_100uM_ABA_Mutants_cDNA_P Parameter: Tissue Value: Aerial
  misc_feature: MA Experiment 20000086 PARAMETER Experiment Name: At_100uM_ABA_Mutants_cDNA_P Parameter: Treatment Value: 100uM ABA vs. No Treatment
  misc_feature: MA Experiment ID: 20000087 Result: Up-regulated in Transcription
  misc_feature: MA Experiment 20000087 PARAMETER Experiment Name: At_100uM_ABA_Mutants_cDNA_P Parameter: Plant Line Value: WS
  misc_feature: MA Experiment 20000087 PARAMETER Experiment Name: At_100uM_ABA_Mutants_cDNA_P Parameter: Timepoint (hr) Value: 6
  misc_feature: MA Experiment 20000087 PARAMETER Experiment Name: At_100uM_ABA_Mutants_cDNA_P Parameter: Tissue Value: Aerial
  misc_feature: MA Experiment 20000087 PARAMETER Experiment Name: At_100uM_ABA_Mutants_cDNA_P Parameter: Treatment Value: 100uM ABA vs. No Treatment
  misc_feature: MA Experiment ID: 20000089 Result: Up-regulated in Transcription
  misc_feature: MA Experiment ID: 20000090 Result: Up-regulated in Transcription
  misc_feature: MA Experiment ID: 20000117 Result: Up-regulated in Transcription
  misc_feature: MA Experiment 20000117 PARAMETER Experiment Name: At_100uM_ABA_Mutants_cDNA_P Parameter: Plant Line Value: Columbia
  misc_feature: MA Experiment 20000117 PARAMETER Experiment Name: At_100uM_ABA_Mutants_cDNA_P Parameter: Timepoint (hr) Value: 6
  misc_feature: MA Experiment 20000117 PARAMETER Experiment Name: At_100uM_ABA_Mutants_cDNA_P Parameter: Tissue Value: Aerial
  misc_feature: MA Experiment 20000117 PARAMETER Experiment Name: At_100uM_ABA_Mutants_cDNA_P Parameter: Treatment Value: 100uM ABA vs. No Treatment
  misc_feature: MA Experiment ID: 20000179 Result: Down-regulated in Transcription
  misc_feature: MA Experiment 20000179 PARAMETER Experiment Name: At_Germinating_Seeds_P Parameter: Age (hr) Value: 6 vs. 0
  misc_feature: MA Experiment 20000179 PARAMETER Experiment Name: At_Germinating_Seeds_P Parameter: Tissue Value: Germinating Seeds
  misc_feature: MA Experiment ID: 20000180 Result: Down-regulated in Transcription
  misc_feature: MA Experiment 20000180 PARAMETER Experiment Name: At_Germinating_Seeds_P Parameter: Age (hr) Value: 24 vs. 0
  misc_feature: MA Experiment 20000180 PARAMETER Experiment Name: At_Germinating_Seeds_P Parameter: Tissue Value: Germinating Seeds
  misc_feature: MA Experiment ID: 20000182 Result: Up-regulated in Transcription
  misc_feature: MA Experiment 20000182 PARAMETER Experiment Name: At_2mM_SA_P Parameter: Age (day) Value: 14
  misc_feature: MA Experiment 20000182 PARAMETER Experiment Name: At_2mM_SA_P Parameter: Organism Value: A. thaliana
  misc_feature: MA Experiment 20000182 PARAMETER Experiment Name: At_2mM_SA_P Parameter: Plant Line Value: WS
  misc_feature: MA Experiment 20000182 PARAMETER Experiment Name: At_2mM_SA_P Parameter: Timepoint (hr) Value: 6
  misc_feature: MA Experiment 20000182 PARAMETER Experiment Name: At_2mM_SA_P Parameter: Tissue Value: Aerial
  misc_feature: MA Experiment 20000182 PARAMETER Experiment Name: At_2mM_SA_P Parameter: Treatment Value: 2mM SA vs. No Treatment
  misc_feature: MA Experiment ID: 20000185 Result: Up-regulated in Transcription
  misc_feature: MA Experiment 20000185 PARAMETER Experiment Name: At_Roots__P Parameter: Age (day) Value: 7 vs. 21
  misc_feature: MA Experiment 20000185 PARAMETER Experiment Name: At_Roots__P Parameter: Organism Value: A. thaliana
  misc_feature: MA Experiment 20000185 PARAMETER Experiment Name: At_Roots__P Parameter: Tissue Value: Roots vs. Whole Plant
  misc_feature: MA Experiment ID: 20000224 Result: Up-regulated in Transcription
  misc_feature: MA Experiment ID: 20000437 Result: Up-regulated in Transcription
  misc_feature: MA Experiment 20000437 PARAMETER Experiment Name: At_Drought_P Parameter: Age (day) Value: 8
  misc_feature: MA Experiment 20000437 PARAMETER Experiment Name: At_Drought_P Parameter: Organism Value: A. thaliana
  misc_feature: MA Experiment 20000437 PARAMETER Experiment Name: At_Drought_P Parameter: Plant Line Value: WS
  misc_feature: MA Experiment 20000437 PARAMETER Experiment Name: At_Drought_P Parameter: Timepoint (hr) Value: 24
  misc_feature: MA Experiment 20000437 PARAMETER Experiment Name: At_Drought_P Parameter: Tissue Value: Whole Plant
  misc_feature: MA Experiment 20000437 PARAMETER Experiment Name: At_Drought_P Parameter: Treatment Value: Drought vs. No Drought
  misc_feature: MA Experiment ID: 20000439 Result: Up-regulated in Transcription
  misc_feature: MA Experiment 20000439 PARAMETER Experiment Name: At_Roots__P Parameter: Age (day) Value: 14 vs. 21
  misc_feature: MA Experiment 20000439 PARAMETER Experiment Name: At_Roots__P Parameter: Organism Value: A. thaliana
  misc_feature: MA Experiment 20000439 PARAMETER Experiment Name: At_Roots__P Parameter: Tissue Value: Roots vs. Whole Plant
  misc_feature: MA Experiment ID: 20000527 Result: Down-regulated in Transcription
  misc_feature: MA Experiment 20000527 PARAMETER Experiment Name: At_10percent_PEG_P Parameter: Age (day) Value: 20
  misc_feature: MA Experiment 20000527 PARAMETER Experiment Name: At_10percent_PEG_P Parameter: Organism Value: A. thaliana
  misc_feature: MA Experiment 20000527 PARAMETER Experiment Name: At_10percent_PEG_P Parameter: Plant Line Value: WS
  misc_feature: MA Experiment 20000527 PARAMETER Experiment Name: At_10percent_PEG_P Parameter: Timepoint (day) Value: 20
  misc_feature: MA Experiment 20000527 PARAMETER Experiment Name: At_10percent_PEG_P Parameter: Tissue Value: Whole Plant
  misc_feature: MA Experiment 20000527 PARAMETER Experiment Name: At_10percent_PEG_P Parameter: Treatment Value: 10percent PEG vs. No Treatment
  misc_feature: MA Experiment ID: 20000794 Result: Down-regulated in Transcription
  misc_feature: MA Experiment 20000794 PARAMETER Experiment Name: At_Petals_P Parameter: Age (day) Value: 23-25 days
  misc_feature: MA Experiment 20000794 PARAMETER Experiment Name: At_Petals_P Parameter: Plant Line Value: WS
  misc_feature: MA Experiment 20000794 PARAMETER Experiment Name: At_Petals_P Parameter: Tissue Value: Petals vs. Whole plant
  misc_feature: MA Experiment ID: 20001247 Result: Down-regulated in Transcription
  misc_feature: MA Experiment 20001247 PARAMETER Experiment Name: At_Far-red-induction_P Parameter: Age (day) Value: 7
  misc_feature: MA Experiment 20001247 PARAMETER Experiment Name: At_Far-red-induction_P Parameter: Light Value: Far-red vs. White
  misc_feature: MA Experiment 20001247 PARAMETER Experiment Name: At_Far-red-induction_P Parameter: Organism Value: A. thaliana
  misc_feature: MA Experiment 20001247 PARAMETER Experiment Name: At_Far-red-induction_P Parameter: Plant Line Value: Columbia
  misc_feature: MA Experiment 20001247 PARAMETER Experiment Name: At_Far-red-induction_P Parameter: Timepoint (hr) Value: 1
  misc_feature: MA Experiment 20001247 PARAMETER Experiment Name: At_Far-red-induction_P Parameter: Tissue Value: Whole Plant
  misc_feature: MA Experiment ID: 20001451 Result: Down-regulated in Transcription
  misc_feature: MA Experiment 20001451 PARAMETER Experiment Name: At_Far-red-induction_P Parameter: Age (day) Value: 7
  misc_feature: MA Experiment 20001451 PARAMETER Experiment Name: At_Far-red-induction_P Parameter: Light Value: Far-red vs. White
  misc_feature: MA Experiment 20001451 PARAMETER Experiment Name: At_Far-red-induction_P Parameter: Organism Value: A. thaliana
  misc_feature: MA Experiment 20001451 PARAMETER Experiment Name: At_Far-red-induction_P Parameter: Plant Line Value: Columbia
  misc_feature: MA Experiment 20001451 PARAMETER Experiment Name: At_Far-red-induction_P Parameter: Timepoint (hr) Value: 24
  misc_feature: MA Experiment 20001451 PARAMETER Experiment Name: At_Far-red-induction_P Parameter: Tissue Value: Whole Plant
  misc_feature: MA Experiment ID: 20001560 Result: Up-regulated in Transcription
  misc_feature: MA Experiment 20001560 PARAMETER Experiment Name: At_Drought_Soil_Dry_P Parameter: Age (day) Value: 28
  misc_feature: MA Experiment 20001560 PARAMETER Experiment Name: At_Drought_Soil_Dry_P Parameter: Organism Value: A. thaliana
  misc_feature: MA Experiment 20001560 PARAMETER Experiment Name: At_Drought_Soil_Dry_P Parameter: Plant Line Value: WS
  misc_feature: MA Experiment 20001560 PARAMETER Experiment Name: At_Drought_Soil_Dry_P Parameter: Post Timepoint (hr) Value: None
  misc_feature: MA Experiment 20001560 PARAMETER Experiment Name: At_Drought_Soil_Dry_P Parameter: Post-Treatment Value: None
  misc_feature: MA Experiment 20001560 PARAMETER Experiment Name: At_Drought_Soil_Dry_P Parameter: Timepoint (day) Value: 14
  misc_feature: MA Experiment 20001560 PARAMETER Experiment Name: At_Drought_Soil_Dry_P Parameter: Treatment Value: Drought vs. No Drought
  misc_feature: MA Experiment ID: 20001904 Result: Up-regulated in Transcription
  misc_feature: MA Experiment 20001904 PARAMETER Experiment Name: At_Drought_Reproduction_P Parameter: Age (day) Value: 37
  misc_feature: MA Experiment 20001904 PARAMETER Experiment Name: At_Drought_Reproduction_P Parameter: Organism Value: A. thaliana
  misc_feature: MA Experiment 20001904 PARAMETER Experiment Name: At_Drought_Reproduction_P Parameter: Plant Line Value: WS
  misc_feature: MA Experiment 20001904 PARAMETER Experiment Name: At_Drought_Reproduction_P Parameter: Timepoint (day) Value: 7
  misc_feature: MA Experiment 20001904 PARAMETER Experiment Name: At_Drought_Reproduction_P Parameter: Tissue Value: Rosettes
  misc_feature: MA Experiment 20001904 PARAMETER Experiment Name: At_Drought_Reproduction_P Parameter: Treatment Value: Drought vs. No Drought
  misc_feature: MA Experiment ID: 20001905 Result: Up-regulated in Transcription
  misc_feature: MA Experiment 20001905 PARAMETER Experiment Name: At_Drought_Reproduction_P Parameter: Age (day) Value: 40
  misc_feature: MA Experiment 20001905 PARAMETER Experiment Name: At_Drought_Reproduction_P Parameter: Organism Value: A. thaliana
  misc_feature: MA Experiment 20001905 PARAMETER Experiment Name: At_Drought_Reproduction_P Parameter: Plant Line Value: WS
  misc_feature: MA Experiment 20001905 PARAMETER Experiment Name: At_Drought_Reproduction_P Parameter: Timepoint (day) Value: 10
  misc_feature: MA Experiment 20001905 PARAMETER Experiment Name: At_Drought_Reproduction_P Parameter: Tissue Value: Rosettes
  misc_feature: MA Experiment 20001905 PARAMETER Experiment Name: At_Drought_Reproduction_P Parameter: Treatment Value: Drought vs. No Drought
acgcattcgtcatttggtccctccacttagagagaagcagacagaacataactaaaatcgagaaaaatggcaaacagtggtgaaggtaaagtggtgtgtgtaacaggagcctccggttacatcgcctcatggctcgtcaagttcctacttagccgtggctacactgttaaggcctccgtccgtgatcccagtgatccgaaaaagacacaacacttagtttcactagaaggtgcaaaggaaagacttcacttgttcaaagcagaccttttggaacaaggttctttcgactctgctattgatggttgccatggagttttccacactgcttctccattttttaatgatgccaaagacccacaggctgaacttattgatcctgcggtcaaggggacgcttaacgttttgaattcgtgcgccaaagcctcttcggttaagagggttgttgtaacctcctccatggctgccgttggttacaatggaaaaccacgcacacctgatgttaccgtcgatgaaacttggttctctgatcctgagctttgcgaggcctccaagatgtggtatgttctatccaagactttggcggaagatgcagcttggaaactcgctaaagagaaaggcttagacattgttactattaacccggctatggtgatcggtcctctcctacagccaactctgaacacgagtgctgctgctatattaaacttaatcaatggtgcaaagactttcccaaacttgagtttcggatgggttaatgtaaaagacgtagccaatgcgcacatccaagcatttgaggtcccttcagctaatgggcgttattgtttggtcgagcgtgtcgttcaccactccgagattgttaacattctacgtgagctttacccaaatctcccactacctgaaaggtgtgtggacgagaatccctacgtgccaacgtatcaagtgtccaaggataaaacgaggagccttggcatagactacatacccttgaaggttagcatcaaggagaccgtcgagtccttgaaggaaaaaggtttcgcacagttctgagaaagcatttgagccaatggatttaatccagattagataaagtatttggaagactatttcagaaataatatttggaacatgtcaatgttctcaaggagatattagtatgttcttgtgtactttattgttgttccatcaaatgagttacttttcctttt

SEQ ID NO: 98690 - protein, 326 aa, Arabidopsis thaliana
  peptide (1)..(326): Ceres Seq. ID no. 13601295
  misc_feature (10)..(139): Pfam Name: NAD dependent epimerase/dehydratase family Pfam Description: NAD dependent epimerase/dehydratase family
  misc_feature (1)..(326): Homolog of NCBI NO: 15239741 NR Description: cinnamyl-alcohol dehydrogenase (CAD), putative
  misc_feature (1)..(326): Homolog of NCBI NO: 21594240 NR Description: cinnamyl-alcohol dehydrogenase-like protein
  misc_feature (3)..(326): Homolog of NCBI NO: 7488627 NR Description: probable cinnamyl-alcohol dehydrogenase (EC - apple tree >gi|2981475|gb|AAC06319.1| putative cinnamyl alcohol
  misc_feature (2)..(326): Homolog of NCBI NO: 7431409 NR Description: cinnamyl-alcohol dehydrogenase (EC 1.1.1.195) - tree >gi|1143445|emb|CAA61275.1| cinnamyl alcohol dehydrogenase
  misc_feature (3)..(326): Homolog of NCBI NO: 37029996 NR Description: NADPH-dependent cinnamyl alcohol dehydrogenase
  misc_feature (3)..(326): Homolog of NCBI NO: 30694964 NR Description: cinnamyl-alcohol dehydrogenase (CAD), putative
  misc_feature (6)..(326): Homolog of NCBI NO: 25405464 NR Description: hypothetical protein F5D21.12 [imported] - thaliana >gi|12325359|gb|AAG52618.1|AC024261_5 cinnamyl alcohol
  misc_feature (1)..(326): Homolog of NCBI NO: 34913420 NR Description: putative cinnamyl-alcohol dehydrogenase [Oryza
  misc_feature (3)..(326): Homolog of NCBI NO: 7431406 NR Description: probable cinnamyl-alcohol dehydrogenase (EC
  misc_feature (3)..(323): Homolog of NCBI NO: 5852203 NR Description: aldehyde reductase [Vigna radiata]
MANSGEGKVVCVTGASGYIASWLVKFLLSRGYTVKASVRDPSDPKKTQHLVSLEGAKERLHLFKADLLEQGSFDSAIDGCHGVFHTASPFFNDAKDPQAELIDPAVKGTLNVLNSCAKASSVKRVVVTSSMAAVGYNGKPRTPDVTVDETWFSDPELCEASKMWYVLSKTLAEDAAWKLAKEKGLDIVTINPAMVIGPLLQPTLNTSAAAILNLINGAKTFPNLSFGWVNVKDVANAHIQAFEVPSANGRYCLVERVVHHSEIVNILRELYPNLPLPERCVDENPYVPTYQVSKDKTRSLGIDYIPLKVSIKETVESLKEKGFAQF

SEQ ID NO: 98691 - protein, 196 aa, Arabidopsis thaliana
  peptide (1)..(196): Ceres Seq. ID no. 13601296
  misc_feature (1)..(111): Pfam Name: 3-beta hydroxysteroid dehydrogenase/isomerase family Pfam Description: 3-beta hydroxysteroid dehydrogenase/isomerase
  misc_feature (1)..(196): Homolog of NCBI NO: 15239741 NR Description: cinnamyl-alcohol dehydrogenase (CAD), putative
  misc_feature (1)..(196): Homolog of NCBI NO: 21594240 NR Description: cinnamyl-alcohol dehydrogenase-like protein
  misc_feature (1)..(196): Homolog of NCBI NO: 7488627 NR Description: probable cinnamyl-alcohol dehydrogenase (EC - apple tree >gi|2981475|gb|AAC06319.1| putative cinnamyl alcohol
  misc_feature (1)..(196): Homolog of NCBI NO: 7431409 NR Description: cinnamyl-alcohol dehydrogenase (EC 1.1.1.195) - tree >gi|1143445|emb|CAA61275.1| cinnamyl alcohol dehydrogenase
  misc_feature (1)..(196): Homolog of NCBI NO: 37029996 NR Description: NADPH-dependent cinnamyl alcohol dehydrogenase
  misc_feature (1)..(196): Homolog of NCBI NO: 30694964 NR Description: cinnamyl-alcohol dehydrogenase (CAD), putative
  misc_feature (1)..(196): Homolog of NCBI NO: 25405464 NR Description: hypothetical protein F5D21.12 [imported] - thaliana >gi|12325359|gb|AAG52618.1|AC024261_5 cinnamyl alcohol
  misc_feature (1)..(196): Homolog of NCBI NO: 34913420 NR Description: putative cinnamyl-alcohol dehydrogenase [Oryza
  misc_feature (1)..(196): Homolog of NCBI NO: 7431406 NR Description: probable cinnamyl-alcohol dehydrogenase (EC
  misc_feature (1)..(193): Homolog of NCBI NO: 5852203 NR Description: aldehyde reductase [Vigna radiata]
MAAVGYNGKPRTPDVTVDETWFSDPELCEASKMWYVLSKTLAEDAAWKLAKEKGLDIVTINPAMVIGPLLQPTLNTSAAAILNLINGAKTFPNLSFGWVNVKDVANAHIQAFEVPSANGRYCLVERVVHHSEIVNILRELYPNLPLPERCVDENPYVPTYQVSKDKTRSLGIDYIPLKVSIKETVESLKEKGFAQF

SEQ ID NO: 98692 - protein, 164 aa, Arabidopsis thaliana
  peptide (1)..(164): Ceres Seq. ID no. 13601297
  misc_feature (1)..(79): Pfam Name: 3-beta hydroxysteroid dehydrogenase/isomerase family Pfam Description: 3-beta hydroxysteroid dehydrogenase/isomerase
  misc_feature (1)..(164): Homolog of NCBI NO: 15239741 NR Description: cinnamyl-alcohol dehydrogenase (CAD), putative
  misc_feature (1)..(164): Homolog of NCBI NO: 21594240 NR Description: cinnamyl-alcohol dehydrogenase-like protein
  misc_feature (1)..(164): Homolog of NCBI NO: 7488627 NR Description: probable cinnamyl-alcohol dehydrogenase (EC - apple tree >gi|2981475|gb|AAC06319.1| putative cinnamyl alcohol
  misc_feature (1)..(164): Homolog of NCBI NO: 7431409 NR Description: cinnamyl-alcohol dehydrogenase (EC 1.1.1.195) - tree >gi|1143445|emb|CAA61275.1| cinnamyl alcohol dehydrogenase
  misc_feature (1)..(164): Homolog of NCBI NO: 37029996 NR Description: NADPH-dependent cinnamyl alcohol dehydrogenase
  misc_feature (1)..(164): Homolog of NCBI NO: 30694964 NR Description: cinnamyl-alcohol dehydrogenase (CAD), putative
  misc_feature (1)..(164): Homolog of NCBI NO: 25405464 NR Description: hypothetical protein F5D21.12 [imported] - thaliana >gi|12325359|gb|AAG52618.1|AC024261_5 cinnamyl alcohol
  misc_feature (1)..(164): Homolog of NCBI NO: 34913420 NR Description: putative cinnamyl-alcohol dehydrogenase [Oryza
  misc_feature (1)..(164): Homolog of NCBI NO: 7431406 NR Description: probable cinnamyl-alcohol dehydrogenase (EC
  misc_feature (1)..(161): Homolog of NCBI NO: 5852203 NR Description: aldehyde reductase [Vigna radiata]
MWYVLSKTLAEDAAWKLAKEKGLDIVTINPAMVIGPLLQPTLNTSAAAILNLINGAKTFPNLSFGWVNVKDVANAHIQAFEVPSANGRYCLVERVVHHSEIVNILRELYPNLPLPERCVDENPYVPTYQVSKDKTRSLGIDYIPLKVSIKETVESLKEKGFAQF

SEQ ID NO: 98693 - DNA, 1382 bp, Arabidopsis thaliana
  misc_feature (1)..(1382): Ceres Seq. ID no. 13601305
  misc_feature: MA Experiment ID: 108434 Result: Up-regulated in Transcription
  misc_feature: MA Experiment 108434 PARAMETER Experiment Name: At_Root_Tips_cDNA_P Parameter: Tissue Value: Root Tips
  misc_feature: MA Experiment ID: 20000113 Result: Up-regulated in Transcription
  misc_feature: MA Experiment 20000113 PARAMETER Experiment Name: At_42deg_Heat_cDNA_P Parameter: Temperature (deg C) Value: 42 vs. 22
  misc_feature: MA Experiment 20000113 PARAMETER Experiment Name: At_42deg_Heat_cDNA_P Parameter: Timepoint (hr) Value: 8
  misc_feature: MA Experiment 20000113 PARAMETER Experiment Name: At_42deg_Heat_cDNA_P Parameter: Tissue Value: Aerial
  misc_feature: MA Experiment ID: 20000185 Result: Up-regulated in Transcription
  misc_feature: MA Experiment 20000185 PARAMETER Experiment Name: At_Roots__P Parameter: Age (day) Value: 7 vs. 21
  misc_feature: MA Experiment 20000185 PARAMETER Experiment Name: At_Roots__P Parameter: Organism Value: A. thaliana
  misc_feature: MA Experiment 20000185 PARAMETER Experiment Name: At_Roots__P Parameter: Tissue Value: Roots vs. Whole Plant
agttccccacaaagctcgttgtcgtcatcgcgcgagcttgaaccaaaaaaaccatgaacagtgagaaggaagacgagccattggaagagatcggcgattcgaataatgttctcgatctcactagctatcagctccacagtctcgatacggtcgagttaccgccgaacctgattgagctggaccttacggcgaaccgtttgtcgggattggactcgaggatcgctcagctctccacgcttaagaagctttctctccgccaaaacctaattgatgattccgccgtcgaaccgttgtctcactgggacgccttgtccgatctcgaggagttagttctcagagataacaagctagcgaaagtaccagatgtcagcatattcacgaagcttttggtttacgacatatctttcaatgaaatcacttctttggaaggaatatccaaggcctctagcacactgaaggaactctatgtgtctaaaaatgaagttaacaagattatggagattgaacacttacacaacttgcagattcttgaactggggtctaatagattgcgggtgatggaaaatctggaaaacttcacaaaattagaagaactatggctcggaagaaaccgtatcaaagttgttaacctgtgtgggctcaaatgcataaaaaagattagcttgcagagcaatcgattgacctctatgaaaggatttgaggaatgtgttgctcttgaagagttatatttgagccataatggtatctccaaaatggaaggcttgagtgcattggtcaacctacgggtattggacgtgtcgaacaacaagcttacttcagttgatgacattcagaacctcacaaagttggaagatttgtggcttaatgacaaccagatagaatcactggaagcaatcacagaagctgttacaggatctaaagagaagcttaccactatctacctcgaaaataacccttgtgccaagtcttctgattatgttgctgcggtcagacaaatcttcccgaatgtggagcaaattgattctaacttatttgcttagagatggatatattccttgtcgtgctgtttgtatgaatgtctgcttcctcatcccatgggcatgggcatcgaatttaggaaatcaggtacaacacggattcctcaaaatatacatgtgtctgctgtttatcataaagaagtgcaaatgagcaaattaaatcgctctcgtcatggatatttattaaaacgtttttgaaattctagtgttcccttgcaagtaaaccaattcttgtttttggtctgtaatagtatgtggactgtgtctgtaaaagggaatccccgagtctgaagttgtctttgtttcaagtttcaaccgagaacactaacttgaatactttgatcc

SEQ ID NO: 98694 - protein, 328 aa, Arabidopsis thaliana
  peptide (1)..(328): Ceres Seq. ID no. 13601306
  misc_feature (1)..(328): Homolog of NCBI NO: 15241153 NR Description: leucine rich repeat protein family [Arabidopsis
  misc_feature (1)..(328): Homolog of NCBI NO: 21536755 NR Description: unknown [Arabidopsis thaliana]
  misc_feature (30)..(324): Homolog of NCBI NO: 12963569 NR Description: protein phosphatase-1 regulatory subunit 7 [Mus
  misc_feature (30)..(324): Homolog of NCBI NO: 34877683 NR Description: similar to protein phosphatase 1, regulatory
  misc_feature (30)..(324): Homolog of NCBI NO: 4506013 NR Description: protein phosphatase 1, regulatory subunit 7;
  misc_feature (30)..(324): Homolog of NCBI NO: 4633066 NR Description: protein phosphatase-1 regulatory subunit 7 alpha2
  misc_feature (1)..(324): Homolog of NCBI NO: 6322655 NR Description: Interacts with and may be a positive regulator of which encodes type1 protein phosphatase; Sds22p [Saccharomyces
  misc_feature (21)..(326): Homolog of NCBI NO: 31233812 NR Description: ENSANGP00000015763 [Anopheles gambiae]
  misc_feature (31)..(326): Homolog of NCBI NO: 21358617 NR Description: CG5851-PA [Drosophila melanogaster]
  misc_feature (31)..(326): Homolog of NCBI NO: 6684160 NR Description: putative mitotic protein phosphatase 1 regulator
MNSEKEDEPLEEIGDSNNVLDLTSYQLHSLDTVELPPNLIELDLTANRLSGLDSRIAQLSTLKKLSLRQNLIDDSAVEPLSHWDALSDLEELVLRDNKLAKVPDVSIFTKLLVYDISFNEITSLEGISKASSTLKELYVSKNEVNKIMEIEHLHNLQILELGSNRLRVMENLENFTKLEELWLGRNRIKVVNLCGLKCIKKISLQSNRLTSMKGFEECVALEELYLSHNGISKMEGLSALVNLRVLDVSNNKLTSVDDIQNLTKLEDLWLNDNQIESLEAITEAVTGSKEKLTTIYLENNPCAKSSDYVAAVRQIFPNVEQIDSNLFA

SEQ ID NO: 98695 - protein, 181 aa, Arabidopsis thaliana
  peptide (1)..(181): Ceres Seq. ID no. 13601307
  misc_feature (1)..(181): Homolog of NCBI NO: 15241153 NR Description: leucine rich repeat protein family [Arabidopsis
  misc_feature (1)..(181): Homolog of NCBI NO: 21536755 NR Description: unknown [Arabidopsis thaliana]
  misc_feature (1)..(177): Homolog of NCBI NO: 12963569 NR Description: protein phosphatase-1 regulatory subunit 7 [Mus
  misc_feature (1)..(177): Homolog of NCBI NO: 34877683 NR Description: similar to protein phosphatase 1, regulatory
  misc_feature (1)..(177): Homolog of NCBI NO: 4506013 NR Description: protein phosphatase 1, regulatory subunit 7;
  misc_feature (1)..(177): Homolog of NCBI NO: 4633066 NR Description: protein phosphatase-1 regulatory subunit 7 alpha2
  misc_feature (1)..(177): Homolog of NCBI NO: 6322655 NR Description: Interacts with and may be a positive regulator of which encodes type1 protein phosphatase; Sds22p [Saccharomyces
  misc_feature (1)..(179): Homolog of NCBI NO: 31233812 NR Description: ENSANGP00000015763 [Anopheles gambiae]
  misc_feature (1)..(179): Homolog of NCBI NO: 21358617 NR Description: CG5851-PA [Drosophila melanogaster]
  misc_feature (1)..(179): Homolog of NCBI NO: 6684160 NR Description: putative mitotic protein phosphatase 1 regulator
MEIEHLHNLQILELGSNRLRVMENLENFTKLEELWLGRNRIKVVNLCGLKCIKKISLQSNRLTSMKGFEECVALEELYLSHNGISKMEGLSALVNLRVLDVSNNKLTSVDDIQNLTKLEDLWLNDNQIESLEAITEAVTGSKEKLTTIYLENNPCAKSSDYVAAVRQIFPNVEQIDSNLFA

SEQ ID NO: 98696 - DNA, 1166 bp, Arabidopsis thaliana
  misc_feature (1)..(1166): Ceres Seq. ID no. 13601308
  misc_feature: MA Experiment ID: 108434 Result: Up-regulated in Transcription
  misc_feature: MA Experiment 108434 PARAMETER Experiment Name: At_Root_Tips_cDNA_P Parameter: Tissue Value: Root Tips
  misc_feature: MA Experiment ID: 108462 Result: Down-regulated in Transcription
  misc_feature: MA Experiment 108462 PARAMETER Experiment Name: At_Germinating_Seeds_cDNA_P Parameter: Age (day) Value: 2 vs. 0
  misc_feature: MA Experiment 108462 PARAMETER Experiment Name: At_Germinating_Seeds_cDNA_P Parameter: Tissue Value: Germinating Seeds
  misc_feature: MA Experiment ID: 108463 Result: Down-regulated in Transcription
  misc_feature: MA Experiment 108463 PARAMETER Experiment Name: At_Germinating_Seeds_cDNA_P Parameter: Age (day) Value: 3 vs. 0
  misc_feature: MA Experiment 108463 PARAMETER Experiment Name: At_Germinating_Seeds_cDNA_P Parameter: Tissue Value: Germinating Seeds
  misc_feature: MA Experiment ID: 108464 Result: Down-regulated in Transcription
  misc_feature: MA Experiment 108464 PARAMETER Experiment Name: At_Germinating_Seeds_cDNA_P Parameter: Age (day) Value: 4 vs. 0
  misc_feature: MA Experiment 108464 PARAMETER Experiment Name: At_Germinating_Seeds_cDNA_P Parameter: Tissue Value: Germinating Seeds
  misc_feature: MA Experiment ID: 108488 Result: Up-regulated in Transcription
  misc_feature: MA Experiment ID: 108561 Result: Down-regulated in Transcription
  misc_feature: MA Experiment 108561 PARAMETER Experiment Name: At_100uM_ABA_cDNA_P Parameter: Timepoint (hr) Value: 6
  misc_feature: MA Experiment 108561 PARAMETER Experiment Name: At_100uM_ABA_cDNA_P Parameter: Tissue Value: Aerial
  misc_feature: MA Experiment 108561 PARAMETER Experiment Name: At_100uM_ABA_cDNA_P Parameter: Treatment Value: 100uM ABA vs. No Treatment
  misc_feature: MA Experiment ID: 108595 Result: Down-regulated in Transcription
  misc_feature: MA Experiment 108595 PARAMETER Experiment Name: At_Ler-pi_Ovule_cDNA_P Parameter: Plant Line Value: null
  misc_feature: MA Experiment ID: 108605 Result: Down-regulated in Transcription
  misc_feature: MA Experiment 108605 PARAMETER Experiment Name: At_100uM_ABA_cDNA_P Parameter: Timepoint (hr) Value: 6
  misc_feature: MA Experiment 108605 PARAMETER Experiment Name: At_100uM_ABA_cDNA_P Parameter: Tissue Value: Aerial
  misc_feature: MA Experiment 108605 PARAMETER Experiment Name: At_100uM_ABA_cDNA_P Parameter: Treatment Value: 100uM ABA vs. No Treatment
  misc_feature: MA Experiment ID: 108607 Result: Down-regulated in Transcription
  misc_feature: MA Experiment 108607 PARAMETER Experiment Name: At_100uM_ABA_cDNA_P Parameter: Timepoint (hr) Value: 4
  misc_feature: MA Experiment 108607 PARAMETER Experiment Name: At_100uM_ABA_cDNA_P Parameter: Tissue Value: Aerial
  misc_feature: MA Experiment 108607 PARAMETER Experiment Name: At_100uM_ABA_cDNA_P Parameter: Treatment Value: 100uM ABA vs. No Treatment
  misc_feature: MA Experiment ID: 20000090 Result: Up-regulated in Transcription
  misc_feature: MA Experiment ID: 20000111 Result: Down-regulated in Transcription
  misc_feature: MA Experiment 20000111 PARAMETER Experiment Name: At_42deg_Heat_cDNA_P Parameter: Temperature (deg C) Value: 42 vs. 22
  misc_feature: MA Experiment 20000111 PARAMETER Experiment Name: At_42deg_Heat_cDNA_P Parameter: Timepoint (hr) Value: 6
  misc_feature: MA Experiment 20000111 PARAMETER Experiment Name: At_42deg_Heat_cDNA_P Parameter: Tissue Value: Aerial
  misc_feature: MA Experiment ID: 20000112 Result: Down-regulated in Transcription
  misc_feature: MA Experiment 20000112 PARAMETER Experiment Name: At_42deg_Heat_cDNA_P Parameter: Temperature (deg C) Value: 42 vs. 22
  misc_feature: MA Experiment 20000112 PARAMETER Experiment Name: At_42deg_Heat_cDNA_P Parameter: Timepoint (hr) Value: 2
  misc_feature: MA Experiment 20000112 PARAMETER Experiment Name: At_42deg_Heat_cDNA_P Parameter: Tissue Value: Aerial
  misc_feature: MA Experiment ID: 20000113 Result: Down-regulated in Transcription
  misc_feature: MA Experiment 20000113 PARAMETER Experiment Name: At_42deg_Heat_cDNA_P Parameter: Temperature (deg C) Value: 42 vs. 22
  misc_feature: MA Experiment 20000113 PARAMETER Experiment Name: At_42deg_Heat_cDNA_P Parameter: Timepoint (hr) Value: 8
  misc_feature: MA Experiment 20000113 PARAMETER Experiment Name: At_42deg_Heat_cDNA_P Parameter: Tissue Value: Aerial
  misc_feature: MA Experiment ID: 20000169 Result: Down-regulated in Transcription
  misc_feature: MA Experiment 20000169 PARAMETER Experiment Name: At_100uM_ABA_P Parameter: Age (day) Value: 14
  misc_feature: MA Experiment 20000169 PARAMETER Experiment Name: At_100uM_ABA_P Parameter: Organism Value: A. thaliana
  misc_feature: MA Experiment 20000169 PARAMETER Experiment Name: At_100uM_ABA_P Parameter: Plant Line Value: WS
  misc_feature: MA Experiment 20000169 PARAMETER Experiment Name: At_100uM_ABA_P Parameter: Timepoint (hr) Value: 6
  misc_feature: MA Experiment 20000169 PARAMETER Experiment Name: At_100uM_ABA_P Parameter: Tissue Value: Aerial
  misc_feature: MA Experiment 20000169 PARAMETER Experiment Name: At_100uM_ABA_P Parameter: Treatment Value: 100uM ABA vs. No Treatment
  misc_feature: MA Experiment ID: 20000173 Result: Down-regulated in Transcription
  misc_feature: MA Experiment 20000173 PARAMETER Experiment Name: At_42deg_Heat_P Parameter: Age (day) Value: 14
  misc_feature: MA Experiment 20000173 PARAMETER Experiment Name: At_42deg_Heat_P Parameter: Organism Value: A. thaliana
  misc_feature: MA Experiment 20000173 PARAMETER Experiment Name: At_42deg_Heat_P Parameter: Plant Line Value: WS
  misc_feature: MA Experiment 20000173 PARAMETER Experiment Name: At_42deg_Heat_P Parameter: Temperature (deg C) Value: 42 vs. 22
  misc_feature: MA Experiment 20000173 PARAMETER Experiment Name: At_42deg_Heat_P Parameter: Timepoint (hr) Value: 6
  misc_feature: MA Experiment 20000173 PARAMETER Experiment Name: At_42deg_Heat_P Parameter: Tissue Value: Aerial
  misc_feature: MA Experiment ID: 20000234 Result: Up-regulated in Transcription
  misc_feature: MA Experiment 20000234 PARAMETER Experiment Name: At_Siliques_P Parameter: Age (day) Value: 21
  misc_feature: MA Experiment 20000234 PARAMETER Experiment Name: At_Siliques_P Parameter: Organism Value: A. thaliana
  misc_feature: MA Experiment 20000234 PARAMETER Experiment Name: At_Siliques_P Parameter: Plant Line Value: WS
  misc_feature: MA Experiment 20000234 PARAMETER Experiment Name: At_Siliques_P Parameter: Tissue Value: Less Than 5mm Siliques vs. Whole Plant
  misc_feature: MA Experiment ID: 20000436 Result: Down-regulated in Transcription
  misc_feature: MA Experiment 20000436 PARAMETER Experiment Name: At_Drought_P Parameter: Age (day) Value: 7
  misc_feature: MA Experiment 20000436 PARAMETER Experiment Name: At_Drought_P Parameter: Organism Value: A. thaliana
  misc_feature: MA Experiment 20000436 PARAMETER Experiment Name: At_Drought_P Parameter: Plant Line Value: WS
  misc_feature: MA Experiment 20000436 PARAMETER Experiment Name: At_Drought_P Parameter: Timepoint (hr) Value: 12
  misc_feature: MA Experiment 20000436 PARAMETER Experiment Name: At_Drought_P Parameter: Tissue Value: Whole Plant
  misc_feature: MA Experiment 20000436 PARAMETER Experiment Name: At_Drought_P Parameter: Treatment Value: Drought vs. No Drought
  misc_feature: MA Experiment ID: 20000437 Result: Down-regulated in Transcription
  misc_feature: MA Experiment 20000437 PARAMETER Experiment Name: At_Drought_P Parameter: Age (day) Value: 8
  misc_feature: MA Experiment 20000437 PARAMETER Experiment Name: At_Drought_P Parameter: Organism Value: A. thaliana
  misc_feature: MA Experiment 20000437 PARAMETER Experiment Name: At_Drought_P Parameter: Plant Line Value: WS
  misc_feature: MA Experiment 20000437 PARAMETER Experiment Name: At_Drought_P Parameter: Timepoint (hr) Value: 24
  misc_feature: MA Experiment 20000437 PARAMETER Experiment Name: At_Drought_P Parameter: Tissue Value: Whole Plant
  misc_feature: MA Experiment 20000437 PARAMETER Experiment Name: At_Drought_P Parameter: Treatment Value: Drought vs. No Drought
  misc_feature: MA Experiment ID: 20000573 Result: Up-regulated in Transcription
  misc_feature: MA Experiment 20000573 PARAMETER Experiment Name: At_100uM_ABA_Mutants__P Parameter: Organism Value: A. thaliana
  misc_feature: MA Experiment 20000573 PARAMETER Experiment Name: At_100uM_ABA_Mutants__P Parameter: Plant Line Value: CS22 vs. Ler wt
  misc_feature: MA Experiment 20000573 PARAMETER Experiment Name: At_100uM_ABA_Mutants__P Parameter: Timepoint (hr) Value: N/A
  misc_feature: MA Experiment 20000573 PARAMETER Experiment Name: At_100uM_ABA_Mutants__P Parameter: Tissue Value: Whole Plant
  misc_feature: MA Experiment 20000573 PARAMETER Experiment Name: At_100uM_ABA_Mutants__P Parameter: Treatment Value: None
  misc_feature: MA Experiment ID: 20000574 Result: Up-regulated in Transcription
  misc_feature: MA Experiment 20000574 PARAMETER Experiment Name: At_100uM_ABA_Mutants__P Parameter: Organism Value: A. thaliana
  misc_feature: MA Experiment 20000574 PARAMETER Experiment Name: At_100uM_ABA_Mutants__P Parameter: Plant Line Value: CS23 vs. Ler wt
  misc_feature: MA Experiment 20000574 PARAMETER Experiment Name: At_100uM_ABA_Mutants__P Parameter: Timepoint (hr) Value: N/A
  misc_feature: MA Experiment 20000574 PARAMETER Experiment Name: At_100uM_ABA_Mutants__P Parameter: Tissue Value: Whole Plant
  misc_feature: MA Experiment 20000574 PARAMETER Experiment Name: At_100uM_ABA_Mutants__P Parameter: Treatment Value: None
  misc_feature: MA Experiment ID: 20000794 Result: Down-regulated in Transcription
  misc_feature: MA Experiment 20000794 PARAMETER Experiment Name: At_Petals_P Parameter: Age (day) Value: 23-25 days
  misc_feature: MA Experiment 20000794 PARAMETER Experiment Name: At_Petals_P Parameter: Plant Line Value: WS
  misc_feature: MA Experiment 20000794 PARAMETER Experiment Name: At_Petals_P Parameter: Tissue Value: Petals vs. Whole plant
  misc_feature: MA Experiment ID: 20001450 Result: Down-regulated in Transcription
  misc_feature: MA Experiment 20001450 PARAMETER Experiment Name: At_Far-red-induction_P Parameter: Age (day) Value: 7
  misc_feature: MA Experiment 20001450 PARAMETER Experiment Name: At_Far-red-induction_P Parameter: Light Value: Far-red vs. White
  misc_feature: MA Experiment 20001450 PARAMETER Experiment Name: At_Far-red-induction_P Parameter: Organism Value: A. thaliana
  misc_feature: MA Experiment 20001450 PARAMETER Experiment Name: At_Far-red-induction_P Parameter: Plant Line Value: Columbia
  misc_feature: MA Experiment 20001450 PARAMETER Experiment Name: At_Far-red-induction_P Parameter: Timepoint (hr) Value: 8
  misc_feature: MA Experiment 20001450 PARAMETER Experiment Name: At_Far-red-induction_P Parameter: Tissue Value: Whole Plant
  misc_feature: MA Experiment ID: 20001451 Result: Down-regulated in Transcription
  misc_feature: MA Experiment 20001451 PARAMETER Experiment Name: At_Far-red-induction_P Parameter: Age (day) Value: 7
  misc_feature: MA Experiment 20001451 PARAMETER Experiment Name: At_Far-red-induction_P Parameter: Light Value: Far-red vs. White
  misc_feature: MA Experiment 20001451 PARAMETER Experiment Name: At_Far-red-induction_P Parameter: Organism Value: A. thaliana
  misc_feature: MA Experiment 20001451 PARAMETER Experiment Name: At_Far-red-induction_P Parameter: Plant Line Value: Columbia
  misc_feature: MA Experiment 20001451 PARAMETER Experiment Name: At_Far-red-induction_P Parameter: Timepoint (hr) Value: 24
  misc_feature: MA Experiment 20001451 PARAMETER Experiment Name: At_Far-red-induction_P Parameter: Tissue Value: Whole Plant
  misc_feature: MA Experiment ID: 20001558 Result: Up-regulated in Transcription
  misc_feature: MA Experiment 20001558 PARAMETER Experiment Name: At_Drought_Soil_Dry_P Parameter: Age (day) Value: 27
  misc_feature: MA Experiment 20001558 PARAMETER Experiment Name: At_Drought_Soil_Dry_P Parameter: Organism Value: A. thaliana
  misc_feature: MA Experiment 20001558 PARAMETER Experiment Name: At_Drought_Soil_Dry_P Parameter: Plant Line Value: WS
  misc_feature: MA Experiment 20001558 PARAMETER Experiment Name: At_Drought_Soil_Dry_P Parameter: Post Timepoint (hr) Value: 6
  misc_feature: MA Experiment 20001558 PARAMETER Experiment Name: At_Drought_Soil_Dry_P Parameter: Post-Treatment Value: Re-Water vs. No Drought
  misc_feature: MA Experiment 20001558 PARAMETER Experiment Name: At_Drought_Soil_Dry_P Parameter: Timepoint (day) Value: 13
  misc_feature: MA Experiment 20001558 PARAMETER Experiment Name: At_Drought_Soil_Dry_P Parameter: Treatment Value: Drought vs. No Drought
  misc_feature: MA Experiment ID: 20001560 Result: Up-regulated in Transcription
  misc_feature: MA Experiment 20001560 PARAMETER Experiment Name: At_Drought_Soil_Dry_P Parameter: Age (day) Value: 28
  misc_feature: MA Experiment 20001560 PARAMETER Experiment Name: At_Drought_Soil_Dry_P Parameter: Organism Value: A. thaliana
  misc_feature: MA Experiment 20001560 PARAMETER Experiment Name: At_Drought_Soil_Dry_P Parameter: Plant Line Value: WS
  misc_feature: MA Experiment 20001560 PARAMETER Experiment Name: At_Drought_Soil_Dry_P Parameter: Post Timepoint (hr) Value: None
  misc_feature: MA Experiment 20001560 PARAMETER Experiment Name: At_Drought_Soil_Dry_P Parameter: Post-Treatment Value: None
  misc_feature: MA Experiment 20001560 PARAMETER Experiment Name: At_Drought_Soil_Dry_P Parameter: Timepoint (day) Value: 14
  misc_feature: MA Experiment 20001560 PARAMETER Experiment Name: At_Drought_Soil_Dry_P Parameter: Treatment Value: Drought vs. No Drought
  misc_feature: MA Experiment ID: 20001757 Result: Up-regulated in Transcription
  misc_feature: MA Experiment 20001757 PARAMETER Experiment Name: At_50mM_NH4NO3_L-to-H_P Parameter: Timepoint (hr) Value: 6
  misc_feature: MA Experiment 20001757 PARAMETER Experiment Name: At_50mM_NH4NO3_L-to-H_P Parameter: Tissue Value: Leaf
  misc_feature: MA Experiment 20001757 PARAMETER Experiment Name: At_50mM_NH4NO3_L-to-H_P Parameter: Treatment Value: 50mM NH4NO3 vs 100mM Mannitol
  misc_feature: MA Experiment ID: 20001905 Result: Down-regulated in Transcription
  misc_feature: MA Experiment 20001905 PARAMETER Experiment Name: At_Drought_Reproduction_P Parameter: Age (day) Value: 40
  misc_feature: MA Experiment 20001905 PARAMETER Experiment Name: At_Drought_Reproduction_P Parameter: Organism Value: A. thaliana
  misc_feature: MA Experiment 20001905 PARAMETER Experiment Name: At_Drought_Reproduction_P Parameter: Plant Line Value: WS
  misc_feature: MA Experiment 20001905 PARAMETER Experiment Name: At_Drought_Reproduction_P Parameter: Timepoint (day) Value: 10
  misc_feature: MA Experiment 20001905 PARAMETER Experiment Name: At_Drought_Reproduction_P Parameter: Tissue Value: Rosettes
  misc_feature: MA Experiment 20001905 PARAMETER Experiment Name: At_Drought_Reproduction_P Parameter: Treatment Value: Drought vs. No Drought
  misc_feature: MA Experiment ID: 20001911 Result: Down-regulated in Transcription
  misc_feature: MA Experiment 20001911 PARAMETER Experiment Name: At_Drought_Reproduction_P Parameter: Age (day) Value: 40
  misc_feature: MA Experiment 20001911 PARAMETER Experiment Name: At_Drought_Reproduction_P Parameter: Organism Value: A. thaliana
  misc_feature: MA Experiment 20001911 PARAMETER Experiment Name: At_Drought_Reproduction_P Parameter: Plant Line Value: WS
  misc_feature: MA Experiment 20001911 PARAMETER Experiment Name: At_Drought_Reproduction_P Parameter: Timepoint (day) Value: 10
  misc_feature: MA Experiment 20001911 PARAMETER Experiment Name: At_Drought_Reproduction_P Parameter: Tissue Value: Flowers
  misc_feature: MA Experiment 20001911 PARAMETER Experiment Name: At_Drought_Reproduction_P Parameter: Treatment Value: Drought vs. No Drought
atacttgtaaaagctagagtcaacgccgttcagtctcagaccagacgaaacaacgatgcttaactctatcactttaacccggaaaccaccactcccgttcaactctgttgggttttcaggtaatcactcttcgtcttttggtcgaagaactataacggaaggtagttcgagcaaggctctttcgtttgggtacaaaaatgttggttcactgaagtgtggtcggagcaattggccggggcgttctgggactgcgtttgggcatctagtccgggtctctgcggtcccaggtgggaattcaggtggctctggcgggttaggtggttcaggcggtggtggtggtggttccggcggcggtggtggtgatggaagcgacggaaaaggaaagaagtggtcacttctctcatggtaccaggctcttctctcaaactctcctgttttgaccaaagctgtgaccgcagcacttttgaacctcgttggagatttgatctgtcagcttactatcaacaagacctcatcgctggacaagaagaggacactcacctttaccttcttgggcttagggctagtcggtccaacattgcatttctggtatttgtatttgagcaaagtggtgacagcttctggattatcaggcgcagttatacgacttctactggatcagtttgtttttgctcctatttttgttggagttttcttatcagcagttgtgacacttgaaggaaaaccatcaaatgtcataccgaagctacaacaggagtggactggtgcaatgatagcaaattggcagctatggataccatttcagtttcttaacttcagatttgttccacagaactaccaggtacttgcttcaaacgtagtggctttggcttggaatgtgattttatcattcaaagctcacaaagaagttgttgcaaagtagacatgtttcttacctggagcctagaggtggttgctggattgttatcggcagagttttggggaaacggtcttgtctgctgatgcaaatgtttggtgtttcgaaacaattatttgggaaccctgcacttgacattttcttagagttgaaacaagcttttcttcaagcacttcaaatatttccccatcatcaatgtttcatatatttattgtttcctcattcagagaatttttttagttcgtatgaa

SEQ ID NO: 98697 - protein, 288 aa, Arabidopsis thaliana
  peptide (1)..(288): Ceres Seq. ID no. 13601309
  misc_feature (220)..(286): Pfam Name: Mpv17 / PMP22 family Pfam Description: Mpv17 / PMP22 family
  misc_feature (1)..(288): Homolog of NCBI NO: 15241166 NR Description: expressed protein [Arabidopsis thaliana]
  misc_feature (1)..(288): Homolog of NCBI NO: 16648746 NR Description: AT5g19750/T29J13_170 [Arabidopsis thaliana]
  misc_feature (1)..(288): Homolog of NCBI NO: 21594286 NR Description: unknown [Arabidopsis thaliana]
  misc_feature (114)..(279): Homolog of NCBI NO: 32417658 NR Description: hypothetical protein [Neurospora crassa]
  misc_feature (122)..(283): Homolog of NCBI NO: 32766323 NR Description: Unknown (protein for MGC:63573) [Danio rerio]
  misc_feature (115)..(278): Homolog of NCBI NO: 10954089 NR Description: 22 kDa peroxisomal membrane protein PMP22 [Mus >gi|12833578|dbj|BAB22578.1| unnamed protein product [Mus
  misc_feature (118)..(283): Homolog of NCBI NO: 4505241 NR Description: MpV17 transgene, murine homolog, Mpv17, human homolog of glomerulosclerosis and nephrotic syndrome sapiens] >gi|730059|sp|P39210|MPV1_HUMAN MPV17 protein
  misc_feature (118)..(283): Homolog of NCBI NO: 34783266 NR Description: MPV17 protein [Homo sapiens]
  misc_feature (115)..(278): Homolog of NCBI NO: 6679577 NR Description: peroxisomal membrane protein 2; peroxisomal protein 2, 22 kDa [Mus musculus] >gi|1172540|sp|P42925|PMP2_MOUSE kDa peroxisomal membrane protein (Peroxisomal membrane protein 2)
  misc_feature (102)..(284): Homolog of NCBI NO: 15226016 NR Description: peroxisomal membrane protein, putative (22 kDa) thaliana] >gi|25411581|pir||C84522 22 kDa peroxisomal membrane
MLNSITLTRKPPLPFNSVGFSGNHSSSFGRRTITEGSSSKALSFGYKNVGSLKCGRSNWPGRSGTAFGHLVRVSAVPGGNSGGSGGLGGSGGGGGGSGGGGGDGSDGKGKKWSLLSWYQALLSNSPVLTKAVTAALLNLVGDLICQLTINKTSSLDKKRTLTFTFLGLGLVGPTLHFWYLYLSKVVTASGLSGAVIRLLLDQFVFAPIFVGVFLSAVVTLEGKPSNVIPKLQQEWTGAMIANWQLWIPFQFLNFRFVPQNYQVLASNVVALAWNVILSFKAHKEVVAK

SEQ ID NO: 98698 - DNA, 1688 bp, Arabidopsis thaliana
  misc_feature (1)..(1688): Ceres Seq. ID no. 13601310
  misc_feature: MA Experiment ID: 108434 Result: Up-regulated in Transcription
  misc_feature: MA Experiment 108434 PARAMETER Experiment Name: At_Root_Tips_cDNA_P Parameter: Tissue Value: Root Tips
  misc_feature: MA Experiment ID: 108463 Result: Down-regulated in Transcription
  misc_feature: MA Experiment 108463 PARAMETER Experiment Name: At_Germinating_Seeds_cDNA_P Parameter: Age (day) Value: 3 vs. 0
  misc_feature: MA Experiment 108463 PARAMETER Experiment Name: At_Germinating_Seeds_cDNA_P Parameter: Tissue Value: Germinating Seeds
  misc_feature: MA Experiment ID: 108572 Result: Down-regulated in Transcription
  misc_feature: MA Experiment 108572 PARAMETER Experiment Name: At_Drought_cDNA_P Parameter: Timepoint (hr) Value: 1
  misc_feature: MA Experiment 108572 PARAMETER Experiment Name: At_Drought_cDNA_P Parameter: Tissue Value: Aerial
  misc_feature: MA Experiment 108572 PARAMETER Experiment Name: At_Drought_cDNA_P Parameter: Treatment Value: Drought vs. No Drought
  misc_feature: MA Experiment ID: 108573 Result: Up-regulated in Transcription
  misc_feature: MA Experiment 108573 PARAMETER Experiment Name: At_Drought_cDNA_P Parameter: Timepoint (hr) Value: 6
  misc_feature: MA Experiment 108573 PARAMETER Experiment Name: At_Drought_cDNA_P Parameter: Tissue Value: Aerial
  misc_feature: MA Experiment 108573 PARAMETER Experiment Name: At_Drought_cDNA_P Parameter: Treatment Value: Drought vs. No Drought
  misc_feature: MA Experiment ID: 108594 Result: Down-regulated in Transcription
  misc_feature: MA Experiment 108594 PARAMETER Experiment Name: At_Ler-rhl_Root_cDNA_P Parameter: Plant Line Value: null
  misc_feature: MA Experiment ID: 108595 Result: Down-regulated in Transcription
  misc_feature: MA Experiment 108595 PARAMETER Experiment Name: At_Ler-pi_Ovule_cDNA_P Parameter: Plant Line Value: null
  misc_feature: MA Experiment ID: 108607 Result: Down-regulated in Transcription
  misc_feature: MA Experiment 108607 PARAMETER Experiment Name: At_100uM_ABA_cDNA_P Parameter: Timepoint (hr) Value: 4
  misc_feature: MA Experiment 108607 PARAMETER Experiment Name: At_100uM_ABA_cDNA_P Parameter: Tissue Value: Aerial
  misc_feature: MA Experiment 108607 PARAMETER Experiment Name: At_100uM_ABA_cDNA_P Parameter: Treatment Value: 100uM ABA vs. No Treatment
  misc_feature: MA Experiment ID: 108668 Result: Down-regulated in Transcription
  misc_feature: MA Experiment 108668 PARAMETER Experiment Name: At_2mM_SA_cDNA_P Parameter: Plant Line Value: WS
  misc_feature: MA Experiment 108668 PARAMETER Experiment Name: At_2mM_SA_cDNA_P Parameter: Timepoint (hr) Value: 6
  misc_feature: MA Experiment 108668 PARAMETER Experiment Name: At_2mM_SA_cDNA_P Parameter: Treatment Value: 2mM SA vs. No Treatment
  misc_feature: MA Experiment ID: 20000087 Result: Down-regulated in Transcription
  misc_feature: MA Experiment 20000087 PARAMETER Experiment Name: At_100uM_ABA_Mutants_cDNA_P Parameter: Plant Line Value: WS
  misc_feature: MA Experiment 20000087 PARAMETER Experiment Name: At_100uM_ABA_Mutants_cDNA_P Parameter: Timepoint (hr) Value: 6
  misc_feature: MA Experiment 20000087 PARAMETER Experiment Name: At_100uM_ABA_Mutants_cDNA_P Parameter: Tissue Value: Aerial
  misc_feature: MA Experiment 20000087 PARAMETER Experiment Name: At_100uM_ABA_Mutants_cDNA_P Parameter: Treatment Value: 100uM ABA vs. No Treatment
  misc_feature: MA Experiment ID: 20000224 Result: Down-regulated in Transcription
  misc_feature: MA Experiment ID: 20000347 Result: Down-regulated in Transcription
  misc_feature: MA Experiment 20000347 PARAMETER Experiment Name: At_2mM_SA_Sub_P Parameter: Age (day) Value: 14
  misc_feature: MA Experiment 20000347 PARAMETER Experiment Name: At_2mM_SA_Sub_P Parameter: Organism Value: A. thaliana
  misc_feature: MA Experiment 20000347 PARAMETER Experiment Name: At_2mM_SA_Sub_P Parameter: Plant Line Value: WS
  misc_feature: MA Experiment 20000347 PARAMETER Experiment Name: At_2mM_SA_Sub_P Parameter: Timepoint (hr) Value: 6
  misc_feature: MA Experiment 20000347 PARAMETER Experiment Name: At_2mM_SA_Sub_P Parameter: Tissue Value: Aerial
  misc_feature: MA Experiment 20000347 PARAMETER Experiment Name: At_2mM_SA_Sub_P Parameter: Treatment Value: 2mM SA vs. No Treatment
  misc_feature: MA Experiment ID: 20000355 Result: Down-regulated in Transcription
  misc_feature: MA Experiment 20000355 PARAMETER Experiment Name: At_Siliques_Sub_P Parameter: Age (day) Value: 21
  misc_feature: MA Experiment 20000355 PARAMETER Experiment Name: At_Siliques_Sub_P Parameter: Organism Value: A. thaliana
  misc_feature: MA Experiment 20000355 PARAMETER Experiment Name: At_Siliques_Sub_P Parameter: Plant Line Value: WS
  misc_feature: MA Experiment 20000355 PARAMETER Experiment Name: At_Siliques_Sub_P Parameter: Tissue Value: Less Than 5mm Siliques vs. Whole Plant
ataaacctaatttgccaacgaagttgaaccaaaaaaagaagatctcactctcaccgccttcatttcctcgatctccgtcttcctccttctccgtctgtcgcagagcatcgctcgaattagggtttctgctgagagaagatgagggaaattattagcattcatatcggacaagccgggatccaagtcggaaattcctgctgggagctttactgtctcgaacatggaatccagcccgacggaatgatgccgagtgatactacagttggtgttgcacacgatgcgttcaatactttctttagcgagactggagctgggaagcatgttcctagggctgtcttcgttgatctcgagcctaccgttatcgacgaagttcgtactggtacttaccgtcaacttttccatccagagcagctcatttctgggaaagaagatgctgctaacaacttcgctagaggacattacactgttggaaaggaaattgtggatctatgtcttgaccgtgtgaggaagcttgccgacaactgtactggcttacaagggtttttggtgttcaatgctgttggtggtggaactggttctggattgggttctctgttgctagagcgtttgtctgtagattacggaaagaagtctaagcttggttttaccatatacccttctcctcaggtttctactgctgttgtagagccttacaacagtgtgctttcaacgcattcccttcttgaacataccgatgtagctgtcctcttggataacgaagccatctatgacatttgccgcagatccctagatatcgagaggccaacctacacaaacttgaacaggttgatatcacagatcatttcatccttgacaacatctttgaggtttgatggtgccatcaacgtggatatcactgagttccagaccaatcttgtcccatatccccgtatccatttcatgctgtcatcttatgcaccagtcatctcagccgccaaggcttaccacgagcagctatcagtccctgagatcaccaatgccgtgtttgagccagcgagcatgatggcaaagtgtgacccaaggcacggaaagtacatggcatgttgtttgatgtaccgaggagatgttgttcccaaagatgttaatgctgccgttggcaccatcaagacaaagaggactgttcagtttgttgactggtgcccaactgggttcaaatgtggaatcaactaccaacctccaacagttgttccaggtggtgacctcgctaaggttcagagagctgtatgcatgatcagtaacaacacagcagttgcagaggtgttctcacggatcgaccacaagtttgatctcatgtatgcgaagagggcattcgtgcactggtacgttggtgaaggaatggaggaaggtgaattctctgaggcacgtgaagacttggccgcactggagaaagactacgaagaagttggtgctgaaggtggagacgatgaagaagatgaaggtgaagactattgacaccttttctcaagcaatgtgctaccaaaaagttttttcgtttatctgttttcattaatgattcttgttgattacatgtttgttttaatcctgtacaatattcgatcctccttcgtgtttcatctcggttagatacattttcattggtagagcgaccattggggaagatcccgagttcattatcaagcttttgttgt

SEQ ID NO: 98699 - protein, 450 aa, Arabidopsis thaliana; identical to SEQ ID NO: 38746
  peptide (1)..(450): Ceres Seq. ID no. 13601311
  misc_feature (49)..(246): Pfam Name: Tubulin/FtsZ family, GTPase domain Pfam Description: Tubulin/FtsZ family, GTPase domain
  misc_feature (1)..(450): Homolog of NCBI NO: 15241168 NR Description: tubulin alpha-3/alpha-5 chain (TUA3) [Arabidopsis
  misc_feature (1)..(450): Homolog of NCBI NO: 135399 NR Description: Tubulin alpha-1 chain >gi|100716|pir||S20758
  misc_feature (1)..(450): Homolog of NCBI NO: 6094431 NR Description: Tubulin alpha-3 chain (Alpha-3 tubulin)
  misc_feature (1)..(450): Homolog of NCBI NO: 464846 NR Description: Tubulin alpha-6 chain (Alpha-6 tubulin)
  misc_feature (1)..(450): Homolog of NCBI NO: 8928419 NR Description: Tubulin alpha-1 chain >gi|1477428|emb|CAA67942.1|
  misc_feature (1)..(450): Homolog of NCBI NO: 401161 NR Description: Tubulin alpha-5 chain (Alpha-5 tubulin)
  misc_feature (1)..(445): Homolog of NCBI NO: 25396545 NR Description: alpha tubulin [Physcomitrella patens]
  misc_feature (1)..(450): Homolog of NCBI NO: 15220329 NR Description: tubulin alpha-2/alpha-4 chain (TUA4) [Arabidopsis
  misc_feature (1)..(450): Homolog of NCBI NO: 15233627 NR Description: tubulin alpha-6 chain (TUA6) [Arabidopsis
  misc_feature (1)..(449): Homolog of NCBI NO: 7271241 NR Description: alpha-tubulin [Miscanthus sinensis]

SEQ ID NO: 98700 - protein, 416 aa, Arabidopsis thaliana; identical to SEQ ID NO: 38747
  peptide (1)..(416): Ceres Seq. ID no. 13601312
  misc_feature (15)..(212): Pfam Name: Tubulin/FtsZ family, GTPase domain Pfam Description: Tubulin/FtsZ family, GTPase domain
  misc_feature (1)..(416): Homolog of NCBI NO: 15241168 NR Description: tubulin alpha-3/alpha-5 chain (TUA3) [Arabidopsis
  misc_feature (1)..(416): Homolog of NCBI NO: 135399 NR Description: Tubulin alpha-1 chain >gi|100716|pir||S20758
  misc_feature (1)..(416): Homolog of NCBI NO: 6094431 NR Description: Tubulin alpha-3 chain (Alpha-3 tubulin)
  misc_feature (1)..(416): Homolog of NCBI NO: 464846 NR Description: Tubulin alpha-6 chain (Alpha-6 tubulin)
  misc_feature (1)..(416): Homolog of NCBI NO: 8928419 NR Description: Tubulin alpha-1 chain >gi|1477428|emb|CAA67942.1|
  misc_feature (1)..(416): Homolog of NCBI NO: 401161 NR Description: Tubulin alpha-5 chain (Alpha-5 tubulin)
  misc_feature (1)..(411): Homolog of NCBI NO: 25396545 NR Description: alpha tubulin [Physcomitrella patens]
  misc_feature (1)..(416): Homolog of NCBI NO: 15220329 NR Description: tubulin alpha-2/alpha-4 chain (TUA4) [Arabidopsis
  misc_feature (1)..(416): Homolog of NCBI NO: 15233627 NR Description: tubulin alpha-6 chain (TUA6) [Arabidopsis
  misc_feature (1)..(415): Homolog of NCBI NO: 7271241 NR Description: alpha-tubulin [Miscanthus sinensis]

SEQ ID NO: 98701 - protein, 415 aa, Arabidopsis thaliana; identical to SEQ ID NO: 38748
  peptide (1)..(415): Ceres Seq. ID no. 13601313
  misc_feature (14)..(211): Pfam Name: Tubulin/FtsZ family, GTPase domain Pfam Description: Tubulin/FtsZ family, GTPase domain
  misc_feature (1)..(415): Homolog of NCBI NO: 15241168 NR Description: tubulin alpha-3/alpha-5 chain (TUA3) [Arabidopsis
  misc_feature (1)..(415): Homolog of NCBI NO: 135399 NR Description: Tubulin alpha-1 chain >gi|100716|pir||S20758
  misc_feature (1)..(415): Homolog of NCBI NO: 6094431 NR Description: Tubulin alpha-3 chain (Alpha-3 tubulin)
  misc_feature (1)..(415): Homolog of NCBI NO: 464846 NR Description: Tubulin alpha-6 chain (Alpha-6 tubulin)
  misc_feature (1)..(415): Homolog of NCBI NO: 8928419 NR Description: Tubulin alpha-1 chain >gi|1477428|emb|CAA67942.1|
  misc_feature (1)..(415): Homolog of NCBI NO: 401161 NR Description: Tubulin alpha-5 chain (Alpha-5 tubulin)
  misc_feature (1)..(410): Homolog of NCBI NO: 25396545 NR Description: alpha tubulin [Physcomitrella patens]
  misc_feature (1)..(415): Homolog of NCBI NO: 15220329 NR Description: tubulin alpha-2/alpha-4 chain (TUA4) [Arabidopsis
  misc_feature (1)..(415): Homolog of NCBI NO: 15233627 NR Description: tubulin alpha-6 chain (TUA6) [Arabidopsis
  misc_feature (1)..(414): Homolog of NCBI NO: 7271241 NR Description: alpha-tubulin [Miscanthus sinensis]

SEQ ID NO: 98702 - DNA, 1285 bp, Arabidopsis thaliana
  misc_feature (1)..(1285): Ceres Seq. ID no. 13601322
  misc_feature: MA Experiment ID: 108434 Result: Up-regulated in Transcription
  misc_feature: MA Experiment 108434 PARAMETER Experiment Name: At_Root_Tips_cDNA_P Parameter: Tissue Value: Root Tips
  misc_feature: MA Experiment ID: 108595 Result: Down-regulated in Transcription
  misc_feature: MA Experiment 108595 PARAMETER Experiment Name: At_Ler-pi_Ovule_cDNA_P Parameter: Plant Line Value: null
  misc_feature: MA Experiment ID: 20000179 Result: Up-regulated in Transcription
  misc_feature: MA Experiment 20000179 PARAMETER Experiment Name: At_Germinating_Seeds_P Parameter: Age (hr) Value: 6 vs. 0
  misc_feature: MA Experiment 20000179 PARAMETER Experiment Name: At_Germinating_Seeds_P Parameter: Tissue Value: Germinating Seeds
  misc_feature: MA Experiment ID: 20000180 Result: Up-regulated in Transcription
  misc_feature: MA Experiment 20000180 PARAMETER Experiment Name: At_Germinating_Seeds_P Parameter: Age (hr) Value: 24 vs. 0
  misc_feature: MA Experiment 20000180 PARAMETER Experiment Name: At_Germinating_Seeds_P Parameter: Tissue Value: Germinating Seeds
  misc_feature: MA Experiment ID: 20000185 Result: Up-regulated in Transcription
  misc_feature: MA Experiment 20000185 PARAMETER Experiment Name: At_Roots__P Parameter: Age (day) Value: 7 vs. 21
  misc_feature: MA Experiment 20000185 PARAMETER Experiment Name: At_Roots__P Parameter: Organism Value: A. thaliana
  misc_feature: MA Experiment 20000185 PARAMETER Experiment Name: At_Roots__P Parameter: Tissue Value: Roots vs. Whole Plant
  misc_feature: MA Experiment ID: 20000234 Result: Up-regulated in Transcription
  misc_feature: MA Experiment 20000234 PARAMETER Experiment Name: At_Siliques_P Parameter: Age (day) Value: 21
  misc_feature: MA Experiment 20000234 PARAMETER Experiment Name: At_Siliques_P Parameter: Organism Value: A. thaliana
  misc_feature: MA Experiment 20000234 PARAMETER Experiment Name: At_Siliques_P Parameter: Plant Line Value: WS
  misc_feature: MA Experiment 20000234 PARAMETER Experiment Name: At_Siliques_P Parameter: Tissue Value: Less Than 5mm Siliques vs. Whole Plant
  misc_feature: MA Experiment ID: 20001451 Result: Down-regulated in Transcription
  misc_feature: MA Experiment 20001451 PARAMETER Experiment Name: At_Far-red-induction_P Parameter: Age (day) Value: 7
  misc_feature: MA Experiment 20001451 PARAMETER Experiment Name: At_Far-red-induction_P Parameter: Light Value: Far-red vs. White
  misc_feature: MA Experiment 20001451 PARAMETER Experiment Name: At_Far-red-induction_P Parameter: Organism Value: A. thaliana
  misc_feature: MA Experiment 20001451 PARAMETER Experiment Name: At_Far-red-induction_P Parameter: Plant Line Value: Columbia
  misc_feature: MA Experiment 20001451 PARAMETER Experiment Name: At_Far-red-induction_P Parameter: Timepoint (hr) Value: 24
  misc_feature: MA Experiment 20001451 PARAMETER Experiment Name: At_Far-red-induction_P Parameter: Tissue Value: Whole Plant
  misc_feature: MA Experiment ID: 20001911 Result: Down-regulated in Transcription
  misc_feature: MA Experiment 20001911 PARAMETER Experiment Name: At_Drought_Reproduction_P Parameter: Age (day) Value: 40
  misc_feature: MA Experiment 20001911 PARAMETER Experiment Name: At_Drought_Reproduction_P Parameter: Organism Value: A. thaliana
  misc_feature: MA Experiment 20001911 PARAMETER Experiment Name: At_Drought_Reproduction_P Parameter: Plant Line Value: WS
  misc_feature: MA Experiment 20001911 PARAMETER Experiment Name: At_Drought_Reproduction_P Parameter: Timepoint (day) Value: 10
  misc_feature: MA Experiment 20001911 PARAMETER Experiment Name: At_Drought_Reproduction_P Parameter: Tissue Value: Flowers
  misc_feature: MA Experiment 20001911 PARAMETER Experiment Name: At_Drought_Reproduction_P Parameter: Treatment Value: Drought vs. No Drought
ttttgttctttctcagagatctaaaccatcatggctacttccttcttccggcgactcgctaggtcagctccgattacattccctgtcgcatttggatctcaaagcaaatctggttctggcgctttccggttctccaccggtgcaatcgcggcactttccggtggattctcctattactacttgacatccggcaacaatctggtttatctggatcaagctaaggaagagacaggaccaaaaaccgctctaaaccctgataaatggctcgagttcaagcttcaagacactgctagagttagccacaacactcagttgttcaggttctcatttgacccctcagctgagttgggtctacatgttgcttcttgtctcctgacaagggctcctttaggctataatgctgaagggaaaacgaaatatgtcattagaccttacactcctatatcagatccagaggctaagggctattttgatttactgattaaggtatatcctgacggaaaaatgagtcagcattttgccagcttaaaaccgggggatgtgttggaagtaaaaggacccgttgaaaagttcaaatactcgccgaatatgaagaaacatattggcatgattgccggtggaagtgggattactccaatgcttcaggtgattgatgccattgtgaagaatcctgaggacaacacgcagatatcattgctttatgccaatgtgtcaccagatgatatactcctgaagcagaagcttgatgtacttcaggctaaccacccaaatttgaagatattctatactgttgacaaccctactaaaaactggaaaggaggagtaggttacatttcaaaggatatggctctgaaaggcttacctcttcctaccgacgatactcttatccttgtatgcggtcctcctgggatgatggagcatatatctggaggcaaagctccagactggtcacaaggagaggtcaaggggattctcaaggaactcggatacacagaggaaatggtgttcaaattctgagtggactagagaatcagaatacgatctcaaggaggtttcctttcatgtaataaaatggccccaagcaaacattaattgatgcagagtgagcttgacaatcgagctaccgagctttgaaaataaacaaagcaaaacggatcagttagtcatttgtctctgcaggtaatagcggaacttgattttgatggtaaatttctatgcaaccaagatattgaatatggttcgaaagatgataattgtgcgtttaaaattcgcgtctgtgttttgg

SEQ ID NO: 98703 - protein, 328 aa, Arabidopsis thaliana; identical to SEQ ID NO: 22461
  peptide (1)..(328): Ceres Seq. ID no. 13601323
  misc_feature (188)..(301): Pfam Name: Oxidoreductase NAD-binding domain Pfam Description: Oxidoreductase NAD-binding domain
  misc_feature (1)..(328): Homolog of NCBI NO: 18420117 NR Description: NADH-cytochrome b5 reductase, putative

SEQ ID NO: 98704 - protein, 170 aa, Arabidopsis thaliana; identical to SEQ ID NO: 22462
  peptide (1)..(170): Ceres Seq. ID no. 13601324
  misc_feature (30)..(143): Pfam Name: Oxidoreductase NAD-binding domain Pfam Description: Oxidoreductase NAD-binding domain
  misc_feature (1)..(170): Homolog of NCBI NO: 18420117 NR Description: NADH-cytochrome b5 reductase, putative

SEQ ID NO: 98705 - DNA, 1086 bp, Arabidopsis thaliana
  misc_feature (1)..(1086): Ceres Seq. ID no. 13601332
  misc_feature: MA Experiment ID: 108434 Result: Down-regulated in Transcription
  misc_feature: MA Experiment 108434 PARAMETER Experiment Name: At_Root_Tips_cDNA_P Parameter: Tissue Value: Root Tips
  misc_feature: MA Experiment ID: 108462 Result: Up-regulated in Transcription
  misc_feature: MA Experiment 108462 PARAMETER Experiment Name: At_Germinating_Seeds_cDNA_P Parameter: Age (day) Value: 2 vs. 0
  misc_feature: MA Experiment 108462 PARAMETER Experiment Name: At_Germinating_Seeds_cDNA_P Parameter: Tissue Value: Germinating Seeds
  misc_feature: MA Experiment ID: 108463 Result: Up-regulated in Transcription
  misc_feature: MA Experiment 108463 PARAMETER Experiment Name: At_Germinating_Seeds_cDNA_P Parameter: Age (day) Value: 3 vs. 0
  misc_feature: MA Experiment 108463 PARAMETER Experiment Name: At_Germinating_Seeds_cDNA_P Parameter: Tissue Value: Germinating Seeds
  misc_feature: MA Experiment ID: 108464 Result: Up-regulated in Transcription
  misc_feature: MA Experiment 108464 PARAMETER Experiment Name: At_Germinating_Seeds_cDNA_P Parameter: Age (day) Value: 4 vs. 0
  misc_feature: MA Experiment 108464 PARAMETER Experiment Name: At_Germinating_Seeds_cDNA_P Parameter: Tissue Value: Germinating Seeds
  misc_feature: MA Experiment ID: 108473 Result: Up-regulated in Transcription
  misc_feature: MA Experiment 108473 PARAMETER Experiment Name: At_Drought_Flowers_cDNA_P Parameter: Timepoint (hr) Value: 7 d
  misc_feature: MA Experiment 108473 PARAMETER Experiment Name: At_Drought_Flowers_cDNA_P Parameter: Tissue Value: Flower
  misc_feature: MA Experiment 108473 PARAMETER Experiment Name: At_Drought_Flowers_cDNA_P Parameter: Treatment Value: Drought vs. No Drought
  misc_feature: MA Experiment ID: 108573 Result: Down-regulated in Transcription
  misc_feature: MA Experiment 108573 PARAMETER Experiment Name: At_Drought_cDNA_P Parameter: Timepoint (hr) Value: 6
  misc_feature: MA Experiment 108573 PARAMETER Experiment Name: At_Drought_cDNA_P Parameter: Tissue Value: Aerial
  misc_feature: MA Experiment 108573 PARAMETER Experiment Name: At_Drought_cDNA_P Parameter: Treatment Value: Drought vs. No Drought
  misc_feature: MA Experiment ID: 108585 Result: Up-regulated in Transcription
  misc_feature: MA Experiment 108585 PARAMETER Experiment Name: At_5mM_NaNP_cDNA_P Parameter: Timepoint (hr) Value: 6
  misc_feature: MA Experiment 108585 PARAMETER Experiment Name: At_5mM_NaNP_cDNA_P Parameter: Tissue Value: Aerial
  misc_feature: MA Experiment 108585 PARAMETER Experiment Name: At_5mM_NaNP_cDNA_P Parameter: Treatment Value: null
  misc_feature: MA Experiment ID: 108594 Result: Up-regulated in Transcription
  misc_feature: MA Experiment 108594 PARAMETER Experiment Name: At_Ler-rhl_Root_cDNA_P Parameter: Plant Line Value: null
  misc_feature: MA Experiment ID: 108595 Result: Up-regulated in Transcription
  misc_feature: MA Experiment 108595 PARAMETER Experiment Name: At_Ler-pi_Ovule_cDNA_P Parameter: Plant Line Value: null
  misc_feature: MA Experiment ID: 108609 Result: Down-regulated in Transcription
  misc_feature: MA Experiment 108609 PARAMETER Experiment Name: At_100uM_ABA_cDNA_P Parameter: Timepoint (hr) Value: 24
  misc_feature: MA Experiment 108609 PARAMETER Experiment Name: At_100uM_ABA_cDNA_P Parameter: Tissue Value: Aerial
  misc_feature: MA Experiment 108609 PARAMETER Experiment Name: At_100uM_ABA_cDNA_P Parameter: Treatment Value: 100uM ABA vs. No Treatment
  misc_feature: MA Experiment ID: 20000068 Result: Up-regulated in Transcription
  misc_feature: MA Experiment ID: 20000070 Result: Up-regulated in Transcription
  misc_feature: MA Experiment 20000070 PARAMETER Experiment Name: At_100uM_ABA_Mutants_cDNA_P Parameter: Plant Line Value: CS24
  misc_feature: MA Experiment 20000070 PARAMETER Experiment Name: At_100uM_ABA_Mutants_cDNA_P Parameter: Timepoint (hr) Value: 6
  misc_feature: MA Experiment 20000070 PARAMETER Experiment Name: At_100uM_ABA_Mutants_cDNA_P Parameter: Tissue Value: Aerial
  misc_feature: MA Experiment 20000070 PARAMETER Experiment Name: At_100uM_ABA_Mutants_cDNA_P Parameter: Treatment Value: 100uM ABA vs. No Treatment
  misc_feature: MA Experiment ID: 20000088 Result: Up-regulated in Transcription
  misc_feature: MA Experiment 20000088 PARAMETER Experiment Name: At_100uM_ABA_Mutants_cDNA_P Parameter: Plant Line Value: Landsberg
  misc_feature: MA Experiment 20000088 PARAMETER Experiment Name: At_100uM_ABA_Mutants_cDNA_P Parameter: Timepoint (hr) Value: 6
  misc_feature: MA Experiment 20000088 PARAMETER Experiment Name: At_100uM_ABA_Mutants_cDNA_P Parameter: Tissue Value: Aerial
  misc_feature: MA Experiment 20000088 PARAMETER Experiment Name: At_100uM_ABA_Mutants_cDNA_P Parameter: Treatment Value: 100uM ABA vs. No Treatment
  misc_feature: MA Experiment ID: 20000089 Result: Up-regulated in Transcription
  misc_feature: MA Experiment ID: 20000093 Result: Down-regulated in Transcription
  misc_feature: MA Experiment 20000093 PARAMETER Experiment Name: At_42deg_Heat_cDNA_P Parameter: Temperature (deg C) Value: 42 vs. 22
  misc_feature: MA Experiment 20000093 PARAMETER Experiment Name: At_42deg_Heat_cDNA_P Parameter: Timepoint (hr) Value: 0.5
  misc_feature: MA Experiment 20000093 PARAMETER Experiment Name: At_42deg_Heat_cDNA_P Parameter: Tissue Value: Aerial
  misc_feature: MA Experiment ID: 20000117 Result: Up-regulated in Transcription
  misc_feature: MA Experiment 20000117 PARAMETER Experiment Name: At_100uM_ABA_Mutants_cDNA_P Parameter: Plant Line Value: Columbia
  misc_feature: MA Experiment 20000117 PARAMETER Experiment Name: At_100uM_ABA_Mutants_cDNA_P Parameter: Timepoint (hr) Value: 6
  misc_feature: MA Experiment 20000117 PARAMETER Experiment Name: At_100uM_ABA_Mutants_cDNA_P Parameter: Tissue Value: Aerial
  misc_feature: MA Experiment 20000117 PARAMETER Experiment Name: At_100uM_ABA_Mutants_cDNA_P Parameter: Treatment Value: 100uM ABA vs. No Treatment
  misc_feature: MA Experiment ID: 20000214 Result: Down-regulated in Transcription
  misc_feature: MA Experiment 20000214 PARAMETER Experiment Name: At_4deg_Cold_P Parameter: Timepoint (hr) Value: 6
  misc_feature: MA Experiment ID: 20000235 Result: Down-regulated in Transcription
  misc_feature: MA Experiment 20000235 PARAMETER Experiment Name: At_Siliques_P Parameter: Age (day) Value: 21
  misc_feature: MA Experiment 20000235 PARAMETER Experiment Name: At_Siliques_P Parameter: Organism Value: A. thaliana
  misc_feature: MA Experiment 20000235 PARAMETER Experiment Name: At_Siliques_P Parameter: Plant Line Value: WS
  misc_feature: MA Experiment 20000235 PARAMETER Experiment Name: At_Siliques_P Parameter: Tissue Value: 5-10mm Siliques vs. Whole Plant
  misc_feature: MA Experiment ID: 20000439 Result: Down-regulated in Transcription
  misc_feature: MA Experiment 20000439 PARAMETER Experiment Name: At_Roots__P Parameter: Age (day) Value: 14 vs. 21
  misc_feature: MA Experiment 20000439 PARAMETER Experiment Name: At_Roots__P Parameter: Organism Value: A. thaliana
  misc_feature: MA Experiment 20000439 PARAMETER Experiment Name: At_Roots__P Parameter: Tissue Value: Roots vs. Whole Plant
  misc_feature: MA Experiment ID: 20000455 Result: Down-regulated in Transcription
  misc_feature: MA Experiment 20000455 PARAMETER Experiment Name: At_100uM_ABA_P Parameter: Age (day) Value: 16
  misc_feature: MA Experiment 20000455 PARAMETER Experiment Name: At_100uM_ABA_P Parameter: Organism Value: A. thaliana
  misc_feature: MA Experiment 20000455 PARAMETER Experiment Name: At_100uM_ABA_P Parameter: Plant Line Value: WS
  misc_feature: MA Experiment 20000455 PARAMETER Experiment Name: At_100uM_ABA_P Parameter: Timepoint (hr) Value: 48
  misc_feature: MA Experiment 20000455 PARAMETER Experiment Name: At_100uM_ABA_P Parameter: Tissue Value: Aerial
  misc_feature: MA Experiment 20000455 PARAMETER Experiment Name: At_100uM_ABA_P Parameter: Treatment Value: 100uM ABA vs. No Treatment
  misc_feature: MA Experiment ID: 20000527 Result: Down-regulated in Transcription
  misc_feature: MA Experiment 20000527 PARAMETER Experiment Name: At_10percent_PEG_P Parameter: Age (day) Value: 20
  misc_feature: MA Experiment 20000527 PARAMETER Experiment Name: At_10percent_PEG_P Parameter: Organism Value: A. thaliana
  misc_feature: MA Experiment 20000527 PARAMETER Experiment Name: At_10percent_PEG_P Parameter: Plant Line Value: WS
  misc_feature: MA Experiment 20000527 PARAMETER Experiment Name: At_10percent_PEG_P Parameter: Timepoint (day) Value: 20
  misc_feature: MA Experiment 20000527 PARAMETER Experiment Name: At_10percent_PEG_P Parameter: Tissue Value: Whole Plant
  misc_feature: MA Experiment 20000527 PARAMETER Experiment Name: At_10percent_PEG_P Parameter: Treatment Value: 10percent PEG vs. No Treatment
  misc_feature: MA Experiment ID: 20001248 Result: Down-regulated in Transcription
  misc_feature: MA Experiment 20001248 PARAMETER Experiment Name: At_Far-red-induction_P Parameter: Age (day) Value: 7
  misc_feature: MA Experiment 20001248 PARAMETER Experiment Name: At_Far-red-induction_P Parameter: Light Value: Far-red vs. White
  misc_feature: MA Experiment 20001248 PARAMETER Experiment Name: At_Far-red-induction_P Parameter: Organism Value: A. thaliana
  misc_feature: MA Experiment 20001248 PARAMETER Experiment Name: At_Far-red-induction_P Parameter: Plant Line Value: Columbia
  misc_feature: MA Experiment 20001248 PARAMETER Experiment Name: At_Far-red-induction_P Parameter: Timepoint (hr) Value: 4
  misc_feature: MA Experiment 20001248 PARAMETER Experiment Name: At_Far-red-induction_P Parameter: Tissue Value: Whole Plant
  misc_feature: MA Experiment ID: 20001555 Result: Up-regulated in Transcription
  misc_feature: MA Experiment 20001555 PARAMETER Experiment Name: At_Drought_Soil_Dry_P Parameter: Age (day) Value: 24
  misc_feature: MA Experiment 20001555 PARAMETER Experiment Name: At_Drought_Soil_Dry_P Parameter: Organism Value: A. thaliana
  misc_feature: MA Experiment 20001555 PARAMETER Experiment Name: At_Drought_Soil_Dry_P Parameter: Plant Line Value: WS
  misc_feature: MA Experiment 20001555 PARAMETER Experiment Name: At_Drought_Soil_Dry_P Parameter: Post Timepoint (hr) Value: None
  misc_feature: MA Experiment 20001555 PARAMETER Experiment Name: At_Drought_Soil_Dry_P Parameter: Post-Treatment Value: None
  misc_feature: MA Experiment 20001555 PARAMETER Experiment Name: At_Drought_Soil_Dry_P Parameter: Timepoint (day) Value: 10
  misc_feature: MA Experiment 20001555 PARAMETER Experiment Name: At_Drought_Soil_Dry_P Parameter: Treatment Value: Drought vs. No Drought
  misc_feature: MA Experiment ID: 20001559 Result: Up-regulated in Transcription
  misc_feature: MA Experiment 20001559 PARAMETER Experiment Name: At_Drought_Soil_Dry_P Parameter: Age (day) Value: 28
  misc_feature: MA Experiment 20001559 PARAMETER Experiment Name: At_Drought_Soil_Dry_P Parameter: Organism Value: A. thaliana
  misc_feature: MA Experiment 20001559 PARAMETER Experiment Name: At_Drought_Soil_Dry_P Parameter: Plant Line Value: WS
  misc_feature: MA Experiment 20001559 PARAMETER Experiment Name: At_Drought_Soil_Dry_P Parameter: Post Timepoint (hr) Value: 29
  misc_feature: MA Experiment 20001559 PARAMETER Experiment Name: At_Drought_Soil_Dry_P Parameter: Post-Treatment Value: Re-Water vs. No Drought
  misc_feature: MA Experiment 20001559 PARAMETER Experiment Name: At_Drought_Soil_Dry_P Parameter: Timepoint (day) Value: 14
  misc_feature: MA Experiment 20001559 PARAMETER Experiment Name: At_Drought_Soil_Dry_P Parameter: Treatment Value: Drought vs. No Drought
  misc_feature: MA Experiment ID: 20001560 Result: Down-regulated in Transcription
  misc_feature: MA Experiment 20001560 PARAMETER Experiment Name: At_Drought_Soil_Dry_P Parameter: Age (day) Value: 28
  misc_feature: MA Experiment 20001560 PARAMETER Experiment Name: At_Drought_Soil_Dry_P Parameter: Organism Value: A. thaliana
  misc_feature: MA Experiment 20001560 PARAMETER Experiment Name: At_Drought_Soil_Dry_P Parameter: Plant Line Value: WS
  misc_feature: MA Experiment 20001560 PARAMETER Experiment Name: At_Drought_Soil_Dry_P Parameter: Post Timepoint (hr) Value: None
  misc_feature: MA Experiment 20001560 PARAMETER Experiment Name: At_Drought_Soil_Dry_P Parameter: Post-Treatment Value: None
  misc_feature: MA Experiment 20001560 PARAMETER Experiment Name: At_Drought_Soil_Dry_P Parameter: Timepoint (day) Value: 14
  misc_feature: MA Experiment 20001560 PARAMETER Experiment Name: At_Drought_Soil_Dry_P Parameter: Treatment Value: Drought vs. No Drought
  misc_feature: MA Experiment ID: 20001905 Result: Up-regulated in Transcription
  misc_feature: MA Experiment 20001905 PARAMETER Experiment Name: At_Drought_Reproduction_P Parameter: Age (day) Value: 40
  misc_feature: MA Experiment 20001905 PARAMETER Experiment Name: At_Drought_Reproduction_P Parameter: Organism Value: A. thaliana
  misc_feature: MA Experiment 20001905 PARAMETER Experiment Name: At_Drought_Reproduction_P Parameter: Plant Line Value: WS
  misc_feature: MA Experiment 20001905 PARAMETER Experiment Name: At_Drought_Reproduction_P Parameter: Timepoint (day) Value: 10
  misc_feature: MA Experiment 20001905 PARAMETER Experiment Name: At_Drought_Reproduction_P Parameter: Tissue Value: Rosettes
  misc_feature: MA Experiment 20001905 PARAMETER Experiment Name: At_Drought_Reproduction_P Parameter: Treatment Value: Drought vs. No Drought
  misc_feature: MA Experiment ID: 20001906 Result: Up-regulated in Transcription
  misc_feature: MA Experiment 20001906 PARAMETER Experiment Name: At_Drought_Reproduction_P Parameter: Age (day) Value: 35
  misc_feature: MA Experiment 20001906 PARAMETER Experiment Name: At_Drought_Reproduction_P Parameter: Organism Value: A. thaliana
  misc_feature: MA Experiment 20001906 PARAMETER Experiment Name: At_Drought_Reproduction_P Parameter: Plant Line Value: WS
  misc_feature: MA Experiment 20001906 PARAMETER Experiment Name: At_Drought_Reproduction_P Parameter: Timepoint (day) Value: 5
  misc_feature: MA Experiment 20001906 PARAMETER Experiment Name: At_Drought_Reproduction_P Parameter: Tissue Value: Siliques
  misc_feature: MA Experiment 20001906 PARAMETER Experiment Name: At_Drought_Reproduction_P Parameter: Treatment Value: Drought vs. No Drought
  misc_feature: MA Experiment ID: 20001911 Result: Up-regulated in Transcription
  misc_feature: MA Experiment 20001911 PARAMETER Experiment Name: At_Drought_Reproduction_P Parameter: Age (day) Value: 40
  misc_feature: MA Experiment 20001911 PARAMETER Experiment Name: At_Drought_Reproduction_P Parameter: Organism Value: A. thaliana
  misc_feature: MA Experiment 20001911 PARAMETER Experiment Name: At_Drought_Reproduction_P Parameter: Plant Line Value: WS
  misc_feature: MA Experiment 20001911 PARAMETER Experiment Name: At_Drought_Reproduction_P Parameter: Timepoint (day) Value: 10
  misc_feature: MA Experiment 20001911 PARAMETER Experiment Name: At_Drought_Reproduction_P Parameter: Tissue Value: Flowers
  misc_feature: MA Experiment 20001911 PARAMETER Experiment Name: At_Drought_Reproduction_P Parameter: Treatment Value: Drought vs. No Drought
ctctctttcttcttcattcatcattctcacttaagtttcccagaaaataaaagagctatgaagtttggtaagagtctcagcaatcagatcgagcaaactcttcctgaatggcaagacaagttcttgtcttacaaagaactcaaaaaacgactcaaactcatcggttccaaaaccgccgatcgtcccgttaaacgactccgtttagatgagttttccgtcggaatatcgaaagaagagatcaatttcatccaattgttagaagacgagttggagaaattcaacaatttcttcgttgagaaggaagaagaatatatcatcagactaaaggaatttagagatagaattgcgaaagctaaggattcaatggagaagatgataaaaatcaggaaggagattgttgatttccatggagaaatggttcttcttgagaattacagtgctcttaattacactggattggttaagatactgaagaagtatgacaaaagaactggtgatctcatgcgtttacctttcatccagaaagttcttcagcaacctttttacactactgacttattgttcaagcttgtcaaggaatctgaggcaatgcttgatcagatcttccctgctaacgaaactgagtctgagattatccaagcagagttatcagagcataagttcatggagagtcttcatatgaagagcacaatcgctgccttgcgggttttgaaggagatcaggagtggaagttctactgttagtgtgttttcattgccgcctctacagttaaatggcttagatgagacatggaagaagattccattgttggagcaagaagccaaatagagagtgagacagaggcacactcgctctattccacttttttatacaatagaagaagctaacagattaaacaagacattatcatcaatgtacacaaaaaggcagaagaaactataggatcatgtttctggatatcatctttggtcggtcataagtccttaggttacacaaaactgcaatgtaactttgtttctgtgttgggtgtgttgtagttgatgtaatatataccacttcagattaattattgatttcttcttttcc

SEQ ID NO: 98706 - protein, 275 aa, Arabidopsis thaliana; identical to SEQ ID NO: 22207
  peptide (1)..(275): Ceres Seq. ID no. 13601333
  misc_feature (20)..(177): Pfam Name: SPX domain Pfam Description: SPX domain
  misc_feature (20)..(275): Homolog of NCBI NO: 15241275 NR Description: ids4-related protein [Arabidopsis thaliana] AT5g20150/F5O24_40 [Arabidopsis thaliana]
  misc_feature (20)..(275): Homolog of NCBI NO: 21592813 NR Description: ids4-like protein [Arabidopsis thaliana]
  misc_feature (20)..(240): Homolog of NCBI NO: 15225770 NR Description: expressed protein [Arabidopsis thaliana]
  misc_feature (20)..(255): Homolog of NCBI NO: 31415907 NR Description: putative SPX domain containing protein [Oryza
  misc_feature (20)..(255): Homolog of NCBI NO: 37533962 NR Description: hypothetical protein [Oryza sativa (japonica group)] >gi|15451632|gb|AAK98756.1| Hypothetical protein [Oryza >gi|31431851|gb|AAP53570.1| hypothetical protein [Oryza sativa
  misc_feature (20)..(269): Homolog of NCBI NO: 15225414 NR Description: hypothetical protein [Arabidopsis thaliana]
  misc_feature (81)..(220): Homolog of NCBI NO: 11358467 NR Description: ids-4 protein-like - Arabidopsis thaliana
  misc_feature (10)..(60): Homolog of NCBI NO: 11358467 NR Description: ids-4 protein-like - Arabidopsis thaliana
  misc_feature (81)..(220): Homolog of NCBI NO: 18417630 NR Description: ids-4 protein - like [Arabidopsis thaliana]
  misc_feature (20)..(60): Homolog of NCBI NO: 18417630 NR Description: ids-4 protein - like [Arabidopsis thaliana]

SEQ ID NO: 98707 - protein, 256 aa, Arabidopsis thaliana; identical to SEQ ID NO: 22208
  peptide (1)..(256): Ceres Seq. ID no. 13601334
  misc_feature (1)..(158): Pfam Name: SPX domain Pfam Description: SPX domain
  misc_feature (1)..(256): Homolog of NCBI NO: 15241275 NR Description: ids4-related protein [Arabidopsis thaliana] AT5g20150/F5O24_40 [Arabidopsis thaliana]
  misc_feature (1)..(256): Homolog of NCBI NO: 21592813 NR Description: ids4-like protein [Arabidopsis thaliana]
  misc_feature (1)..(221): Homolog of NCBI NO: 15225770 NR Description: expressed protein [Arabidopsis thaliana]
  misc_feature (1)..(236): Homolog of NCBI NO: 31415907 NR Description: putative SPX domain containing protein [Oryza
  misc_feature (1)..(236): Homolog of NCBI NO: 37533962 NR Description: hypothetical protein [Oryza sativa (japonica group)] >gi|15451632|gb|AAK98756.1| Hypothetical protein [Oryza >gi|31431851|gb|AAP53570.1| hypothetical protein [Oryza sativa
  misc_feature (1)..(250): Homolog of NCBI NO: 15225414 NR Description: hypothetical protein [Arabidopsis thaliana]
  misc_feature (62)..(201): Homolog of NCBI NO: 11358467 NR Description: ids-4 protein-like - Arabidopsis thaliana
  misc_feature (1)..(41): Homolog of NCBI NO: 11358467 NR Description: ids-4 protein-like - Arabidopsis thaliana
  misc_feature (62)..(201): Homolog of NCBI NO: 18417630 NR Description: ids-4 protein - like [Arabidopsis thaliana]
  misc_feature (1)..(41): Homolog of NCBI NO: 18417630 NR Description: ids-4 protein - like [Arabidopsis thaliana]

SEQ ID NO: 98708 - protein, 154 aa, Arabidopsis thaliana; identical to SEQ ID NO: 22209
  peptide (1)..(154): Ceres Seq. ID no. 13601335
  misc_feature (1)..(56): Pfam Name: SPX domain Pfam Description: SPX domain
  misc_feature (1)..(154): Homolog of NCBI NO: 15241275 NR Description: ids4-related protein [Arabidopsis thaliana] AT5g20150/F5O24_40 [Arabidopsis thaliana]
  misc_feature (1)..(154): Homolog of NCBI NO: 21592813 NR Description: ids4-like protein [Arabidopsis thaliana]
  misc_feature (1)..(119): Homolog of NCBI NO: 15225770 NR Description: expressed protein [Arabidopsis thaliana]
  misc_feature (1)..(134): Homolog of NCBI NO: 31415907 NR Description: putative SPX domain containing protein [Oryza
  misc_feature (1)..(134): Homolog of NCBI NO: 37533962 NR Description: hypothetical protein [Oryza sativa (japonica group)] >gi|15451632|gb|AAK98756.1| Hypothetical protein [Oryza >gi|31431851|gb|AAP53570.1| hypothetical protein [Oryza sativa
  misc_feature (1)..(148): Homolog of NCBI NO: 15225414 NR Description: hypothetical protein [Arabidopsis thaliana]
  misc_feature (1)..(99): Homolog of NCBI NO: 11358467 NR Description: ids-4 protein-like - Arabidopsis thaliana
  misc_feature (1)..(99): Homolog of NCBI NO: 18417630 NR Description: ids-4 protein - like [Arabidopsis thaliana]
  misc_feature (1)..(119): Homolog of NCBI NO: 16506648 NR Description: IDS-4-like protein [Castanea sativa]
  misc_feature (1)..(131): Homolog of NCBI NO: 34897330 NR Description: putative signal transduction protein [Oryza >gi|18855067|gb|AAL79759.1| putative signal transduction protein

SEQ ID NO: 98709 - DNA, 1187 bp, Arabidopsis thaliana
  misc_feature (1)..(1187): Ceres Seq. ID no. 13601348
  misc_feature: MA Experiment ID: 108435 Result: Down-regulated in Transcription
  misc_feature: MA Experiment 108435 PARAMETER Experiment Name: At_stm_Mutants_cDNA_P Parameter: Plant Line Value: wt Landsburg vs stm
  misc_feature: MA Experiment 108435 PARAMETER Experiment Name: At_stm_Mutants_cDNA_P Parameter: Tissue Value: Shoot Apical Meristem Region
  misc_feature: MA Experiment ID: 108667 Result: Up-regulated in Transcription
  misc_feature: MA Experiment 108667 PARAMETER Experiment Name: At_2mM_SA_cDNA_P Parameter: Plant Line Value: WS
  misc_feature: MA Experiment 108667 PARAMETER Experiment Name: At_2mM_SA_cDNA_P Parameter: Timepoint (hr) Value: 1
  misc_feature: MA Experiment 108667 PARAMETER Experiment Name: At_2mM_SA_cDNA_P Parameter: Treatment Value: 2mM SA vs. No Treatment
  misc_feature: MA Experiment ID: 108668 Result: Up-regulated in Transcription
  misc_feature: MA Experiment 108668 PARAMETER Experiment Name: At_2mM_SA_cDNA_P Parameter: Plant Line Value: WS
  misc_feature: MA Experiment 108668 PARAMETER Experiment Name: At_2mM_SA_cDNA_P Parameter: Timepoint (hr) Value: 6
  misc_feature: MA Experiment 108668 PARAMETER Experiment Name: At_2mM_SA_cDNA_P Parameter: Treatment Value: 2mM SA vs. No Treatment
  misc_feature: MA Experiment ID: 20000113 Result: Down-regulated in Transcription
  misc_feature: MA Experiment 20000113 PARAMETER Experiment Name: At_42deg_Heat_cDNA_P Parameter: Temperature (deg C) Value: 42 vs. 22
  misc_feature: MA Experiment 20000113 PARAMETER Experiment Name: At_42deg_Heat_cDNA_P Parameter: Timepoint (hr) Value: 8
  misc_feature: MA Experiment 20000113 PARAMETER Experiment Name: At_42deg_Heat_cDNA_P Parameter: Tissue Value: Aerial
  misc_feature: MA Experiment ID: 20000179 Result: Up-regulated in Transcription
  misc_feature: MA Experiment 20000179 PARAMETER Experiment Name: At_Germinating_Seeds_P Parameter: Age (hr) Value: 6 vs. 0
  misc_feature: MA Experiment 20000179 PARAMETER Experiment Name: At_Germinating_Seeds_P Parameter: Tissue Value: Germinating Seeds
  misc_feature: MA Experiment ID: 20000180 Result: Up-regulated in Transcription
  misc_feature: MA Experiment 20000180 PARAMETER Experiment Name: At_Germinating_Seeds_P Parameter: Age (hr) Value: 24 vs. 0
  misc_feature: MA Experiment 20000180 PARAMETER Experiment Name: At_Germinating_Seeds_P Parameter: Tissue Value: Germinating Seeds
  misc_feature: MA Experiment ID: 20000182 Result: Up-regulated in Transcription
  misc_feature: MA Experiment 20000182 PARAMETER Experiment Name: At_2mM_SA_P Parameter: Age (day) Value: 14
  misc_feature: MA Experiment 20000182 PARAMETER Experiment Name: At_2mM_SA_P Parameter: Organism Value: A. thaliana
  misc_feature: MA Experiment 20000182 PARAMETER Experiment Name: At_2mM_SA_P Parameter: Plant Line Value: WS
  misc_feature: MA Experiment 20000182 PARAMETER Experiment Name: At_2mM_SA_P Parameter: Timepoint (hr) Value: 6
  misc_feature: MA Experiment 20000182 PARAMETER Experiment Name: At_2mM_SA_P Parameter: Tissue Value: Aerial
  misc_feature: MA Experiment 20000182 PARAMETER Experiment Name: At_2mM_SA_P Parameter: Treatment Value: 2mM SA vs. No Treatment
  misc_feature: MA Experiment ID: 20000185 Result: Up-regulated in Transcription
  misc_feature: MA Experiment 20000185 PARAMETER Experiment Name: At_Roots__P Parameter: Age (day) Value: 7 vs. 21
  misc_feature: MA Experiment 20000185 PARAMETER Experiment Name: At_Roots__P Parameter: Organism Value: A. thaliana
  misc_feature: MA Experiment 20000185 PARAMETER Experiment Name: At_Roots__P Parameter: Tissue Value: Roots vs. Whole Plant
  misc_feature: MA Experiment ID: 20000234 Result: Down-regulated in Transcription
  misc_feature: MA Experiment 20000234 PARAMETER Experiment Name: At_Siliques_P Parameter: Age (day) Value: 21
  misc_feature: MA Experiment 20000234 PARAMETER Experiment Name: At_Siliques_P Parameter: Organism Value: A. thaliana
  misc_feature: MA Experiment 20000234 PARAMETER Experiment Name: At_Siliques_P Parameter: Plant Line Value: WS
  misc_feature: MA Experiment 20000234 PARAMETER Experiment Name: At_Siliques_P Parameter: Tissue Value: Less Than 5mm Siliques vs. Whole Plant
  misc_feature: MA Experiment ID: 20000264 Result: Down-regulated in Transcription
  misc_feature: MA Experiment 20000264 PARAMETER Experiment Name: At_Open_Flower_P Parameter: Age (day) Value: 21
  misc_feature: MA Experiment 20000264 PARAMETER Experiment Name: At_Open_Flower_P Parameter: Plant Line Value: WS
  misc_feature: MA Experiment 20000264 PARAMETER Experiment Name: At_Open_Flower_P Parameter: Tissue Value: Open Flower vs. Whole Plant
  misc_feature: MA Experiment ID: 20000265 Result: Down-regulated in Transcription
  misc_feature: MA Experiment 20000265 PARAMETER Experiment Name: At_Open_Flower_P Parameter: Age (day) Value: 21
  misc_feature: MA Experiment 20000265 PARAMETER Experiment Name: At_Open_Flower_P Parameter: Plant Line Value: WS
  misc_feature: MA Experiment 20000265 PARAMETER Experiment Name: At_Open_Flower_P Parameter: Tissue Value: Closed Flower vs. Whole Plant
  misc_feature: MA Experiment ID: 20000286 Result: Down-regulated in Transcription
  misc_feature: MA Experiment 20000286 PARAMETER Experiment Name: At_Open_Flower_P Parameter: Age (day) Value: 21
  misc_feature: MA Experiment 20000286 PARAMETER Experiment Name: At_Open_Flower_P Parameter: Plant Line Value: WS
  misc_feature: MA Experiment 20000286 PARAMETER Experiment Name: At_Open_Flower_P Parameter: Tissue Value: Half Open vs. Whole Plant
  misc_feature: MA Experiment ID: 20000439 Result: Up-regulated in Transcription
  misc_feature: MA Experiment 20000439 PARAMETER Experiment Name: At_Roots__P Parameter: Age (day) Value: 14 vs. 21
  misc_feature: MA Experiment 20000439 PARAMETER Experiment Name: At_Roots__P Parameter: Organism Value: A. thaliana
  misc_feature: MA Experiment 20000439 PARAMETER Experiment Name: At_Roots__P Parameter: Tissue Value: Roots vs. Whole Plant
  misc_feature: MA Experiment ID: 20000527 Result: Down-regulated in Transcription
  misc_feature: MA Experiment 20000527 PARAMETER Experiment Name: At_10percent_PEG_P Parameter: Age (day) Value: 20
  misc_feature: MA Experiment 20000527 PARAMETER Experiment Name: At_10percent_PEG_P Parameter: Organism Value: A. thaliana
  misc_feature: MA Experiment 20000527 PARAMETER Experiment Name: At_10percent_PEG_P Parameter: Plant Line Value: WS
  misc_feature: MA Experiment 20000527 PARAMETER Experiment Name: At_10percent_PEG_P Parameter: Timepoint (day) Value: 20
  misc_feature: MA Experiment 20000527 PARAMETER Experiment Name: At_10percent_PEG_P Parameter: Tissue Value: Whole Plant
  misc_feature: MA Experiment 20000527 PARAMETER Experiment Name: At_10percent_PEG_P Parameter: Treatment Value: 10percent PEG vs. No Treatment
  misc_feature: MA Experiment ID: 20001554 Result: Down-regulated in Transcription
  misc_feature: MA Experiment 20001554 PARAMETER Experiment Name: At_Drought_Soil_Dry_P Parameter: Age (day) Value: 21
  misc_feature: MA Experiment 20001554 PARAMETER Experiment Name: At_Drought_Soil_Dry_P Parameter: Organism Value: A. thaliana
  misc_feature: MA Experiment 20001554 PARAMETER Experiment Name: At_Drought_Soil_Dry_P Parameter: Plant Line Value: WS
  misc_feature: MA Experiment 20001554 PARAMETER Experiment Name: At_Drought_Soil_Dry_P Parameter: Post Timepoint (hr) Value: None
  misc_feature: MA Experiment 20001554 PARAMETER Experiment Name: At_Drought_Soil_Dry_P Parameter: Post-Treatment Value: None
  misc_feature: MA Experiment 20001554 PARAMETER Experiment Name: At_Drought_Soil_Dry_P Parameter: Timepoint (day) Value: 7
  misc_feature: MA Experiment 20001554 PARAMETER Experiment Name: At_Drought_Soil_Dry_P Parameter: Treatment Value: Drought vs. No Drought
  misc_feature: MA Experiment ID: 20001555 Result: Down-regulated in Transcription
  misc_feature: MA Experiment 20001555 PARAMETER Experiment Name: At_Drought_Soil_Dry_P Parameter: Age (day) Value: 24
  misc_feature: MA Experiment 20001555 PARAMETER Experiment Name: At_Drought_Soil_Dry_P Parameter: Organism Value: A. thaliana
  misc_feature: MA Experiment 20001555 PARAMETER Experiment Name: At_Drought_Soil_Dry_P Parameter: Plant Line Value: WS
  misc_feature: MA Experiment 20001555 PARAMETER Experiment Name: At_Drought_Soil_Dry_P Parameter: Post Timepoint (hr) Value: None
  misc_feature: MA Experiment 20001555 PARAMETER Experiment Name: At_Drought_Soil_Dry_P Parameter: Post-Treatment Value: None
  misc_feature: MA Experiment 20001555 PARAMETER Experiment Name: At_Drought_Soil_Dry_P Parameter: Timepoint (day) Value: 10
  misc_feature: MA Experiment 20001555 PARAMETER Experiment Name: At_Drought_Soil_Dry_P Parameter: Treatment Value: Drought vs. No Drought
  misc_feature: MA Experiment ID: 20001556 Result: Down-regulated in Transcription
  misc_feature: MA Experiment 20001556 PARAMETER Experiment Name: At_Drought_Soil_Dry_P Parameter: Age (day) Value: 26
  misc_feature: MA Experiment 20001556 PARAMETER Experiment Name: At_Drought_Soil_Dry_P Parameter: Organism Value: A. thaliana
  misc_feature: MA Experiment 20001556 PARAMETER Experiment Name: At_Drought_Soil_Dry_P Parameter: Plant Line Value: WS
  misc_feature: MA Experiment 20001556 PARAMETER Experiment Name: At_Drought_Soil_Dry_P Parameter: Post Timepoint (hr) Value: None
  misc_feature: MA Experiment 20001556 PARAMETER Experiment Name: At_Drought_Soil_Dry_P Parameter: Post-Treatment Value: None
  misc_feature: MA Experiment 20001556 PARAMETER Experiment Name: At_Drought_Soil_Dry_P Parameter: Timepoint (day) Value: 12
  misc_feature: MA Experiment 20001556 PARAMETER Experiment Name: At_Drought_Soil_Dry_P Parameter: Treatment Value: Drought vs. No Drought
  misc_feature: MA Experiment ID: 20001558 Result: Down-regulated in Transcription
  misc_feature: MA Experiment 20001558 PARAMETER Experiment Name: At_Drought_Soil_Dry_P Parameter: Age (day) Value: 27
  misc_feature: MA Experiment 20001558 PARAMETER Experiment Name: At_Drought_Soil_Dry_P Parameter: Organism Value: A. thaliana
  misc_feature: MA Experiment 20001558 PARAMETER Experiment Name: At_Drought_Soil_Dry_P Parameter: Plant Line Value: WS
  misc_feature: MA Experiment 20001558 PARAMETER Experiment Name: At_Drought_Soil_Dry_P Parameter: Post Timepoint (hr) Value: 6
  misc_feature: MA Experiment 20001558 PARAMETER Experiment Name: At_Drought_Soil_Dry_P Parameter: Post-Treatment Value: Re-Water vs. No Drought
  misc_feature: MA Experiment 20001558 PARAMETER Experiment Name: At_Drought_Soil_Dry_P Parameter: Timepoint (day) Value: 13
  misc_feature: MA Experiment 20001558 PARAMETER Experiment Name: At_Drought_Soil_Dry_P Parameter: Treatment Value: Drought vs. No Drought
  misc_feature: MA Experiment ID: 20001559 Result: Down-regulated in Transcription
  misc_feature: MA Experiment 20001559 PARAMETER Experiment Name: At_Drought_Soil_Dry_P Parameter: Age (day) Value: 28
  misc_feature: MA Experiment 20001559 PARAMETER Experiment Name: At_Drought_Soil_Dry_P Parameter: Organism Value: A. thaliana
  misc_feature: MA Experiment 20001559 PARAMETER Experiment Name: At_Drought_Soil_Dry_P Parameter: Plant Line Value: WS
  misc_feature: MA Experiment 20001559 PARAMETER Experiment Name: At_Drought_Soil_Dry_P Parameter: Post Timepoint (hr) Value: 29
  misc_feature: MA Experiment 20001559 PARAMETER Experiment Name: At_Drought_Soil_Dry_P Parameter: Post-Treatment Value: Re-Water vs. No Drought
  misc_feature: MA Experiment 20001559 PARAMETER Experiment Name: At_Drought_Soil_Dry_P Parameter: Timepoint (day) Value: 14
  misc_feature: MA Experiment 20001559 PARAMETER Experiment Name: At_Drought_Soil_Dry_P Parameter: Treatment Value: Drought vs. No Drought
  misc_feature: MA Experiment ID: 20001560 Result: Down-regulated in Transcription
  misc_feature: MA Experiment 20001560 PARAMETER Experiment Name: At_Drought_Soil_Dry_P Parameter: Age (day) Value: 28
  misc_feature: MA Experiment 20001560 PARAMETER Experiment Name: At_Drought_Soil_Dry_P Parameter: Organism Value: A. thaliana
  misc_feature: MA Experiment 20001560 PARAMETER Experiment Name: At_Drought_Soil_Dry_P Parameter: Plant Line Value: WS
  misc_feature: MA Experiment 20001560 PARAMETER Experiment Name: At_Drought_Soil_Dry_P Parameter: Post Timepoint (hr) Value: None
  misc_feature: MA Experiment 20001560 PARAMETER Experiment Name: At_Drought_Soil_Dry_P Parameter: Post-Treatment Value: None
  misc_feature: MA Experiment 20001560 PARAMETER Experiment Name: At_Drought_Soil_Dry_P Parameter: Timepoint (day) Value: 14
  misc_feature: MA Experiment 20001560 PARAMETER Experiment Name: At_Drought_Soil_Dry_P Parameter: Treatment Value: Drought vs. No Drought
  misc_feature: MA Experiment ID: 20001905 Result: Down-regulated in Transcription
  misc_feature: MA Experiment 20001905 PARAMETER Experiment Name: At_Drought_Reproduction_P Parameter: Age (day) Value: 40
  misc_feature: MA Experiment 20001905 PARAMETER Experiment Name: At_Drought_Reproduction_P Parameter: Organism Value: A. thaliana
  misc_feature: MA Experiment 20001905 PARAMETER Experiment Name: At_Drought_Reproduction_P Parameter: Plant Line Value: WS
  misc_feature: MA Experiment 20001905 PARAMETER Experiment Name: At_Drought_Reproduction_P Parameter: Timepoint (day) Value: 10
  misc_feature: MA Experiment 20001905 PARAMETER Experiment Name: At_Drought_Reproduction_P Parameter: Tissue Value: Rosettes
  misc_feature: MA Experiment 20001905 PARAMETER Experiment Name: At_Drought_Reproduction_P Parameter: Treatment Value: Drought vs. No Drought
aaactcaagtagaaacaatggagaagccaaagttcaagactgtccaagaggtggttgcagctggcgaaggactgccggagagatatctccacgcacccaccggagacggcgaagttcaacctcttaacgcagcggtaccggagatggatattccggccatcgatctgaatcttctcctctcttcttctgaagctggtcaacaagagctgagtaaacttcactcggcactctctacatggggcgttgttcaggtgatgaatcatggaattacaaaagcgtttcttgacaagatttacaagctaaccaaggagttctttgcgcttccgaccgaagagaaacagaagtgcgcgagagagattgatagtatccaaggatatggtaacgacatgattctttgggatgatcaagttcttgattggatcgaccgtttgtatattactacttaccctgaagatcaaagacaacttaatttctggcctgaagtcccacttggattcagggaaactttacatgaatacacaatgaagcaacggatagtgattgagcaattttttaaggccatggctagatctttggaattagaagagaatagttttctagacatgtatggagaaagtgctacgttggatactagattcaacatgtatccaccatgtccgagcccggacaaggttattggtgttaaaccgcacgctgatggctcggctatcactcttctcttacccgacaaagatgtcggagggcttcagttccagaaagatgggaagtggtataaagctcctatagtccctgatacaattttgatcaatgttggtgatcaaatggagataatgagcaatgggatatacaagagcccggttcatagagtggtgactaacagagaaaaggaaagaatatctgtggcaactttttgcattccaggtgcagataaagagattcagcctgtgaatgagcttgtgtctgaggcaagaccaagattatataaaacagttaagaagtatgtggagctctacttcaagtactatcaacaaggccgaagacctattgaagctgcattgatctgatcacacttttcaagtctcatttattggtttcacaaatgaatctgtttctttcgttacttgagatcctttataagaataaaactgtttccttgtttgttggaatgtgaggctgcattgtgttgc

SEQ ID NO: 98710 - protein, 353 aa, Arabidopsis thaliana
  peptide (1)..(353): Ceres Seq. ID no. 13601349
  misc_feature (206)..(306): Pfam Name: 2OG-Fe(II) oxygenase superfamily Pfam Description: 2OG-Fe(II) oxygenase superfamily
  misc_feature (6)..(353): Homolog of NCBI NO: 15241348 NR Description: oxidoreductase, 2OG-Fe(II) oxygenase family
  misc_feature (6)..(353): Homolog of NCBI NO: 21593366 NR Description: ethylene-forming-enzyme-like dioxygenase-like
  misc_feature (6)..(353): Homolog of NCBI NO: 15222131 NR Description: oxidoreductase, 2OG-Fe(II) oxygenase family
  misc_feature (6)..(353): Homolog of NCBI NO: 15241383 NR Description: oxidoreductase, 2OG-Fe(II) oxygenase family
  misc_feature (6)..(353): Homolog of NCBI NO: 15239524 NR Description: oxidoreductase, 2OG-Fe(II) oxygenase family
  misc_feature (13)..(353): Homolog of NCBI NO: 2688828 NR Description: ethylene-forming-enzyme-like dioxygenase [Prunus
  misc_feature (14)..(353): Homolog of NCBI NO: 24413984 NR Description: ethylene-forming-enzyme-like dioxygenase-like
  misc_feature (14)..(330): Homolog of NCBI NO: 24413982 NR Description: ethylene-forming-enzyme-like dioxygenase-like
  misc_feature (14)..(328): Homolog of NCBI NO: 34898470 NR Description: ESTs D47168(S12332),D46350(S10967) correspond to
  misc_feature (1)..(339): Homolog of NCBI NO: 2492613 NR Description: Flavonol synthase (FLS) >gi|7433193|pir||T07373
TQVETMEKPKFKTVQEVVAAGEGLPERYLHAPTGDGEVQPLNAAVPEMDIPAIDLNLLLSSSEAGQQELSKLHSALSTWGVVQVMNHGITKAFLDKIYKLTKEFFALPTEEKQKCAREIDSIQGYGNDMILWDDQVLDWIDRLYITTYPEDQRQLNFWPEVPLGFRETLHEYTMKQRIVIEQFFKAMARSLELEENSFLDMYGESATLDTRFNMYPPCPSPDKVIGVKPHADGSAITLLLPDKDVGGLQFQKDGKWYKAPIVPDTILINVGDQMEIMSNGIYKSPVHRVVTNREKERISVATFCIPGADKEIQPVNELVSEARPRLYKTVKKYVELYFKYYQQGRRPIEAALI

SEQ ID NO: 98711 - protein, 348 aa, Arabidopsis thaliana; identical to SEQ ID NO: 24459
  peptide (1)..(348): Ceres Seq. ID no. 13601350
  misc_feature (201)..(301): Pfam Name: 2OG-Fe(II) oxygenase superfamily Pfam Description: 2OG-Fe(II) oxygenase superfamily
  misc_feature (1)..(348): Homolog of NCBI NO: 15241348 NR Description: oxidoreductase, 2OG-Fe(II) oxygenase family
  misc_feature (1)..(348): Homolog of NCBI NO: 21593366 NR Description: ethylene-forming-enzyme-like dioxygenase-like
  misc_feature (1)..(348): Homolog of NCBI NO: 15222131 NR Description: oxidoreductase, 2OG-Fe(II) oxygenase family
  misc_feature (1)..(348): Homolog of NCBI NO: 15241383 NR Description: oxidoreductase, 2OG-Fe(II) oxygenase family
  misc_feature (1)..(348): Homolog of NCBI NO: 15239524 NR Description: oxidoreductase, 2OG-Fe(II) oxygenase family
  misc_feature (8)..(348): Homolog of NCBI NO: 2688828 NR Description: ethylene-forming-enzyme-like dioxygenase [Prunus
  misc_feature (9)..(348): Homolog of NCBI NO: 24413984 NR Description: ethylene-forming-enzyme-like dioxygenase-like
  misc_feature (9)..(325): Homolog of NCBI NO: 24413982 NR Description: ethylene-forming-enzyme-like dioxygenase-like
  misc_feature (9)..(323): Homolog of NCBI NO: 34898470 NR Description: ESTs D47168(S12332),D46350(S10967) correspond to
  misc_feature (1)..(334): Homolog of NCBI NO: 2492613 NR Description: Flavonol synthase (FLS) >gi|7433193|pir||T07373

SEQ ID NO: 98712 - protein, 306 aa, Arabidopsis thaliana; identical to SEQ ID NO: 24460
  peptide (1)..(306): Ceres Seq. ID no. 13601351
  misc_feature (159)..(259): Pfam Name: 2OG-Fe(II) oxygenase superfamily Pfam Description: 2OG-Fe(II) oxygenase superfamily
  misc_feature (1)..(306): Homolog of NCBI NO: 15241348 NR Description: oxidoreductase, 2OG-Fe(II) oxygenase family
  misc_feature (1)..(306): Homolog of NCBI NO: 21593366 NR Description: ethylene-forming-enzyme-like dioxygenase-like
  misc_feature (1)..(306): Homolog of NCBI NO: 15222131 NR Description: oxidoreductase, 2OG-Fe(II) oxygenase family
  misc_feature (1)..(306): Homolog of NCBI NO: 15241383 NR Description: oxidoreductase, 2OG-Fe(II) oxygenase family
  misc_feature (1)..(306): Homolog of NCBI NO: 15239524 NR Description: oxidoreductase, 2OG-Fe(II) oxygenase family
  misc_feature (1)..(306): Homolog of NCBI NO: 2688828 NR Description: ethylene-forming-enzyme-like dioxygenase [Prunus
  misc_feature (1)..(306): Homolog of NCBI NO: 24413984 NR Description: ethylene-forming-enzyme-like dioxygenase-like
  misc_feature (1)..(283): Homolog of NCBI NO: 24413982 NR Description: ethylene-forming-enzyme-like dioxygenase-like
  misc_feature (1)..(281): Homolog of NCBI NO: 34898470 NR Description: ESTs D47168(S12332),D46350(S10967) correspond to
  misc_feature (1)..(292): Homolog of NCBI NO: 2492613 NR Description: Flavonol synthase (FLS) >gi|7433193|pir||T07373

SEQ ID NO: 98713 - DNA, 1750 bp, Arabidopsis thaliana
  misc_feature (1)..(1750): Ceres Seq. ID no. 13601356
  misc_feature: MA Experiment ID: 108434 Result: Up-regulated in Transcription
  misc_feature: MA Experiment 108434 PARAMETER Experiment Name: At_Root_Tips_cDNA_P Parameter: Tissue Value: Root Tips
  misc_feature: MA Experiment ID: 20001557 Result: Up-regulated in Transcription
  misc_feature: MA Experiment 20001557 PARAMETER Experiment Name: At_Drought_Soil_Dry_P Parameter: Age (day) Value: 27
  misc_feature: MA Experiment 20001557 PARAMETER Experiment Name: At_Drought_Soil_Dry_P Parameter: Organism Value: A. thaliana
  misc_feature: MA Experiment 20001557 PARAMETER Experiment Name: At_Drought_Soil_Dry_P Parameter: Plant Line Value: WS
  misc_feature: MA Experiment 20001557 PARAMETER Experiment Name: At_Drought_Soil_Dry_P Parameter: Post Timepoint (hr) Value: 3
  misc_feature: MA Experiment 20001557 PARAMETER Experiment Name: At_Drought_Soil_Dry_P Parameter: Post-Treatment Value: Re-Water vs. No Drought
  misc_feature: MA Experiment 20001557 PARAMETER Experiment Name: At_Drought_Soil_Dry_P Parameter: Timepoint (day) Value: 13
  misc_feature: MA Experiment 20001557 PARAMETER Experiment Name: At_Drought_Soil_Dry_P Parameter: Treatment Value: Drought vs. No Drought
aacacatataatttgaccaaagtcgcatctcacggtgagatgagttcttcgtagctccaatggtggtggtggcttcacaatgtcgacttcttcttctttccctcgaaccatcgtctcctacactgtgacaacttcgctcttcatcgttatcttcctatgcagcgtcttcttcttcactagacgcactctcgaaccttctctctctccttaccacaccgccgacatccctctccccgccgtcgatctaccacctcctacgcctctcctccctcaaatcgagcctcacgatggtgacgtcaccgtggaaacgaatcctaaggaggtagaagattcgcgccgcggaggcgatgacgtcgcggtagagactgagctgaaactgaaagatgtggaagattcgcacacggagaaaaccgaggaggaggaagaaggtagaggagaatcgcccggtgaagtttccgtagaatctgtggaacatgcggtgattgagaagatgagaggctgtgatttgtacaagggatcgtgggttaagggcgatgatgagtatccattgtatcagcctggatcgtgtccttatgtggacgatgcttttgattgccagaggaatgggaggcgtgattctgactatcttaattggagatggaagcctgacggttgtgatcttccacggtttaatgctacagacttcttggtgaagctacgaggtaaaagtttgatgttggttggagattcaatgaatcgtaaccagtttgaatcaatgctttgcgttctacgagaaggtttatcggataagagtagaatgtatgaggttcatggccataatataacaaaagggagaggctactttgtattcaagtttgaagattataattgcacagtagagtttgtgaggtcacattttcttgtgagggaaggagttagagcaaatgctcaaggaaatactaatccgaccctttccattgatcgcattgacaagtcacatgctaaatggaagcgagctgacattcttgtctttaacactggacattggtgggttcatggaaagaccgccagagggaaaaactactacaaagaaggtgactacatctacccgaaatttgatgctactgaagcatacagaaggtcgttgaagacttgggcaaaatggatcgatcagaatgtgaatcccaaaaagcagcttgtattttatcgcggatactcctctgcccattttcggggaggtgagtgggactcgggagggtcatgcaacggggaggtagaacctgtgaagaagggttcaatcatcgattcctatcctttgaaaatgaagatagtccaggaagccataaaggagatgcaagttcctgtgattcttctaaacgtgacaaagctgactaatttccgcaaagacggacatccatcaatctacggtaagaccaacacggatggtaagaaagtgtcgacaaggcgacaggattgcagccactggtgcctgccgggagttcccgatgtttggaaccatcttatctacgcatctttgctccttcaaccacattcttaaagttgagctcatacatcaacaaaattagatagaaagagaagagcagaaacaaatgaccagtccagtcttcactgttgtagtagtgatgtcaaattttgtgtaatttattgcccttggagctgataagtagttttttgttactttcatgtagaggtgtgaacaaacggaatcaggatgaaattttcagggttttttaatggcaaacaatttttc

SEQ ID NO: 98714 - protein, 485 aa, Arabidopsis thaliana
  peptide (1)..(485): Ceres Seq. ID no. 13601357
  misc_feature (317)..(479): Pfam Name: Arabidopsis proteins of unknown function Pfam Description: Arabidopsis proteins of unknown function
  misc_feature (1)..(485): Homolog of NCBI NO: 15242021 NR Description: expressed protein [Arabidopsis thaliana]
  misc_feature (1)..(485): Homolog of NCBI NO: 21592371 NR Description: unknown [Arabidopsis thaliana]
  misc_feature (117)..(480): Homolog of NCBI NO: 22330347 NR Description: expressed protein [Arabidopsis thaliana] unknown protein [Arabidopsis thaliana]
  misc_feature (141)..(480): Homolog of NCBI NO: 32489523 NR Description: OSJNBa0043L24.14 [Oryza sativa (japonica
  misc_feature (1)..(480): Homolog of NCBI NO: 15228743 NR Description: expressed protein [Arabidopsis thaliana]
  misc_feature (134)..(482): Homolog of NCBI NO: 15229945 NR Description: expressed protein [Arabidopsis thaliana] gb|AAF30301.1~gene_id:MEC18.19~similar to unknown protein
  misc_feature (94)..(482): Homolog of NCBI NO: 9759298 NR Description: emb|CAB82953.1~gene_id:MPH15.5~strong similarity
  misc_feature (121)..(481): Homolog of NCBI NO: 15239856 NR Description: expressed protein [Arabidopsis thaliana]
  misc_feature (167)..(482): Homolog of NCBI NO: 21618305 NR Description: unknown [Arabidopsis thaliana]
  misc_feature (136)..(482): Homolog of NCBI NO: 6862912 NR Description: unknown protein [Arabidopsis thaliana]
MSTSSSFPRTIVSYTVTTSLFIVIFLCSVFFFTRRTLEPSLSPYHTADIPLPAVDLPPPTPLLPQIEPHDGDVTVETNPKEVEDSRRGGDDVAVETELKLKDVEDSHTEKTEEEEEGRGESPGEVSVESVEHAVIEKMRGCDLYKGSWVKGDDEYPLYQPGSCPYVDDAFDCQRNGRRDSDYLNWRWKPDGCDLPRFNATDFLVKLRGKSLMLVGDSMNRNQFESMLCVLREGLSDKSRMYEVHGHNITKGRGYFVFKFEDYNCTVEFVRSHFLVREGVRANAQGNTNPTLSIDRIDKSHAKWKRADILVFNTGHWWVHGKTARGKNYYKEGDYIYPKFDATEAYRRSLKTWAKWIDQNVNPKKQLVFYRGYSSAHFRGGEWDSGGSCNGEVEPVKKGSIIDSYPLKMKIVQEAIKEMQVPVILLNVTKLTNFRKDGHPSIYGKTNTDGKKVSTRRQDCSHWCLPGVPDVWNHLIYASLLLQPHS

SEQ ID NO: 98715 - protein, 348 aa, Arabidopsis thaliana
  peptide (1)..(348): Ceres Seq. ID no. 13601358
  misc_feature (180)..(342): Pfam Name: Arabidopsis proteins of unknown function Pfam Description: Arabidopsis proteins of unknown function
  misc_feature (1)..(348): Homolog of NCBI NO: 15242021 NR Description: expressed protein [Arabidopsis thaliana]
  misc_feature (1)..(348): Homolog of NCBI NO: 21592371 NR Description: unknown [Arabidopsis thaliana]
  misc_feature (1)..(343): Homolog of NCBI NO: 22330347 NR Description: expressed protein [Arabidopsis thaliana] unknown protein [Arabidopsis thaliana]
  misc_feature (4)..(343): Homolog of NCBI NO: 32489523 NR Description: OSJNBa0043L24.14 [Oryza sativa (japonica
  misc_feature (1)..(343): Homolog of NCBI NO: 15228743 NR Description: expressed protein [Arabidopsis thaliana]
  misc_feature (1)..(345): Homolog of NCBI NO: 15229945 NR Description: expressed protein [Arabidopsis thaliana] gb|AAF30301.1~gene_id:MEC18.19~similar to unknown protein
  misc_feature (1)..(345): Homolog of NCBI NO: 9759298 NR Description: emb|CAB82953.1~gene_id:MPH15.5~strong similarity
  misc_feature (1)..(344): Homolog of NCBI NO: 15239856 NR Description: expressed protein [Arabidopsis thaliana]
  misc_feature (30)..(345): Homolog of NCBI NO: 21618305 NR Description: unknown [Arabidopsis thaliana]
  misc_feature (1)..(345): Homolog of NCBI NO: 6862912 NR Description: unknown protein [Arabidopsis thaliana]
MRGCDLYKGSWVKGDDEYPLYQPGSCPYVDDAFDCQRNGRRDSDYLNWRWKPDGCDLPRFNATDFLVKLRGKSLMLVGDSMNRNQFESMLCVLREGLSDKSRMYEVHGHNITKGRGYFVFKFEDYNCTVEFVRSHFLVREGVRANAQGNTNPTLSIDRIDKSHAKWKRADILVFNTGHWWVHGKTARGKNYYKEGDYIYPKFDATEAYRRSLKTWAKWIDQNVNPKKQLVFYRGYSSAHFRGGEWDSGGSCNGEVEPVKKGSIIDSYPLKMKIVQEAIKEMQVPVILLNVTKLTNFRKDGHPSIYGKTNTDGKKVSTRRQDCSHWCLPGVPDVWNHLIYASLLLQPHS

SEQ ID NO: 98716 - protein, 274 aa, Arabidopsis thaliana; identical to SEQ ID NO: 35406
  peptide (1)..(274): Ceres Seq. ID no. 13601359
  misc_feature (106)..(268): Pfam Name: Arabidopsis proteins of unknown function Pfam Description: Arabidopsis proteins of unknown function
  misc_feature (1)..(274): Homolog of NCBI NO: 15242021 NR Description: expressed protein [Arabidopsis thaliana]
  misc_feature (1)..(274): Homolog of NCBI NO: 21592371 NR Description: unknown [Arabidopsis thaliana]
  misc_feature (1)..(269): Homolog of NCBI NO: 22330347 NR Description: expressed protein [Arabidopsis thaliana] unknown protein [Arabidopsis thaliana]
  misc_feature (1)..(269): Homolog of NCBI NO: 32489523 NR Description: OSJNBa0043L24.14 [Oryza sativa (japonica
  misc_feature (1)..(269): Homolog of NCBI NO: 15228743 NR Description: expressed protein [Arabidopsis thaliana]
  misc_feature (1)..(271): Homolog of NCBI NO: 15229945 NR Description: expressed protein [Arabidopsis thaliana] gb|AAF30301.1~gene_id:MEC18.19~similar to unknown protein
  misc_feature (1)..(271): Homolog of NCBI NO: 9759298 NR Description: emb|CAB82953.1~gene_id:MPH15.5~strong similarity
  misc_feature (1)..(270): Homolog of NCBI NO: 15239856 NR Description: expressed protein [Arabidopsis thaliana]
  misc_feature (1)..(271): Homolog of NCBI NO: 21618305 NR Description: unknown [Arabidopsis thaliana]
  misc_feature (1)..(271): Homolog of NCBI NO: 6862912 NR Description: unknown protein [Arabidopsis thaliana]

SEQ ID NO: 98717 - DNA, 781 bp, Arabidopsis thaliana
  misc_feature (1)..(781): Ceres Seq. ID no. 13601366
  misc_feature: MA Experiment ID: 108435 Result: Up-regulated in Transcription
  misc_feature: MA Experiment 108435 PARAMETER Experiment Name: At_stm_Mutants_cDNA_P Parameter: Plant Line Value: wt Landsburg vs stm
  misc_feature: MA Experiment 108435 PARAMETER Experiment Name: At_stm_Mutants_cDNA_P Parameter: Tissue Value: Shoot Apical Meristem Region
  misc_feature: MA Experiment ID: 108461 Result: Up-regulated in Transcription
  misc_feature: MA Experiment 108461 PARAMETER Experiment Name: At_Germinating_Seeds_cDNA_P Parameter: Age (day) Value: 1 vs. 0
  misc_feature: MA Experiment 108461 PARAMETER Experiment Name: At_Germinating_Seeds_cDNA_P Parameter: Tissue Value: Germinating Seeds
  misc_feature: MA Experiment ID: 108462 Result: Up-regulated in Transcription
  misc_feature: MA Experiment 108462 PARAMETER Experiment Name: At_Germinating_Seeds_cDNA_P Parameter: Age (day) Value: 2 vs. 0
  misc_feature: MA Experiment 108462 PARAMETER Experiment Name: At_Germinating_Seeds_cDNA_P Parameter: Tissue Value: Germinating Seeds
  misc_feature: MA Experiment ID: 108473 Result: Down-regulated in Transcription
  misc_feature: MA Experiment 108473 PARAMETER Experiment Name: At_Drought_Flowers_cDNA_P Parameter: Timepoint (hr) Value: 7 d
  misc_feature: MA Experiment 108473 PARAMETER Experiment Name: At_Drought_Flowers_cDNA_P Parameter: Tissue Value: Flower
  misc_feature: MA Experiment 108473 PARAMETER Experiment Name: At_Drought_Flowers_cDNA_P Parameter: Treatment Value: Drought vs. No Drought
  misc_feature: MA Experiment ID: 108595 Result: Up-regulated in Transcription
  misc_feature: MA Experiment 108595 PARAMETER Experiment Name: At_Ler-pi_Ovule_cDNA_P Parameter: Plant Line Value: null
  misc_feature: MA Experiment ID: 108668 Result: Down-regulated in Transcription
  misc_feature: MA Experiment 108668 PARAMETER Experiment Name: At_2mM_SA_cDNA_P Parameter: Plant Line Value: WS
  misc_feature: MA Experiment 108668 PARAMETER Experiment Name: At_2mM_SA_cDNA_P Parameter: Timepoint (hr) Value: 6
  misc_feature: MA Experiment 108668 PARAMETER Experiment Name: At_2mM_SA_cDNA_P Parameter: Treatment Value: 2mM SA vs. No Treatment
  misc_feature: MA Experiment ID: 20000113 Result: Down-regulated in Transcription
  misc_feature: MA Experiment 20000113 PARAMETER Experiment Name: At_42deg_Heat_cDNA_P Parameter: Temperature (deg C) Value: 42 vs. 22
  misc_feature: MA Experiment 20000113 PARAMETER Experiment Name: At_42deg_Heat_cDNA_P Parameter: Timepoint (hr) Value: 8
  misc_feature: MA Experiment 20000113 PARAMETER Experiment Name: At_42deg_Heat_cDNA_P Parameter: Tissue Value: Aerial
  misc_feature: MA Experiment ID: 20000180 Result: Up-regulated in Transcription
  misc_feature: MA Experiment 20000180 PARAMETER Experiment Name: At_Germinating_Seeds_P Parameter: Age (hr) Value: 24 vs. 0
  misc_feature: MA Experiment 20000180 PARAMETER Experiment Name: At_Germinating_Seeds_P Parameter: Tissue Value: Germinating Seeds
  misc_feature: MA Experiment ID: 20000185 Result: Down-regulated in Transcription
  misc_feature: MA Experiment 20000185 PARAMETER Experiment Name: At_Roots__P Parameter: Age (day) Value: 7 vs. 21
  misc_feature: MA Experiment 20000185 PARAMETER Experiment Name: At_Roots__P Parameter: Organism Value: A. thaliana
  misc_feature: MA Experiment 20000185 PARAMETER Experiment Name: At_Roots__P Parameter: Tissue Value: Roots vs. Whole Plant
  misc_feature: MA Experiment ID: 20000224 Result: Down-regulated in Transcription
  misc_feature: MA Experiment ID: 20000265 Result: Up-regulated in Transcription
  misc_feature: MA Experiment 20000265 PARAMETER Experiment Name: At_Open_Flower_P Parameter: Age (day) Value: 21
  misc_feature: MA Experiment 20000265 PARAMETER Experiment Name: At_Open_Flower_P Parameter: Plant Line Value: WS
  misc_feature: MA Experiment 20000265 PARAMETER Experiment Name: At_Open_Flower_P Parameter: Tissue Value: Closed Flower vs. Whole Plant
  misc_feature: MA Experiment ID: 20000439 Result: Down-regulated in Transcription
  misc_feature: MA Experiment 20000439 PARAMETER Experiment Name: At_Roots__P Parameter: Age (day) Value: 14 vs. 21
  misc_feature: MA Experiment 20000439 PARAMETER Experiment Name: At_Roots__P Parameter: Organism Value: A. thaliana
  misc_feature: MA Experiment 20000439 PARAMETER Experiment Name: At_Roots__P Parameter: Tissue Value: Roots vs. Whole Plant
  misc_feature: MA Experiment ID: 20000445 Result: Down-regulated in Transcription
  misc_feature: MA Experiment 20000445 PARAMETER Experiment Name: At_100uM_NAA__P Parameter: Age (day) Value: 14
  misc_feature: MA Experiment 20000445 PARAMETER Experiment Name: At_100uM_NAA__P Parameter: Organism Value: A. thaliana
  misc_feature: MA Experiment 20000445 PARAMETER Experiment Name: At_100uM_NAA__P Parameter: Plant Line Value: WS
  misc_feature: MA Experiment 20000445 PARAMETER Experiment Name: At_100uM_NAA__P Parameter: Timepoint (hr) Value: 6
  misc_feature: MA Experiment 20000445 PARAMETER Experiment Name: At_100uM_NAA__P Parameter: Tissue Value: Aerial
  misc_feature: MA Experiment 20000445 PARAMETER Experiment Name: At_100uM_NAA__P Parameter: Treatment Value: 100uM NAA vs. No Treatment
  misc_feature: MA Experiment ID: 20001248 Result: Down-regulated in Transcription
  misc_feature: MA Experiment 20001248 PARAMETER Experiment Name: At_Far-red-induction_P Parameter: Age (day) Value: 7
  misc_feature: MA Experiment 20001248 PARAMETER Experiment Name: At_Far-red-induction_P Parameter: Light Value: Far-red vs. White
  misc_feature: MA Experiment 20001248 PARAMETER Experiment Name: At_Far-red-induction_P Parameter: Organism Value: A. thaliana
  misc_feature: MA Experiment 20001248 PARAMETER Experiment Name: At_Far-red-induction_P Parameter: Plant Line Value: Columbia
  misc_feature: MA Experiment 20001248 PARAMETER Experiment Name: At_Far-red-induction_P Parameter: Timepoint (hr) Value: 4
  misc_feature: MA Experiment 20001248 PARAMETER Experiment Name: At_Far-red-induction_P Parameter: Tissue Value: Whole Plant
  misc_feature: MA Experiment ID: 20001555 Result: Down-regulated in Transcription
  misc_feature: MA Experiment 20001555 PARAMETER Experiment Name: At_Drought_Soil_Dry_P Parameter: Age (day) Value: 24
  misc_feature: MA Experiment 20001555 PARAMETER Experiment Name: At_Drought_Soil_Dry_P Parameter: Organism Value: A. thaliana
  misc_feature: MA Experiment 20001555 PARAMETER Experiment Name: At_Drought_Soil_Dry_P Parameter: Plant Line Value: WS
  misc_feature: MA Experiment 20001555 PARAMETER Experiment Name: At_Drought_Soil_Dry_P Parameter: Post Timepoint (hr) Value: None
  misc_feature: MA Experiment 20001555 PARAMETER Experiment Name: At_Drought_Soil_Dry_P Parameter: Post-Treatment Value: None
  misc_feature: MA Experiment 20001555 PARAMETER Experiment Name: At_Drought_Soil_Dry_P Parameter: Timepoint (day) Value: 10
  misc_feature: MA Experiment 20001555 PARAMETER Experiment Name: At_Drought_Soil_Dry_P Parameter: Treatment Value: Drought vs. No Drought
  misc_feature: MA Experiment ID: 20001556 Result: Down-regulated in Transcription
  misc_feature: MA Experiment 20001556 PARAMETER Experiment Name: At_Drought_Soil_Dry_P Parameter: Age (day) Value: 26
  misc_feature: MA Experiment 20001556 PARAMETER Experiment Name: At_Drought_Soil_Dry_P Parameter: Organism Value: A. thaliana
  misc_feature: MA Experiment 20001556 PARAMETER Experiment Name: At_Drought_Soil_Dry_P Parameter: Plant Line Value: WS
  misc_feature: MA Experiment 20001556 PARAMETER Experiment Name: At_Drought_Soil_Dry_P Parameter: Post Timepoint (hr) Value: None
  misc_feature: MA Experiment 20001556 PARAMETER Experiment Name: At_Drought_Soil_Dry_P Parameter: Post-Treatment Value: None
  misc_feature: MA Experiment 20001556 PARAMETER Experiment Name: At_Drought_Soil_Dry_P Parameter: Timepoint (day) Value: 12
  misc_feature: MA Experiment 20001556 PARAMETER Experiment Name: At_Drought_Soil_Dry_P Parameter: Treatment Value: Drought vs. No Drought
  misc_feature: MA Experiment ID: 20001559 Result: Down-regulated in Transcription
  misc_feature: MA Experiment 20001559 PARAMETER Experiment Name: At_Drought_Soil_Dry_P Parameter: Age (day) Value: 28
  misc_feature: MA Experiment 20001559 PARAMETER Experiment Name: At_Drought_Soil_Dry_P Parameter: Organism Value: A. thaliana
  misc_feature: MA Experiment 20001559 PARAMETER Experiment Name: At_Drought_Soil_Dry_P Parameter: Plant Line Value: WS
  misc_feature: MA Experiment 20001559 PARAMETER Experiment Name: At_Drought_Soil_Dry_P Parameter: Post Timepoint (hr) Value: 29
  misc_feature: MA Experiment 20001559 PARAMETER Experiment Name: At_Drought_Soil_Dry_P Parameter: Post-Treatment Value: Re-Water vs. No Drought
  misc_feature: MA Experiment 20001559 PARAMETER Experiment Name: At_Drought_Soil_Dry_P Parameter: Timepoint (day) Value: 14
  misc_feature: MA Experiment 20001559 PARAMETER Experiment Name: At_Drought_Soil_Dry_P Parameter: Treatment Value: Drought vs. No Drought
  misc_feature: MA Experiment ID: 20001906 Result: Down-regulated in Transcription
  misc_feature: MA Experiment 20001906 PARAMETER Experiment Name: At_Drought_Reproduction_P Parameter: Age (day) Value: 35
  misc_feature: MA Experiment 20001906 PARAMETER Experiment Name: At_Drought_Reproduction_P Parameter: Organism Value: A. thaliana
  misc_feature: MA Experiment 20001906 PARAMETER Experiment Name: At_Drought_Reproduction_P Parameter: Plant Line Value: WS
  misc_feature: MA Experiment 20001906 PARAMETER Experiment Name: At_Drought_Reproduction_P Parameter: Timepoint (day) Value: 5
  misc_feature: MA Experiment 20001906 PARAMETER Experiment Name: At_Drought_Reproduction_P Parameter: Tissue Value: Siliques
  misc_feature: MA Experiment 20001906 PARAMETER Experiment Name: At_Drought_Reproduction_P Parameter: Treatment Value: Drought vs. No Drought
  misc_feature: MA Experiment ID: 20001908 Result: Down-regulated in Transcription
  misc_feature: MA Experiment 20001908 PARAMETER Experiment Name: At_Drought_Reproduction_P Parameter: Age (day) Value: 40
  misc_feature: MA Experiment 20001908 PARAMETER Experiment Name: At_Drought_Reproduction_P Parameter: Organism Value: A. thaliana
  misc_feature: MA Experiment 20001908 PARAMETER Experiment Name: At_Drought_Reproduction_P Parameter: Plant Line Value: WS
  misc_feature: MA Experiment 20001908 PARAMETER Experiment Name: At_Drought_Reproduction_P Parameter: Timepoint (day) Value: 10
  misc_feature: MA Experiment 20001908 PARAMETER Experiment Name: At_Drought_Reproduction_P Parameter: Tissue Value: Siliques
  misc_feature: MA Experiment 20001908 PARAMETER Experiment Name: At_Drought_Reproduction_P Parameter: Treatment Value: Drought vs. No Drought
  misc_feature: MA Experiment ID: 20001911 Result: Down-regulated in Transcription
  misc_feature: MA Experiment 20001911 PARAMETER Experiment Name: At_Drought_Reproduction_P Parameter: Age (day) Value: 40
  misc_feature: MA Experiment 20001911 PARAMETER Experiment Name: At_Drought_Reproduction_P Parameter: Organism Value: A. thaliana
  misc_feature: MA Experiment 20001911 PARAMETER Experiment Name: At_Drought_Reproduction_P Parameter: Plant Line Value: WS
  misc_feature: MA Experiment 20001911 PARAMETER Experiment Name: At_Drought_Reproduction_P Parameter: Timepoint (day) Value: 10
  misc_feature: MA Experiment 20001911 PARAMETER Experiment Name: At_Drought_Reproduction_P Parameter: Tissue Value: Flowers
  misc_feature: MA Experiment 20001911 PARAMETER Experiment Name: At_Drought_Reproduction_P Parameter: Treatment Value: Drought vs. No Drought
tttgcacacataaccctaatttggtctcttactctaacccgagagataatggctcctacacaaaatctcttccttgtcgctattgccttcgccgtcattttcaccgcctccaccgtacatggtcgtcataatggtgcagaagatatcgtgcattcctcctgcgaacacgcgagctatccatcactatgcgtccgtactctttcgtcatactccggtccaaccatcaccaaccgccgcgatctagctcaagccgccataaaaatcagcctctcccacgctcaaagcgccgcgaagaaactcgcggtggtgcgagactcggtggggaagaagaagcaagagaaagcggcgcttgtggactgtgtggagatgattggagactctgtggacgagctaagccgtacgctcggcgttttgaagcacctccgtgtctctggcggttcagctaaagagttccggtggcagatgagcaatgcacagacgtgggctagcgcggcacttacggatgacgacacgtgtctcgatgggtttcaagggatggacgacggtgaaatcaaaacggaggtgaagcagtggatgacgaaagtggccagggttacgagcaacgcgctttacatggtcaaccagctagatgagacacgtggcaaaccccacgacgtacatctttgatgttaatgcactagatcgttttaatggacggtctttattgtgtgtgttggtttttcgttcatgtgttttaagtgtgagattatctatcgctacgatatatagaaatgagtttttg

SEQ ID NO: 98718 - protein, 221 aa, Arabidopsis thaliana; identical to SEQ ID NO: 26084
  peptide (1)..(221): Ceres Seq. ID no. 13601367
  misc_feature (17)..(221): Homolog of NCBI NO: 15242049 NR Description: pectinesterase - related [Arabidopsis thaliana]
  misc_feature (17)..(221): Homolog of NCBI NO: 21553812 NR Description: ripening-related protein-like [Arabidopsis
  misc_feature (17)..(208): Homolog of NCBI NO: 7406663 NR Description: putative ripening-related protein [Vitis vinifera]
  misc_feature (23)..(213): Homolog of NCBI NO: 18407657 NR Description: pectinesterase family [Arabidopsis thaliana]
  misc_feature (23)..(213): Homolog of NCBI NO: 21618013 NR Description: putative ripening-related protein [Arabidopsis
  misc_feature (23)..(207): Homolog of NCBI NO: 15234982 NR Description: pectinesterase - related [Arabidopsis thaliana]
  misc_feature (21)..(212): Homolog of NCBI NO: 21618088 NR Description: ripening-related protein-like [Arabidopsis
  misc_feature (35)..(212): Homolog of NCBI NO: 15241799 NR Description: pectinesterase family [Arabidopsis thaliana]
  misc_feature (48)..(208): Homolog of NCBI NO: 7488727 NR Description: 21K protein precursor - alfalfa
  misc_feature (25)..(207): Homolog of NCBI NO: 112717 NR Description: 21 KD PROTEIN PRECURSOR (1.2 PROTEIN)

SEQ ID NO: 98719 - protein, 205 aa, Arabidopsis thaliana; identical to SEQ ID NO: 26085
  peptide (1)..(205): Ceres Seq. ID no. 13601368
  misc_feature (1)..(205): Homolog of NCBI NO: 15242049 NR Description: pectinesterase - related [Arabidopsis thaliana]
  misc_feature (1)..(205): Homolog of NCBI NO: 21553812 NR Description: ripening-related protein-like [Arabidopsis
  misc_feature (1)..(192): Homolog of NCBI NO: 7406663 NR Description: putative ripening-related protein [Vitis vinifera]
  misc_feature (7)..(197): Homolog of NCBI NO: 18407657 NR Description: pectinesterase family [Arabidopsis thaliana]
  misc_feature (7)..(197): Homolog of NCBI NO: 21618013 NR Description: putative ripening-related protein [Arabidopsis
  misc_feature (7)..(191): Homolog of NCBI NO: 15234982 NR Description: pectinesterase - related [Arabidopsis thaliana]
  misc_feature (5)..(196): Homolog of NCBI NO: 21618088 NR Description: ripening-related protein-like [Arabidopsis
  misc_feature (19)..(196): Homolog of NCBI NO: 15241799 NR Description: pectinesterase family [Arabidopsis thaliana]
  misc_feature (32)..(192): Homolog of NCBI NO: 7488727 NR Description: 21K protein precursor - alfalfa
  misc_feature (9)..(191): Homolog of NCBI NO: 112717 NR Description: 21 KD PROTEIN PRECURSOR (1.2 PROTEIN)

SEQ ID NO: 98720 - DNA, 1974 bp, Arabidopsis thaliana
  misc_feature (1)..(1974): Ceres Seq. ID no. 13601380
  misc_feature: MA Experiment ID: 108434 Result: Up-regulated in Transcription
  misc_feature: MA Experiment 108434 PARAMETER Experiment Name: At_Root_Tips_cDNA_P Parameter: Tissue Value: Root Tips
  misc_feature: MA Experiment ID: 108461 Result: Down-regulated in Transcription
  misc_feature: MA Experiment 108461 PARAMETER Experiment Name: At_Germinating_Seeds_cDNA_P Parameter: Age (day) Value: 1 vs. 0
  misc_feature: MA Experiment 108461 PARAMETER Experiment Name: At_Germinating_Seeds_cDNA_P Parameter: Tissue Value: Germinating Seeds
  misc_feature: MA Experiment ID: 108462 Result: Down-regulated in Transcription
  misc_feature: MA Experiment 108462 PARAMETER Experiment Name: At_Germinating_Seeds_cDNA_P Parameter: Age (day) Value: 2 vs. 0
  misc_feature: MA Experiment 108462 PARAMETER Experiment Name: At_Germinating_Seeds_cDNA_P Parameter: Tissue Value: Germinating Seeds
  misc_feature: MA Experiment ID: 108463 Result: Down-regulated in Transcription
  misc_feature: MA Experiment 108463 PARAMETER Experiment Name: At_Germinating_Seeds_cDNA_P Parameter: Age (day) Value: 3 vs. 0
  misc_feature: MA Experiment 108463 PARAMETER Experiment Name: At_Germinating_Seeds_cDNA_P Parameter: Tissue Value: Germinating Seeds
  misc_feature: MA Experiment ID: 108464 Result: Down-regulated in Transcription
  misc_feature: MA Experiment 108464 PARAMETER Experiment Name: At_Germinating_Seeds_cDNA_P Parameter: Age (day) Value: 4 vs. 0
  misc_feature: MA Experiment 108464 PARAMETER Experiment Name: At_Germinating_Seeds_cDNA_P Parameter: Tissue Value: Germinating Seeds
  misc_feature: MA Experiment ID: 20000113 Result: Down-regulated in Transcription
  misc_feature: MA Experiment 20000113 PARAMETER Experiment Name: At_42deg_Heat_cDNA_P Parameter: Temperature (deg C) Value: 42 vs. 22
  misc_feature: MA Experiment 20000113 PARAMETER Experiment Name: At_42deg_Heat_cDNA_P Parameter: Timepoint (hr) Value: 8
  misc_feature: MA Experiment 20000113 PARAMETER Experiment Name: At_42deg_Heat_cDNA_P Parameter: Tissue Value: Aerial
  misc_feature: MA Experiment ID: 20000227 Result: Up-regulated in Transcription
  misc_feature: MA Experiment 20000227 PARAMETER Experiment Name: At_Root-Tips-vs-Tops_P Parameter: Tissue Value: Root Tips vs. Root Tops
  misc_feature: MA Experiment ID: 20000495 Result: Up-regulated in Transcription
  misc_feature: MA Experiment 20000495 PARAMETER Experiment Name: At_Guard_Cells_P Parameter: Harvest Date Value: 8/2/2002
  misc_feature: MA Experiment 20000495 PARAMETER Experiment Name: At_Guard_Cells_P Parameter: Organism Value: A. thaliana
  misc_feature: MA Experiment 20000495 PARAMETER Experiment Name: At_Guard_Cells_P Parameter: Tissue Value: Guard Cells vs. Leaves
  misc_feature: MA Experiment ID: 20001557 Result: Up-regulated in Transcription
  misc_feature: MA Experiment 20001557 PARAMETER Experiment Name: At_Drought_Soil_Dry_P Parameter: Age (day) Value: 27
  misc_feature: MA Experiment 20001557 PARAMETER Experiment Name: At_Drought_Soil_Dry_P Parameter: Organism Value: A. thaliana
  misc_feature: MA Experiment 20001557 PARAMETER Experiment Name: At_Drought_Soil_Dry_P Parameter: Plant Line Value: WS
  misc_feature: MA Experiment 20001557 PARAMETER Experiment Name: At_Drought_Soil_Dry_P Parameter: Post Timepoint (hr) Value: 3
  misc_feature: MA Experiment 20001557 PARAMETER Experiment Name: At_Drought_Soil_Dry_P Parameter: Post-Treatment Value: Re-Water vs. No Drought
  misc_feature: MA Experiment 20001557 PARAMETER Experiment Name: At_Drought_Soil_Dry_P Parameter: Timepoint (day) Value: 13
  misc_feature: MA Experiment 20001557 PARAMETER Experiment Name: At_Drought_Soil_Dry_P Parameter: Treatment Value: Drought vs. No Drought
ctctcctctcattttctactcttcttcaaaagcacactcaatatttcgagatcctctcggcttgttcgttcttcgtgaacgatcccatctattgtttctcgctagtctcagattcgactaacttggatatctccgatactgaagaagcctccttcttctttttccgctcttcccgatgccgatcgataagatcttcaaagatgatgctagtgaagagaagggagaacgtgcgaggatggcatcatttgttggtgcaatggctatcagtgatctggttaagtctactttagggccaaagggcatggataaaatcttgcaatctactggtagaggtcatgcggtcactgttactaacgatggtgctactattctcaagtcacttcacatagacaaccctgcagctaaagttcttgttgacatctcgaaagttcaagatgatgaggttggtgatggaactacctctgttgttgtcttggccggcgagcttctgagggaagcagaaaagcttgtggcttctaagattcaccctatgaccatcatagcaggttacagaatggcttcggaatgtgctcgtaatgctttactgaaaagagtcattgataacaaggacaatgcagagaagtttaggtcagacttgttgaagattgcgatgactactttatgttccaaaattctctcacaggacaaggaacattttgcagaaatggccgtggatgctgttttcaggctaaagggaagcacaaacttggaagctattcagatcatcaaaaaacctggagggtctctgaaggattcgtttttggatgaagggtttattcttgacaagaaaataggaattgggcagcctaagcgcatagagaatgcaaatatcttagtagctaatactgctatggataccgataaagtgaagatttacggtgcacgtgtccgtgtggattccatgaccaaggttgctgagattgaaggggctgagaaggaaaaaatgaaagacaaggtgaagaagatcataggccacggaatcaactgctttgttaacaggcagttgatctacaatttccctgaggaactctttgctgatgctggtatacttgctattgagcatgctgactttgagggaatagagcgtcttggtttggttactggtggtgaaattgcttcgacctttgacaacccagagtctgttaagcttgggcattgcaagcttatagaagaaatcatgattggtgaagacaagttgattcatttctctggttgtgaaatgggccaggcttgttcaattgtcctaagaggggccagtcaccatgtcctagatgaggctgaaagatcactccatgatgccttatgtgtactctctcaaacagtgaatgatactagagttttgcttggaggtggatggccagagatggtgatggcaaaggaagtagatgagcttgcaaggaaaactgctggcaaaaaatctcatgccattgaagctttctcacgtgctctagttgctataccgacaacaatcgctgacaacgctggtttagacagtgccgaattggttgctcagcttcgtgcagagcaccacactgaagggtgtaacgctgggatcgacgtcatcactggagctgtaggagatatggaagagagaggaatctatgaagcattcaaagtgaagcaagcggttctgctttcagccacagaagcatctgagatgatattgcgagtggatgaaatcattacatgtgctcctaggaggagagaagacaggatgtgaaaaactcaacacaaacacatgaacgtggtgggagcctagagattccatgattgtgttttcgatttggatcagaatacaacttttctaatatgtttaatgttttgctcctccttagaactcatctttttgttttgtttccttttaatcttgttttgagtttgaatttagacgtttgaaaaaagtgttagctccaaagtttttaatttgtttggttg

SEQ ID NO: 98721 - protein, 527 aa, Arabidopsis thaliana; identical to SEQ ID NO: 29071
  peptide (1)..(527): Ceres Seq. ID no. 13601381
  misc_feature (30)..(520): Pfam Name: TCP-1/cpn60 chaperonin family Pfam Description: TCP-1/cpn60 chaperonin family
  misc_feature (1)..(527): Homolog of NCBI NO: 15242093 NR Description: chaperonin, putative [Arabidopsis thaliana] AT5g20890/F22D1_60 [Arabidopsis thaliana]
  misc_feature (2)..(523): Homolog of NCBI NO: 27503862 NR Description: Similar to chaperonin subunit 2 (beta) [Xenopus
  misc_feature (2)..(523): Homolog of NCBI NO: 5453603 NR Description: chaperonin containing TCP1, subunit 2 (beta);
  misc_feature (2)..(523): Homolog of NCBI NO: 22654291 NR Description: T-complex protein 1, beta subunit (TCP-1-beta)
  misc_feature (2)..(523): Homolog of NCBI NO: 6671700 NR Description: chaperonin subunit 2 (beta) [Mus musculus]
  misc_feature (2)..(502): Homolog of NCBI NO: 21105454 NR Description: chaperonin-containing TCP-1 complex beta chain
  misc_feature (5)..(527): Homolog of NCBI NO: 19113929 NR Description: probable t-complex protein 1, beta subunit
  misc_feature (2)..(524): Homolog of NCBI NO: 17066722 NR Description: CCT chaperonin beta subunit [Physarum
  misc_feature (2)..(526): Homolog of NCBI NO: 18858175 NR Description: CG7033-PA [Drosophila melanogaster]
  misc_feature (6)..(527): Homolog of NCBI NO: 18313108 NR Description: thermosome (chaperonin) alpha subunit aerophilum] >gi|18160617|gb|AAL63957.1| thermosome (chaperonin)

SEQ ID NO: 98722 - protein, 507 aa, Arabidopsis thaliana; identical to SEQ ID NO: 29072
  peptide (1)..(507): Ceres Seq. ID no. 13601382
  misc_feature (10)..(500): Pfam Name: TCP-1/cpn60 chaperonin family Pfam Description: TCP-1/cpn60 chaperonin family
  misc_feature (1)..(507): Homolog of NCBI NO: 15242093 NR Description: chaperonin, putative [Arabidopsis thaliana] AT5g20890/F22D1_60 [Arabidopsis thaliana]
  misc_feature (1)..(503): Homolog of NCBI NO: 27503862 NR Description: Similar to chaperonin subunit 2 (beta) [Xenopus
  misc_feature (1)..(503): Homolog of NCBI NO: 5453603 NR Description: chaperonin containing TCP1, subunit 2 (beta);
  misc_feature (1)..(503): Homolog of NCBI NO: 22654291 NR Description: T-complex protein 1, beta subunit (TCP-1-beta)
  misc_feature (1)..(503): Homolog of NCBI NO: 6671700 NR Description: chaperonin subunit 2 (beta) [Mus musculus]
  misc_feature (1)..(482): Homolog of NCBI NO: 21105454 NR Description: chaperonin-containing TCP-1 complex beta chain
  misc_feature (1)..(507): Homolog of NCBI NO: 19113929 NR Description: probable t-complex protein 1, beta subunit
  misc_feature (1)..(504): Homolog of NCBI NO: 17066722 NR Description: CCT chaperonin beta subunit [Physarum
  misc_feature (1)..(506): Homolog of NCBI NO: 18858175 NR Description: CG7033-PA [Drosophila melanogaster]
  misc_feature (1)..(507): Homolog of NCBI NO: 18313108 NR Description: thermosome (chaperonin) alpha subunit aerophilum] >gi|18160617|gb|AAL63957.1| thermosome (chaperonin)

SEQ ID NO: 98723 - protein, 500 aa, Arabidopsis thaliana; identical to SEQ ID NO: 29073
  peptide (1)..(500): Ceres Seq. ID no. 13601383
  misc_feature (3)..(493): Pfam Name: TCP-1/cpn60 chaperonin family Pfam Description: TCP-1/cpn60 chaperonin family
  misc_feature (1)..(500): Homolog of NCBI NO: 15242093 NR Description: chaperonin, putative [Arabidopsis thaliana] AT5g20890/F22D1_60 [Arabidopsis thaliana]
  misc_feature (1)..(496): Homolog of NCBI NO: 27503862 NR Description: Similar to chaperonin subunit 2 (beta) [Xenopus
  misc_feature (1)..(496): Homolog of NCBI NO: 5453603 NR Description: chaperonin containing TCP1, subunit 2 (beta);
  misc_feature (1)..(496): Homolog of NCBI NO: 22654291 NR Description: T-complex protein 1, beta subunit (TCP-1-beta)
  misc_feature (1)..(496): Homolog of NCBI NO: 6671700 NR Description: chaperonin subunit 2 (beta) [Mus musculus]
  misc_feature (1)..(475): Homolog of NCBI NO: 21105454 NR Description: chaperonin-containing TCP-1 complex beta chain
  misc_feature (1)..(500): Homolog of NCBI NO: 19113929 NR Description: probable t-complex protein 1, beta subunit
  misc_feature (1)..(497): Homolog of NCBI NO: 17066722 NR Description: CCT chaperonin beta subunit [Physarum
  misc_feature (1)..(499): Homolog of NCBI NO: 18858175 NR Description: CG7033-PA [Drosophila melanogaster]
  misc_feature (1)..(500): Homolog of NCBI NO: 18313108 NR Description: thermosome (chaperonin) alpha subunit aerophilum] >gi|18160617|gb|AAL63957.1| thermosome (chaperonin)

SEQ ID NO: 98724 - DNA, 1774 bp, Arabidopsis thaliana
  misc_feature (1)..(1774): Ceres Seq. ID no. 13601391
  misc_feature: MA Experiment ID: 108461 Result: Up-regulated in Transcription
  misc_feature: MA Experiment 108461 PARAMETER Experiment Name: At_Germinating_Seeds_cDNA_P Parameter: Age (day) Value: 1 vs. 0
  misc_feature: MA Experiment 108461 PARAMETER Experiment Name: At_Germinating_Seeds_cDNA_P Parameter: Tissue Value: Germinating Seeds
  misc_feature: MA Experiment ID: 108594 Result: Up-regulated in Transcription
  misc_feature: MA Experiment 108594 PARAMETER Experiment Name: At_Ler-rhl_Root_cDNA_P Parameter: Plant Line Value: null
  misc_feature: MA Experiment ID: 20000179 Result: Up-regulated in Transcription
  misc_feature: MA Experiment 20000179 PARAMETER Experiment Name: At_Germinating_Seeds_P Parameter: Age (hr) Value: 6 vs. 0
  misc_feature: MA Experiment 20000179 PARAMETER Experiment Name: At_Germinating_Seeds_P Parameter: Tissue Value: Germinating Seeds
  misc_feature: MA Experiment ID: 20000180 Result: Up-regulated in Transcription
  misc_feature: MA Experiment 20000180 PARAMETER Experiment Name: At_Germinating_Seeds_P Parameter: Age (hr) Value: 24 vs. 0
  misc_feature: MA Experiment 20000180 PARAMETER Experiment Name: At_Germinating_Seeds_P Parameter: Tissue Value: Germinating Seeds
  misc_feature: MA Experiment ID: 20000184 Result: Down-regulated in Transcription
  misc_feature: MA Experiment 20000184 PARAMETER Experiment Name: At_Shoots__P Parameter: Age (day) Value: 7
  misc_feature: MA Experiment 20000184 PARAMETER Experiment Name: At_Shoots__P Parameter: Tissue Value: Shoots vs. Whole Plant
  misc_feature: MA Experiment ID: 20001451 Result: Up-regulated in Transcription
  misc_feature: MA Experiment 20001451 PARAMETER Experiment Name: At_Far-red-induction_P Parameter: Age (day) Value: 7
  misc_feature: MA Experiment 20001451 PARAMETER Experiment Name: At_Far-red-induction_P Parameter: Light Value: Far-red vs. White
  misc_feature: MA Experiment 20001451 PARAMETER Experiment Name: At_Far-red-induction_P Parameter: Organism Value: A. thaliana
  misc_feature: MA Experiment 20001451 PARAMETER Experiment Name: At_Far-red-induction_P Parameter: Plant Line Value: Columbia
  misc_feature: MA Experiment 20001451 PARAMETER Experiment Name: At_Far-red-induction_P Parameter: Timepoint (hr) Value: 24
  misc_feature: MA Experiment 20001451 PARAMETER Experiment Name: At_Far-red-induction_P Parameter: Tissue Value: Whole Plant
gattttctagagatttgtgacaaatgtcaaatgggttgttgaatcttcacgtgtcctcttttctcctcttatctcatctaatttgtttctttagttttgttcaactcaagcacatccgagaaagtcatagtctttgaacatcaaattgccttttgtttgtcaaatgacttaagttcttgatctttttcttgtagggtttttttctctgcactccacggtcatggcttcgtctacggctcagagcaagaagcagtttaagaggtctatgactaagaaatcacattcatggtggtgggatagtcacaattgtcccaagaactcaaaatggcttgcagagaatctagaaaagatggatgatcgagtgaaccacatgttaaaactgattgaagaagacgcagactcttttgcaaagaaagctcagatgtattttcagaaacgtcccgagttaatccagcttgtcgaggaattctaccgcatgtatcgcgcattggctgagcgttatgatcaagctagtggtgaacttcagaagaaccatacatctgagatccagtcacagagctctcttgagatatcatctcctaccaaagagaagttgagtcgccgtcaatctagccataaagaagaggaagattcatcgtctttgacagattctggttctgattctgatcattcctctgccaatgatgaagacggtgacgaggcattgatccgtagaatggctgaacttgagcttgagcttcaagagacgaaacagaagctccttctccagcaggaaagtgttgatggtgacaacaatgttgatctccttcacaaaattactacatatgagggagagcttaaagaagctaatgagaagatgcgaatgcacgaagacgagattgctaatctgaagaatcagcttcagagcttcatgtcttttgacacagaggatcatcttggtgctgaacaaaagagtgttgatttggataaagaggacactaaagaagatgcagtagctacaaaagtgctagccttggaggaagagctgagtatcgcgaaagagaagcttcagcactttgagaaagagacttattctctgaaaaatgagctcgagatcggcaaagccgctgaggagaagctgaagagcttacaacatgagctcgagttggctcagagagacgctgatacctacataaacaagctcaacgcagagaagaaagaagtcttgaagttgcaggagagattggcaatggtgaaaactagtttacaggatagagataacgagataagggcattgaaaactgcggtttcagacgctgaacagaagatattccccgaaaaagcacagatcaagggagaaatgtcgaagatgcttgaagaacgaagccaacttggagagcaactgagagagctggaatcacatataaggctgatcaaggaagagaaagctgaaacagaggagaagcttagaggaggaactgagaaaatcagcggaatgagagacgagagcaatgtgctaagagaagagattgggaagagagaagagaagataaaggaaacggaaaagcatatggaggagcttcacatggagcaagtgaggctgagaagacggtcaagtgagcttacggaagaagtggaaaggacgagagtgtctgcatcggaaatggctgagcagaaaagagaagctataagacagctttgtatgtctcttgaccattacagagatgggtacgacagactttggagagttgttgcaggacataagagtaagagagtagtggtcttatcaacttga

SEQ ID NO: 98725 - protein, 517 aa, Arabidopsis thaliana
  peptide (1)..(517): Ceres Seq. ID no. 13601392
  misc_feature (3)..(500): Pfam Name: Myosin tail Pfam Description: Myosin tail
  misc_feature (1)..(517): Homolog of NCBI NO: 28416683 NR Description: At2g30500 [Arabidopsis thaliana]
  misc_feature (4)..(517): Homolog of NCBI NO: 15224515 NR Description: expressed protein [Arabidopsis thaliana]
  misc_feature (132)..(511): Homolog of NCBI NO: 8777333 NR Description: contains similarity to unknown
  misc_feature (132)..(511): Homolog of NCBI NO: 30697046 NR Description: contains similarity to unknown protein
  misc_feature (10)..(479): Homolog of NCBI NO: 34896156 NR Description: P0701D05.33 [Oryza sativa (japonica >gi|13486675|dbj|BAB39912.1| contains EST to Arabidopsis thaliana chromosome 2, At2g30500~unknown protein
  misc_feature (7)..(502): Homolog of NCBI NO: 30697043 NR Description: contains similarity to unknown protein
  misc_feature (7)..(481): Homolog of NCBI NO: 8777333 NR Description: contains similarity to unknown
  misc_feature (7)..(481): Homolog of NCBI NO: 30697046 NR Description: contains similarity to unknown protein
  misc_feature (9)..(429): Homolog of NCBI NO: 34896152 NR Description: P0701D05.31 [Oryza sativa (japonica >gi|13486673|dbj|BAB39910.1| hypothetical protein~similar to thaliana chromosome 5, MCK7.19 [Oryza sativa (japonica sativa
  misc_feature (89)..(478): Homolog of NCBI NO: 15218702 NR Description: expressed protein [Arabidopsis thaliana]
MASSTAQSKKQFKRSMTKKSHSWWWDSHNCPKNSKWLAENLEKMDDRVNHMLKLIEEDADSFAKKAQMYFQKRPELIQLVEEFYRMYRALAERYDQASGELQKNHTSEIQSQSSLEISSPTKEKLSRRQSSHKEEEDSSSLTDSGSDSDHSSANDEDGDEALIRRMAELELELQETKQKLLLQQESVDGDNNVDLLHKITTYEGELKEANEKMRMHEDEIANLKNQLQSFMSFDTEDHLGAEQKSVDLDKEDTKEDAVATKVLALEEELSIAKEKLQHFEKETYSLKNELEIGKAAEEKLKSLQHELELAQRDADTYINKLNAEKKEVLKLQERLAMVKTSLQDRDNEIRALKTAVSDAEQKIFPEKAQIKGEMSKMLEERSQLGEQLRELESHIRLIKEEKAETEEKLRGGTEKISGMRDESNVLREEIGKREEKIKETEKHMEELHMEQVRLRRRSSELTEEVERTRVSASEMAEQKREAIRQLCMSLDHYRDGYDRLWRVVAGHKSKRVVVLST

SEQ ID NO: 98726 - protein, 502 aa, Arabidopsis thaliana; identical to SEQ ID NO: 70514
  peptide (1)..(502): Ceres Seq. ID no. 13601393
  misc_feature (1)..(485): Pfam Name: Myosin tail Pfam Description: Myosin tail
  misc_feature (1)..(502): Homolog of NCBI NO: 28416683 NR Description: At2g30500 [Arabidopsis thaliana]
  misc_feature (1)..(502): Homolog of NCBI NO: 15224515 NR Description: expressed protein [Arabidopsis thaliana]
  misc_feature (117)..(496): Homolog of NCBI NO: 8777333 NR Description: contains similarity to unknown
  misc_feature (117)..(496): Homolog of NCBI NO: 30697046 NR Description: contains similarity to unknown protein
  misc_feature (1)..(464): Homolog of NCBI NO: 34896156 NR Description: P0701D05.33 [Oryza sativa (japonica >gi|13486675|dbj|BAB39912.1| contains EST to Arabidopsis thaliana chromosome 2, At2g30500~unknown protein
  misc_feature (1)..(487): Homolog of NCBI NO: 30697043 NR Description: contains similarity to unknown protein
  misc_feature (1)..(466): Homolog of NCBI NO: 8777333 NR Description: contains similarity to unknown
  misc_feature (1)..(466): Homolog of NCBI NO: 30697046 NR Description: contains similarity to unknown protein
  misc_feature (1)..(414): Homolog of NCBI NO: 34896152 NR Description: P0701D05.31 [Oryza sativa (japonica >gi|13486673|dbj|BAB39910.1| hypothetical protein~similar to thaliana chromosome 5, MCK7.19 [Oryza sativa (japonica sativa
  misc_feature (74)..(463): Homolog of NCBI NO: 15218702 NR Description: expressed protein [Arabidopsis thaliana]

SEQ ID NO: 98727 - protein, 474 aa, Arabidopsis thaliana; identical to SEQ ID NO: 70515
  peptide (1)..(474): Ceres Seq. ID no. 13601394
  misc_feature (1)..(457): Pfam Name: Myosin tail Pfam Description: Myosin tail
  misc_feature (1)..(474): Homolog of NCBI NO: 28416683 NR Description: At2g30500 [Arabidopsis thaliana]
  misc_feature (1)..(474): Homolog of NCBI NO: 15224515 NR Description: expressed protein [Arabidopsis thaliana]
  misc_feature (89)..(468): Homolog of NCBI NO: 8777333 NR Description: contains similarity to unknown
  misc_feature (89)..(468): Homolog of NCBI NO: 30697046 NR Description: contains similarity to unknown protein
  misc_feature (1)..(436): Homolog of NCBI NO: 34896156 NR Description: P0701D05.33 [Oryza sativa (japonica >gi|13486675|dbj|BAB39912.1| contains EST to Arabidopsis thaliana chromosome 2, At2g30500~unknown protein
  misc_feature (1)..(459): Homolog of NCBI NO: 30697043 NR Description: contains similarity to unknown protein
  misc_feature (1)..(438): Homolog of NCBI NO: 8777333 NR Description: contains similarity to unknown
  misc_feature (1)..(438): Homolog of NCBI NO: 30697046 NR Description: contains similarity to unknown protein
  misc_feature (1)..(386): Homolog of NCBI NO: 34896152 NR Description: P0701D05.31 [Oryza sativa (japonica >gi|13486673|dbj|BAB39910.1| hypothetical protein~similar to thaliana chromosome 5, MCK7.19 [Oryza sativa (japonica sativa
  misc_feature (46)..(435): Homolog of NCBI NO: 15218702 NR Description: expressed protein [Arabidopsis thaliana]

SEQ ID NO: 98728 - DNA, 878 bp, Arabidopsis thaliana
  misc_feature (1)..(878): Ceres Seq. ID no. 13601399
  misc_feature: MA Experiment ID: 108461 Result: Up-regulated in Transcription
  misc_feature: MA Experiment 108461 PARAMETER Experiment Name: At_Germinating_Seeds_cDNA_P Parameter: Age (day) Value: 1 vs. 0
  misc_feature: MA Experiment 108461 PARAMETER Experiment Name: At_Germinating_Seeds_cDNA_P Parameter: Tissue Value: Germinating Seeds
  misc_feature: MA Experiment ID: 108463 Result: Up-regulated in Transcription
  misc_feature: MA Experiment 108463 PARAMETER Experiment Name: At_Germinating_Seeds_cDNA_P Parameter: Age (day) Value: 3 vs. 0
  misc_feature: MA Experiment 108463 PARAMETER Experiment Name: At_Germinating_Seeds_cDNA_P Parameter: Tissue Value: Germinating Seeds
  misc_feature: MA Experiment ID: 108464 Result: Up-regulated in Transcription
  misc_feature: MA Experiment 108464 PARAMETER Experiment Name: At_Germinating_Seeds_cDNA_P Parameter: Age (day) Value: 4 vs. 0
  misc_feature: MA Experiment 108464 PARAMETER Experiment Name: At_Germinating_Seeds_cDNA_P Parameter: Tissue Value: Germinating Seeds
  misc_feature: MA Experiment ID: 108473 Result: Up-regulated in Transcription
  misc_feature: MA Experiment 108473 PARAMETER Experiment Name: At_Drought_Flowers_cDNA_P Parameter: Timepoint (hr) Value: 7 d
  misc_feature: MA Experiment 108473 PARAMETER Experiment Name: At_Drought_Flowers_cDNA_P Parameter: Tissue Value: Flower
  misc_feature: MA Experiment 108473 PARAMETER Experiment Name: At_Drought_Flowers_cDNA_P Parameter: Treatment Value: Drought vs. No Drought
  misc_feature: MA Experiment ID: 108576 Result: Down-regulated in Transcription
  misc_feature: MA Experiment 108576 PARAMETER Experiment Name: At_42deg_Heat_cDNA_P Parameter: Temperature (deg C) Value: 42 vs. 22
  misc_feature: MA Experiment 108576 PARAMETER Experiment Name: At_42deg_Heat_cDNA_P Parameter: Timepoint (hr) Value: 1
  misc_feature: MA Experiment 108576 PARAMETER Experiment Name: At_42deg_Heat_cDNA_P Parameter: Tissue Value: Aerial
  misc_feature: MA Experiment ID: 108577 Result: Down-regulated in Transcription
  misc_feature: MA Experiment 108577 PARAMETER Experiment Name: At_42deg_Heat_cDNA_P Parameter: Temperature (deg C) Value: 42 vs. 22
  misc_feature: MA Experiment 108577 PARAMETER Experiment Name: At_42deg_Heat_cDNA_P Parameter: Timepoint (hr) Value: 6
  misc_feature: MA Experiment 108577 PARAMETER Experiment Name: At_42deg_Heat_cDNA_P Parameter: Tissue Value: Aerial
  misc_feature: MA Experiment ID: 108579 Result: Up-regulated in Transcription
  misc_feature: MA Experiment 108579 PARAMETER Experiment Name: At_4deg_Cold_cDNA_P Parameter: Temperature (deg C) Value: 4 vs. 22
  misc_feature: MA Experiment 108579 PARAMETER Experiment Name: At_4deg_Cold_cDNA_P Parameter: Timepoint (hr) Value: 6
  misc_feature: MA Experiment 108579 PARAMETER Experiment Name: At_4deg_Cold_cDNA_P Parameter: Tissue Value: Aerial
  misc_feature: MA Experiment ID: 108594 Result: Down-regulated in Transcription
  misc_feature: MA Experiment 108594 PARAMETER Experiment Name: At_Ler-rhl_Root_cDNA_P Parameter: Plant Line Value: null
  misc_feature: MA Experiment ID: 108595 Result: Down-regulated in Transcription
  misc_feature: MA Experiment 108595 PARAMETER Experiment Name: At_Ler-pi_Ovule_cDNA_P Parameter: Plant Line Value: null
  misc_feature: MA Experiment ID: 108607 Result: Up-regulated in Transcription
  misc_feature: MA Experiment 108607 PARAMETER Experiment Name: At_100uM_ABA_cDNA_P Parameter: Timepoint (hr) Value: 4
  misc_feature: MA Experiment 108607 PARAMETER Experiment Name: At_100uM_ABA_cDNA_P Parameter: Tissue Value: Aerial
  misc_feature: MA Experiment 108607 PARAMETER Experiment Name: At_100uM_ABA_cDNA_P Parameter: Treatment Value: 100uM ABA vs. No Treatment
  misc_feature: MA Experiment ID: 20000069 Result: Up-regulated in Transcription
  misc_feature: MA Experiment 20000069 PARAMETER Experiment Name: At_100uM_ABA_Mutants_cDNA_P Parameter: Plant Line Value: CS23
  misc_feature: MA Experiment 20000069 PARAMETER Experiment Name: At_100uM_ABA_Mutants_cDNA_P Parameter: Timepoint (hr) Value: 6
  misc_feature: MA Experiment 20000069 PARAMETER Experiment Name: At_100uM_ABA_Mutants_cDNA_P Parameter: Tissue Value: Aerial
  misc_feature: MA Experiment 20000069 PARAMETER Experiment Name: At_100uM_ABA_Mutants_cDNA_P Parameter: Treatment Value: 100uM ABA vs. No Treatment
  misc_feature: MA Experiment ID: 20000070 Result: Up-regulated in Transcription
  misc_feature: MA Experiment 20000070 PARAMETER Experiment Name: At_100uM_ABA_Mutants_cDNA_P Parameter: Plant Line Value: CS24
  misc_feature: MA Experiment 20000070 PARAMETER Experiment Name: At_100uM_ABA_Mutants_cDNA_P Parameter: Timepoint (hr) Value: 6
  misc_feature: MA Experiment 20000070 PARAMETER Experiment Name: At_100uM_ABA_Mutants_cDNA_P Parameter: Tissue Value: Aerial
  misc_feature: MA Experiment 20000070 PARAMETER Experiment Name: At_100uM_ABA_Mutants_cDNA_P Parameter: Treatment Value: 100uM ABA vs. No Treatment
  misc_feature: MA Experiment ID: 20000071 Result: Up-regulated in Transcription
  misc_feature: MA Experiment 20000071 PARAMETER Experiment Name: At_100uM_ABA_Mutants_cDNA_P Parameter: Plant Line Value: CS8104
  misc_feature: MA Experiment 20000071 PARAMETER Experiment Name: At_100uM_ABA_Mutants_cDNA_P Parameter: Timepoint (hr) Value: 6
  misc_feature: MA Experiment 20000071 PARAMETER Experiment Name: At_100uM_ABA_Mutants_cDNA_P Parameter: Tissue Value: Aerial
  misc_feature: MA Experiment 20000071 PARAMETER Experiment Name: At_100uM_ABA_Mutants_cDNA_P Parameter: Treatment Value: 100uM ABA vs. No Treatment
  misc_feature: MA Experiment ID: 20000072 Result: Up-regulated in Transcription
  misc_feature: MA Experiment 20000072 PARAMETER Experiment Name: At_100uM_ABA_Mutants_cDNA_P Parameter: Plant Line Value: CS8105
  misc_feature: MA Experiment 20000072 PARAMETER Experiment Name: At_100uM_ABA_Mutants_cDNA_P Parameter: Timepoint (hr) Value: 6
  misc_feature: MA Experiment 20000072 PARAMETER Experiment Name: At_100uM_ABA_Mutants_cDNA_P Parameter: Tissue Value: Aerial
  misc_feature: MA Experiment 20000072 PARAMETER Experiment Name: At_100uM_ABA_Mutants_cDNA_P Parameter: Treatment Value: 100uM ABA vs. No Treatment
  misc_feature: MA Experiment ID: 20000086 Result: Up-regulated in Transcription
  misc_feature: MA Experiment 20000086 PARAMETER Experiment Name: At_100uM_ABA_Mutants_cDNA_P Parameter: Plant Line Value: CS22
  misc_feature: MA Experiment 20000086 PARAMETER Experiment Name: At_100uM_ABA_Mutants_cDNA_P Parameter: Timepoint (hr) Value: 6
  misc_feature: MA Experiment 20000086 PARAMETER Experiment Name: At_100uM_ABA_Mutants_cDNA_P Parameter: Tissue Value: Aerial
  misc_feature: MA Experiment 20000086 PARAMETER Experiment Name: At_100uM_ABA_Mutants_cDNA_P Parameter: Treatment Value: 100uM ABA vs. No Treatment
  misc_feature: MA Experiment ID: 20000088 Result: Up-regulated in Transcription
  misc_feature: MA Experiment 20000088 PARAMETER Experiment Name: At_100uM_ABA_Mutants_cDNA_P Parameter: Plant Line Value: Landsberg
  misc_feature: MA Experiment 20000088 PARAMETER Experiment Name: At_100uM_ABA_Mutants_cDNA_P Parameter: Timepoint (hr) Value: 6
  misc_feature: MA Experiment 20000088 PARAMETER Experiment Name: At_100uM_ABA_Mutants_cDNA_P Parameter: Tissue Value: Aerial
  misc_feature: MA Experiment 20000088 PARAMETER Experiment Name: At_100uM_ABA_Mutants_cDNA_P Parameter: Treatment Value: 100uM ABA vs. No Treatment
  misc_feature: MA Experiment ID: 20000111 Result: Down-regulated in Transcription
  misc_feature: MA Experiment 20000111 PARAMETER Experiment Name: At_42deg_Heat_cDNA_P Parameter: Temperature (deg C) Value: 42 vs. 22
  misc_feature: MA Experiment 20000111 PARAMETER Experiment Name: At_42deg_Heat_cDNA_P Parameter: Timepoint (hr) Value: 6
  misc_feature: MA Experiment 20000111 PARAMETER Experiment Name: At_42deg_Heat_cDNA_P Parameter: Tissue Value: Aerial
  misc_feature: MA Experiment ID: 20000112 Result: Down-regulated in Transcription
  misc_feature: MA Experiment 20000112 PARAMETER Experiment Name: At_42deg_Heat_cDNA_P Parameter: Temperature (deg C) Value: 42 vs. 22
  misc_feature: MA Experiment 20000112 PARAMETER Experiment Name: At_42deg_Heat_cDNA_P Parameter: Timepoint (hr) Value: 2
  misc_feature: MA Experiment 20000112 PARAMETER Experiment Name: At_42deg_Heat_cDNA_P Parameter: Tissue Value: Aerial
  misc_feature: MA Experiment ID: 20000113 Result: Down-regulated in Transcription
  misc_feature: MA Experiment 20000113 PARAMETER Experiment Name: At_42deg_Heat_cDNA_P Parameter: Temperature (deg C) Value: 42 vs. 22
  misc_feature: MA Experiment 20000113 PARAMETER Experiment Name: At_42deg_Heat_cDNA_P Parameter: Timepoint (hr) Value: 8
  misc_feature: MA Experiment 20000113 PARAMETER Experiment Name: At_42deg_Heat_cDNA_P Parameter: Tissue Value: Aerial
  misc_feature: MA Experiment ID: 20000117 Result: Up-regulated in Transcription
  misc_feature: MA Experiment 20000117 PARAMETER Experiment Name: At_100uM_ABA_Mutants_cDNA_P Parameter: Plant Line Value: Columbia
  misc_feature: MA Experiment 20000117 PARAMETER Experiment Name: At_100uM_ABA_Mutants_cDNA_P Parameter: Timepoint (hr) Value: 6
  misc_feature: MA Experiment 20000117 PARAMETER Experiment Name: At_100uM_ABA_Mutants_cDNA_P Parameter: Tissue Value: Aerial
  misc_feature: MA Experiment 20000117 PARAMETER Experiment Name: At_100uM_ABA_Mutants_cDNA_P Parameter: Treatment Value: 100uM ABA vs. No Treatment
  misc_feature: MA Experiment ID: 20000144 Result: Down-regulated in Transcription
  misc_feature: MA Experiment 20000144 PARAMETER Experiment Name: At_42deg_Heat_cDNA_P Parameter: Temperature (deg C) Value: 42 vs. 22
  misc_feature: MA Experiment 20000144 PARAMETER Experiment Name: At_42deg_Heat_cDNA_P Parameter: Timepoint (hr) Value: 1
  misc_feature: MA Experiment 20000144 PARAMETER Experiment Name: At_42deg_Heat_cDNA_P Parameter: Tissue Value: Aerial
  misc_feature: MA Experiment ID: 20000173 Result: Down-regulated in Transcription
  misc_feature: MA Experiment 20000173 PARAMETER Experiment Name: At_42deg_Heat_P Parameter: Age (day) Value: 14
  misc_feature: MA Experiment 20000173 PARAMETER Experiment Name: At_42deg_Heat_P Parameter: Organism Value: A. thaliana
  misc_feature: MA Experiment 20000173 PARAMETER Experiment Name: At_42deg_Heat_P Parameter: Plant Line Value: WS
  misc_feature: MA Experiment 20000173 PARAMETER Experiment Name: At_42deg_Heat_P Parameter: Temperature (deg C) Value: 42 vs. 22
  misc_feature: MA Experiment 20000173 PARAMETER Experiment Name: At_42deg_Heat_P Parameter: Timepoint (hr) Value: 6
  misc_feature: MA Experiment 20000173 PARAMETER Experiment Name: At_42deg_Heat_P Parameter: Tissue Value: Aerial
  misc_feature: MA Experiment ID: 20000211 Result: Up-regulated in Transcription
  misc_feature: MA Experiment 20000211 PARAMETER Experiment Name: At_0.001percent_MeJA__P Parameter: Age (day) Value: 14
  misc_feature: MA Experiment 20000211 PARAMETER Experiment Name: At_0.001percent_MeJA__P Parameter: Organism Value: A. thaliana
  misc_feature: MA Experiment 20000211 PARAMETER Experiment Name: At_0.001percent_MeJA__P Parameter: Plant Line Value: WS
  misc_feature: MA Experiment 20000211 PARAMETER Experiment Name: At_0.001percent_MeJA__P Parameter: Timepoint (hr) Value: 1
  misc_feature: MA Experiment 20000211 PARAMETER Experiment Name: At_0.001percent_MeJA__P Parameter: Tissue Value: Aerial
  misc_feature: MA Experiment 20000211 PARAMETER Experiment Name: At_0.001percent_MeJA__P Parameter: Treatment Value: 0.001percent MeJA vs. No Treatment
  misc_feature: MA Experiment ID: 20000227 Result: Down-regulated in Transcription
  misc_feature: MA Experiment 20000227 PARAMETER Experiment Name: At_Root-Tips-vs-Tops_P Parameter: Tissue Value: Root Tips vs. Root Tops
  misc_feature: MA Experiment ID: 20000234 Result: Down-regulated in Transcription
  misc_feature: MA Experiment 20000234 PARAMETER Experiment Name: At_Siliques_P Parameter: Age (day) Value: 21
  misc_feature: MA Experiment 20000234 PARAMETER Experiment Name: At_Siliques_P Parameter: Organism Value: A. thaliana
  misc_feature: MA Experiment 20000234 PARAMETER Experiment Name: At_Siliques_P Parameter: Plant Line Value: WS
  misc_feature: MA Experiment 20000234 PARAMETER Experiment Name: At_Siliques_P Parameter: Tissue Value: Less Than 5mm Siliques vs. Whole Plant
  misc_feature: MA Experiment ID: 20000235 Result: Down-regulated in Transcription
  misc_feature: MA Experiment 20000235 PARAMETER Experiment Name: At_Siliques_P Parameter: Age (day) Value: 21
  misc_feature: MA Experiment 20000235 PARAMETER Experiment Name: At_Siliques_P Parameter: Organism Value: A. thaliana
  misc_feature: MA Experiment 20000235 PARAMETER Experiment Name: At_Siliques_P Parameter: Plant Line Value: WS
  misc_feature: MA Experiment 20000235 PARAMETER Experiment Name: At_Siliques_P Parameter: Tissue Value: 5-10mm Siliques vs. Whole Plant
  misc_feature: MA Experiment ID: 20000264 Result: Down-regulated in Transcription
  misc_feature: MA Experiment 20000264 PARAMETER Experiment Name: At_Open_Flower_P Parameter: Age (day) Value: 21
  misc_feature: MA Experiment 20000264 PARAMETER Experiment Name: At_Open_Flower_P Parameter: Plant Line Value: WS
  misc_feature: MA Experiment 20000264 PARAMETER Experiment Name: At_Open_Flower_P Parameter: Tissue Value: Open Flower vs. Whole Plant
  misc_feature: MA Experiment ID: 20000265 Result: Down-regulated in Transcription
  misc_feature: MA Experiment 20000265 PARAMETER Experiment Name: At_Open_Flower_P Parameter: Age (day) Value: 21
  misc_feature: MA Experiment 20000265 PARAMETER Experiment Name: At_Open_Flower_P Parameter: Plant Line Value: WS
  misc_feature: MA Experiment 20000265 PARAMETER Experiment Name: At_Open_Flower_P Parameter: Tissue Value: Closed Flower vs. Whole Plant
  misc_feature: MA Experiment ID: 20000286 Result: Down-regulated in Transcription
  misc_feature: MA Experiment 20000286 PARAMETER Experiment Name: At_Open_Flower_P Parameter: Age (day) Value: 21
  misc_feature: MA Experiment 20000286 PARAMETER Experiment Name: At_Open_Flower_P Parameter: Plant Line Value: WS
  misc_feature: MA Experiment 20000286 PARAMETER Experiment Name: At_Open_Flower_P Parameter: Tissue Value: Half Open vs. Whole Plant
  misc_feature: MA Experiment ID: 20000437 Result: Down-regulated in Transcription
  misc_feature: MA Experiment 20000437 PARAMETER Experiment Name: At_Drought_P Parameter: Age (day) Value: 8
  misc_feature: MA Experiment 20000437 PARAMETER Experiment Name: At_Drought_P Parameter: Organism Value: A. thaliana
  misc_feature: MA Experiment 20000437 PARAMETER Experiment Name: At_Drought_P Parameter: Plant Line Value: WS
  misc_feature: MA Experiment 20000437 PARAMETER Experiment Name: At_Drought_P Parameter: Timepoint (hr) Value: 24
  misc_feature: MA Experiment 20000437 PARAMETER Experiment Name: At_Drought_P Parameter: Tissue Value: Whole Plant
  misc_feature: MA Experiment 20000437 PARAMETER Experiment Name: At_Drought_P Parameter: Treatment Value: Drought vs. No Drought
  misc_feature: MA Experiment ID: 20000455 Result: Up-regulated in Transcription
  misc_feature: MA Experiment 20000455 PARAMETER Experiment Name: At_100uM_ABA_P Parameter: Age (day) Value: 16
  misc_feature: MA Experiment 20000455 PARAMETER Experiment Name: At_100uM_ABA_P Parameter: Organism Value: A. thaliana
  misc_feature: MA Experiment 20000455 PARAMETER Experiment Name: At_100uM_ABA_P Parameter: Plant Line Value: WS
  misc_feature: MA Experiment 20000455 PARAMETER Experiment Name: At_100uM_ABA_P Parameter: Timepoint (hr) Value: 48
  misc_feature: MA Experiment 20000455 PARAMETER Experiment Name: At_100uM_ABA_P Parameter: Tissue Value: Aerial
  misc_feature: MA Experiment 20000455 PARAMETER Experiment Name: At_100uM_ABA_P Parameter: Treatment Value: 100uM ABA vs. No Treatment
  misc_feature: MA Experiment ID: 20000496 Result: Down-regulated in Transcription
  misc_feature: MA Experiment 20000496 PARAMETER Experiment Name: At_Guard_Cells_P Parameter: Harvest Date Value: 7/19/2002
  misc_feature: MA Experiment 20000496 PARAMETER Experiment Name: At_Guard_Cells_P Parameter: Organism Value: Canola
  misc_feature: MA Experiment 20000496 PARAMETER Experiment Name: At_Guard_Cells_P Parameter: Tissue Value: Guard Cells vs. Leaves
  misc_feature: MA Experiment ID: 20000794 Result: Down-regulated in Transcription
  misc_feature: MA Experiment 20000794 PARAMETER Experiment Name: At_Petals_P Parameter: Age (day) Value: 23-25 days
  misc_feature: MA Experiment 20000794 PARAMETER Experiment Name: At_Petals_P Parameter: Plant Line Value: WS
  misc_feature: MA Experiment 20000794 PARAMETER Experiment Name: At_Petals_P Parameter: Tissue Value: Petals vs. Whole plant
  misc_feature: MA Experiment ID: 20001247 Result: Down-regulated in Transcription
  misc_feature: MA Experiment 20001247 PARAMETER Experiment Name: At_Far-red-induction_P Parameter: Age (day) Value: 7
  misc_feature: MA Experiment 20001247 PARAMETER Experiment Name: At_Far-red-induction_P Parameter: Light Value: Far-red vs. White
  misc_feature: MA Experiment 20001247 PARAMETER Experiment Name: At_Far-red-induction_P Parameter: Organism Value: A. thaliana
  misc_feature: MA Experiment 20001247 PARAMETER Experiment Name: At_Far-red-induction_P Parameter: Plant Line Value: Columbia
  misc_feature: MA Experiment 20001247 PARAMETER Experiment Name: At_Far-red-induction_P Parameter: Timepoint (hr) Value: 1
  misc_feature: MA Experiment 20001247 PARAMETER Experiment Name: At_Far-red-induction_P Parameter: Tissue Value: Whole Plant
  misc_feature: MA Experiment ID: 20001248 Result: Down-regulated in Transcription
  misc_feature: MA Experiment 20001248 PARAMETER Experiment Name: At_Far-red-induction_P Parameter: Age (day) Value: 7
  misc_feature: MA Experiment 20001248 PARAMETER Experiment Name: At_Far-red-induction_P Parameter: Light Value: Far-red vs. White
  misc_feature: MA Experiment 20001248 PARAMETER Experiment Name: At_Far-red-induction_P Parameter: Organism Value: A. thaliana
  misc_feature: MA Experiment 20001248 PARAMETER Experiment Name: At_Far-red-induction_P Parameter: Plant Line Value: Columbia
  misc_feature: MA Experiment 20001248 PARAMETER Experiment Name: At_Far-red-induction_P Parameter: Timepoint (hr) Value: 4
  misc_feature: MA Experiment 20001248 PARAMETER Experiment Name: At_Far-red-induction_P Parameter: Tissue Value: Whole Plant
  misc_feature: MA Experiment ID: 20001450 Result: Down-regulated in Transcription
  misc_feature: MA Experiment 20001450 PARAMETER Experiment Name: At_Far-red-induction_P Parameter: Age (day) Value: 7
  misc_feature: MA Experiment 20001450 PARAMETER Experiment Name: At_Far-red-induction_P Parameter: Light Value: Far-red vs. White
  misc_feature: MA Experiment 20001450 PARAMETER Experiment Name: At_Far-red-induction_P Parameter: Organism Value: A. thaliana
  misc_feature: MA Experiment 20001450 PARAMETER Experiment Name: At_Far-red-induction_P Parameter: Plant Line Value: Columbia
  misc_feature: MA Experiment 20001450 PARAMETER Experiment Name: At_Far-red-induction_P Parameter: Timepoint (hr) Value: 8
  misc_feature: MA Experiment 20001450 PARAMETER Experiment Name: At_Far-red-induction_P Parameter: Tissue Value: Whole Plant
  misc_feature: MA Experiment ID: 20001451 Result: Down-regulated in Transcription
  misc_feature: MA Experiment 20001451 PARAMETER Experiment Name: At_Far-red-induction_P Parameter: Age (day) Value: 7
  misc_feature: MA Experiment 20001451 PARAMETER Experiment Name: At_Far-red-induction_P Parameter: Light Value: Far-red vs. White
  misc_feature: MA Experiment 20001451 PARAMETER Experiment Name: At_Far-red-induction_P Parameter: Organism Value: A. thaliana
  misc_feature: MA Experiment 20001451 PARAMETER Experiment Name: At_Far-red-induction_P Parameter: Plant Line Value: Columbia
  misc_feature: MA Experiment 20001451 PARAMETER Experiment Name: At_Far-red-induction_P Parameter: Timepoint (hr) Value: 24
  misc_feature: MA Experiment 20001451 PARAMETER Experiment Name: At_Far-red-induction_P Parameter: Tissue Value: Whole Plant
  misc_feature: MA Experiment ID: 20001555 Result: Up-regulated in Transcription
  misc_feature: MA Experiment 20001555 PARAMETER Experiment Name: At_Drought_Soil_Dry_P Parameter: Age (day) Value: 24
  misc_feature: MA Experiment 20001555 PARAMETER Experiment Name: At_Drought_Soil_Dry_P Parameter: Organism Value: A. thaliana
  misc_feature: MA Experiment 20001555 PARAMETER Experiment Name: At_Drought_Soil_Dry_P Parameter: Plant Line Value: WS
  misc_feature: MA Experiment 20001555 PARAMETER Experiment Name: At_Drought_Soil_Dry_P Parameter: Post Timepoint (hr) Value: None
  misc_feature: MA Experiment 20001555 PARAMETER Experiment Name: At_Drought_Soil_Dry_P Parameter: Post-Treatment Value: None
  misc_feature: MA Experiment 20001555 PARAMETER Experiment Name: At_Drought_Soil_Dry_P Parameter: Timepoint (day) Value: 10
  misc_feature: MA Experiment 20001555 PARAMETER Experiment Name: At_Drought_Soil_Dry_P Parameter: Treatment Value: Drought vs. No Drought
  misc_feature: MA Experiment ID: 20001557 Result: Down-regulated in Transcription
  misc_feature: MA Experiment 20001557 PARAMETER Experiment Name: At_Drought_Soil_Dry_P Parameter: Age (day) Value: 27
  misc_feature: MA Experiment 20001557 PARAMETER Experiment Name: At_Drought_Soil_Dry_P Parameter: Organism Value: A. thaliana
  misc_feature: MA Experiment 20001557 PARAMETER Experiment Name: At_Drought_Soil_Dry_P Parameter: Plant Line Value: WS
  misc_feature: MA Experiment 20001557 PARAMETER Experiment Name: At_Drought_Soil_Dry_P Parameter: Post Timepoint (hr) Value: 3
  misc_feature: MA Experiment 20001557 PARAMETER Experiment Name: At_Drought_Soil_Dry_P Parameter: Post-Treatment Value: Re-Water vs. No Drought
  misc_feature: MA Experiment 20001557 PARAMETER Experiment Name: At_Drought_Soil_Dry_P Parameter: Timepoint (day) Value: 13
  misc_feature: MA Experiment 20001557 PARAMETER Experiment Name: At_Drought_Soil_Dry_P Parameter: Treatment Value: Drought vs. No Drought
  misc_feature: MA Experiment ID: 20001757 Result: Up-regulated in Transcription
  misc_feature: MA Experiment 20001757 PARAMETER Experiment Name: At_50mM_NH4NO3_L-to-H_P Parameter: Timepoint (hr) Value: 6
  misc_feature: MA Experiment 20001757 PARAMETER Experiment Name: At_50mM_NH4NO3_L-to-H_P Parameter: Tissue Value: Leaf
  misc_feature: MA Experiment 20001757 PARAMETER Experiment Name: At_50mM_NH4NO3_L-to-H_P Parameter: Treatment Value: 50mM NH4NO3 vs 100mM Mannitol
  misc_feature: MA Experiment ID: 20001905 Result: Down-regulated in Transcription
  misc_feature: MA Experiment 20001905 PARAMETER Experiment Name: At_Drought_Reproduction_P Parameter: Age (day) Value: 40
  misc_feature: MA Experiment 20001905 PARAMETER Experiment Name: At_Drought_Reproduction_P Parameter: Organism Value: A. thaliana
  misc_feature: MA Experiment 20001905 PARAMETER Experiment Name: At_Drought_Reproduction_P Parameter: Plant Line Value: WS
  misc_feature: MA Experiment 20001905 PARAMETER Experiment Name: At_Drought_Reproduction_P Parameter: Timepoint (day) Value: 10
  misc_feature: MA Experiment 20001905 PARAMETER Experiment Name: At_Drought_Reproduction_P Parameter: Tissue Value: Rosettes
  misc_feature: MA Experiment 20001905 PARAMETER Experiment Name: At_Drought_Reproduction_P Parameter: Treatment Value: Drought vs. No Drought
  misc_feature: MA Experiment ID: 20001911 Result: Up-regulated in Transcription
  misc_feature: MA Experiment 20001911 PARAMETER Experiment Name: At_Drought_Reproduction_P Parameter: Age (day) Value: 40
  misc_feature: MA Experiment 20001911 PARAMETER Experiment Name: At_Drought_Reproduction_P Parameter: Organism Value: A. thaliana
  misc_feature: MA Experiment 20001911 PARAMETER Experiment Name: At_Drought_Reproduction_P Parameter: Plant Line Value: WS
  misc_feature: MA Experiment 20001911 PARAMETER Experiment Name: At_Drought_Reproduction_P Parameter: Timepoint (day) Value: 10
  misc_feature: MA Experiment 20001911 PARAMETER Experiment Name: At_Drought_Reproduction_P Parameter: Tissue Value: Flowers
  misc_feature: MA Experiment 20001911 PARAMETER Experiment Name: At_Drought_Reproduction_P Parameter: Treatment Value: Drought vs. No Drought
cactcaacaaagcttaaccataaactgtgagtaaaaaagagaagaaagaaaaatggtgctaaaggtgtacggacctcactttgcttcaccaaagagagctttggtcacactgatcgagaagggcgttgccttcgagaccatccccgtcgatctcatgaaaggagaacacaagcagcctgcttatctcgctctacagccttttggtactgttcctgctgttgttgacggtgactacaaaatcttcgagtcccgtgcggtgatgaggtacgtagctgagaagtacaggtcacaaggacctgatcttttggggaaaaccgttgaagacagaggtcaagttgaacaatggcttgatgtggaagcgaccacttaccacccaccgctattgaacttaacgcttcacataatgttcgcatcagtcatgggattcccatctgatgagaagctgatcaaggagagtgaagagaagcttgcgggtgttcttgatgtctacgaggcacatctctcaaagagcaagtacttggccggtgacttcgtgagcttggctgatttggctcacctcccgttcactgattacttggttggtccgattgggaaagcttacatgatcaaagataggaaacacgtgagcgcgtggtgggatgatattagcagccgtcctgcgtggaaggagactgttgccaagtattcattcccagcttaagatgtgttcatcttcttggtgatgtggtttgtgttttatgagaggtttaataaaagtggaactaaatgtacctcttaatgtaatgttgccacctctgtgttctctttccttttgtagtttaataagtatctttatggctttgtgaggctttcaattttaaggaaatgatcttttcccc

SEQ ID NO: 98729 - protein, 215 aa, Arabidopsis thaliana; identical to SEQ ID NO: 21525
  peptide (1)..(215): Ceres Seq. ID no. 13601400
  misc_feature (1)..(215): Homolog of NCBI NO: 15224581 NR Description: glutathione transferase, putative [Arabidopsis
  misc_feature (1)..(215): Homolog of NCBI NO: 2462929 NR Description: glutathione transferase [Arabidopsis thaliana]
  misc_feature (1)..(214): Homolog of NCBI NO: 15224582 NR Description: glutathione transferase, putative [Arabidopsis

SEQ ID NO: 98730 - protein, 181 aa, Arabidopsis thaliana; identical to SEQ ID NO: 21526
  peptide (1)..(181): Ceres Seq. ID no. 13601401
  misc_feature (1)..(181): Homolog of NCBI NO: 15224581 NR Description: glutathione transferase, putative [Arabidopsis
  misc_feature (1)..(181): Homolog of NCBI NO: 2462929 NR Description: glutathione transferase [Arabidopsis thaliana]
  misc_feature (1)..(180): Homolog of NCBI NO: 15224582 NR Description: glutathione transferase, putative [Arabidopsis

SEQ ID NO: 98731 - protein, 146 aa, Arabidopsis thaliana; identical to SEQ ID NO: 21527
  peptide (1)..(146): Ceres Seq. ID no. 13601402
  misc_feature (1)..(146): Homolog of NCBI NO: 15224581 NR Description: glutathione transferase, putative [Arabidopsis
  misc_feature (1)..(146): Homolog of NCBI NO: 2462929 NR Description: glutathione transferase [Arabidopsis thaliana]
  misc_feature (1)..(145): Homolog of NCBI NO: 15224582 NR Description: glutathione transferase, putative [Arabidopsis

SEQ ID NO: 98732 - DNA, 1182 bp, Arabidopsis thaliana
  misc_feature (1)..(1182): Ceres Seq. ID no. 13601410
  misc_feature: MA Experiment ID: 108435 Result: Down-regulated in Transcription
  misc_feature: MA Experiment 108435 PARAMETER Experiment Name: At_stm_Mutants_cDNA_P Parameter: Plant Line Value: wt Landsburg vs stm
  misc_feature: MA Experiment 108435 PARAMETER Experiment Name: At_stm_Mutants_cDNA_P Parameter: Tissue Value: Shoot Apical Meristem Region
  misc_feature: MA Experiment ID: 108461 Result: Up-regulated in Transcription
  misc_feature: MA Experiment 108461 PARAMETER Experiment Name: At_Germinating_Seeds_cDNA_P Parameter: Age (day) Value: 1 vs. 0
  misc_feature: MA Experiment 108461 PARAMETER Experiment Name: At_Germinating_Seeds_cDNA_P Parameter: Tissue Value: Germinating Seeds
  misc_feature: MA Experiment ID: 108462 Result: Up-regulated in Transcription
  misc_feature: MA Experiment 108462 PARAMETER Experiment Name: At_Germinating_Seeds_cDNA_P Parameter: Age (day) Value: 2 vs. 0
  misc_feature: MA Experiment 108462 PARAMETER Experiment Name: At_Germinating_Seeds_cDNA_P Parameter: Tissue Value: Germinating Seeds
  misc_feature: MA Experiment ID: 108463 Result: Up-regulated in Transcription
  misc_feature: MA Experiment 108463 PARAMETER Experiment Name: At_Germinating_Seeds_cDNA_P Parameter: Age (day) Value: 3 vs. 0
  misc_feature: MA Experiment 108463 PARAMETER Experiment Name: At_Germinating_Seeds_cDNA_P Parameter: Tissue Value: Germinating Seeds
  misc_feature: MA Experiment ID: 108464 Result: Up-regulated in Transcription
  misc_feature: MA Experiment 108464 PARAMETER Experiment Name: At_Germinating_Seeds_cDNA_P Parameter: Age (day) Value: 4 vs. 0
  misc_feature: MA Experiment 108464 PARAMETER Experiment Name: At_Germinating_Seeds_cDNA_P Parameter: Tissue Value: Germinating Seeds
  misc_feature: MA Experiment ID: 108585 Result: Down-regulated in Transcription
  misc_feature: MA Experiment 108585 PARAMETER Experiment Name: At_5mM_NaNP_cDNA_P Parameter: Timepoint (hr) Value: 6
  misc_feature: MA Experiment 108585 PARAMETER Experiment Name: At_5mM_NaNP_cDNA_P Parameter: Tissue Value: Aerial
  misc_feature: MA Experiment 108585 PARAMETER Experiment Name: At_5mM_NaNP_cDNA_P Parameter: Treatment Value: null
  misc_feature: MA Experiment ID: 108595 Result: Down-regulated in Transcription
  misc_feature: MA Experiment 108595 PARAMETER Experiment Name: At_Ler-pi_Ovule_cDNA_P Parameter: Plant Line Value: null
  misc_feature: MA Experiment ID: 108668 Result: Down-regulated in Transcription
  misc_feature: MA Experiment 108668 PARAMETER Experiment Name: At_2mM_SA_cDNA_P Parameter: Plant Line Value: WS
  misc_feature: MA Experiment 108668 PARAMETER Experiment Name: At_2mM_SA_cDNA_P Parameter: Timepoint (hr) Value: 6
  misc_feature: MA Experiment 108668 PARAMETER Experiment Name: At_2mM_SA_cDNA_P Parameter: Treatment Value: 2mM SA vs. No Treatment
  misc_feature: MA Experiment ID: 20000069 Result: Up-regulated in Transcription
  misc_feature: MA Experiment 20000069 PARAMETER Experiment Name: At_100uM_ABA_Mutants_cDNA_P Parameter: Plant Line Value: CS23
  misc_feature: MA Experiment 20000069 PARAMETER Experiment Name: At_100uM_ABA_Mutants_cDNA_P Parameter: Timepoint (hr) Value: 6
  misc_feature: MA Experiment 20000069 PARAMETER Experiment Name: At_100uM_ABA_Mutants_cDNA_P Parameter: Tissue Value: Aerial
  misc_feature: MA Experiment 20000069 PARAMETER Experiment Name: At_100uM_ABA_Mutants_cDNA_P Parameter: Treatment Value: 100uM ABA vs. No Treatment
  misc_feature: MA Experiment ID: 20000071 Result: Up-regulated in Transcription
  misc_feature: MA Experiment 20000071 PARAMETER Experiment Name: At_100uM_ABA_Mutants_cDNA_P Parameter: Plant Line Value: CS8104
  misc_feature: MA Experiment 20000071 PARAMETER Experiment Name: At_100uM_ABA_Mutants_cDNA_P Parameter: Timepoint (hr) Value: 6
  misc_feature: MA Experiment 20000071 PARAMETER Experiment Name: At_100uM_ABA_Mutants_cDNA_P Parameter: Tissue Value: Aerial
  misc_feature: MA Experiment 20000071 PARAMETER Experiment Name: At_100uM_ABA_Mutants_cDNA_P Parameter: Treatment Value: 100uM ABA vs. No Treatment
  misc_feature: MA Experiment ID: 20000088 Result: Up-regulated in Transcription
  misc_feature: MA Experiment 20000088 PARAMETER Experiment Name: At_100uM_ABA_Mutants_cDNA_P Parameter: Plant Line Value: Landsberg
  misc_feature: MA Experiment 20000088 PARAMETER Experiment Name: At_100uM_ABA_Mutants_cDNA_P Parameter: Timepoint (hr) Value: 6
  misc_feature: MA Experiment 20000088 PARAMETER Experiment Name: At_100uM_ABA_Mutants_cDNA_P Parameter: Tissue Value: Aerial
  misc_feature: MA Experiment 20000088 PARAMETER Experiment Name: At_100uM_ABA_Mutants_cDNA_P Parameter: Treatment Value: 100uM ABA vs. No Treatment
  misc_feature: MA Experiment ID: 20000111 Result: Down-regulated in Transcription
  misc_feature: MA Experiment 20000111 PARAMETER Experiment Name: At_42deg_Heat_cDNA_P Parameter: Temperature (deg C) Value: 42 vs. 22
  misc_feature: MA Experiment 20000111 PARAMETER Experiment Name: At_42deg_Heat_cDNA_P Parameter: Timepoint (hr) Value: 6
  misc_feature: MA Experiment 20000111 PARAMETER Experiment Name: At_42deg_Heat_cDNA_P Parameter: Tissue Value: Aerial
  misc_feature: MA Experiment ID: 20000113 Result: Down-regulated in Transcription
  misc_feature: MA Experiment 20000113 PARAMETER Experiment Name: At_42deg_Heat_cDNA_P Parameter: Temperature (deg C) Value: 42 vs. 22
  misc_feature: MA Experiment 20000113 PARAMETER Experiment Name: At_42deg_Heat_cDNA_P Parameter: Timepoint (hr) Value: 8
  misc_feature: MA Experiment 20000113 PARAMETER Experiment Name: At_42deg_Heat_cDNA_P Parameter: Tissue Value: Aerial
  misc_feature: MA Experiment ID: 20000117 Result: Up-regulated in Transcription
  misc_feature: MA Experiment 20000117 PARAMETER Experiment Name: At_100uM_ABA_Mutants_cDNA_P Parameter: Plant Line Value: Columbia
  misc_feature: MA Experiment 20000117 PARAMETER Experiment Name: At_100uM_ABA_Mutants_cDNA_P Parameter: Timepoint (hr) Value: 6
  misc_feature: MA Experiment 20000117 PARAMETER Experiment Name: At_100uM_ABA_Mutants_cDNA_P Parameter: Tissue Value: Aerial
  misc_feature: MA Experiment 20000117 PARAMETER Experiment Name: At_100uM_ABA_Mutants_cDNA_P Parameter: Treatment Value: 100uM ABA vs. No Treatment
  misc_feature: MA Experiment ID: 20000173 Result: Down-regulated in Transcription
  misc_feature: MA Experiment 20000173 PARAMETER Experiment Name: At_42deg_Heat_P Parameter: Age (day) Value: 14
  misc_feature: MA Experiment 20000173 PARAMETER Experiment Name: At_42deg_Heat_P Parameter: Organism Value: A. thaliana
  misc_feature: MA Experiment 20000173 PARAMETER Experiment Name: At_42deg_Heat_P Parameter: Plant Line Value: WS
  misc_feature: MA Experiment 20000173 PARAMETER Experiment Name: At_42deg_Heat_P Parameter: Temperature (deg C) Value: 42 vs. 22
  misc_feature: MA Experiment 20000173 PARAMETER Experiment Name: At_42deg_Heat_P Parameter: Timepoint (hr) Value: 6
  misc_feature: MA Experiment 20000173 PARAMETER Experiment Name: At_42deg_Heat_P Parameter: Tissue Value: Aerial
  misc_feature: MA Experiment ID: 20000180 Result: Up-regulated in Transcription
  misc_feature: MA Experiment 20000180 PARAMETER Experiment Name: At_Germinating_Seeds_P Parameter: Age (hr) Value: 24 vs. 0
  misc_feature: MA Experiment 20000180 PARAMETER Experiment Name: At_Germinating_Seeds_P Parameter: Tissue Value: Germinating Seeds
  misc_feature: MA Experiment ID: 20000182 Result: Down-regulated in Transcription
  misc_feature: MA Experiment 20000182 PARAMETER Experiment Name: At_2mM_SA_P Parameter: Age (day) Value: 14
  misc_feature: MA Experiment 20000182 PARAMETER Experiment Name: At_2mM_SA_P Parameter: Organism Value: A. thaliana
  misc_feature: MA Experiment 20000182 PARAMETER Experiment Name: At_2mM_SA_P Parameter: Plant Line Value: WS
  misc_feature: MA Experiment 20000182 PARAMETER Experiment Name: At_2mM_SA_P Parameter: Timepoint (hr) Value: 6
  misc_feature: MA Experiment 20000182 PARAMETER Experiment Name: At_2mM_SA_P Parameter: Tissue Value: Aerial
  misc_feature: MA Experiment 20000182 PARAMETER Experiment Name: At_2mM_SA_P Parameter: Treatment Value: 2mM SA vs. No Treatment
  misc_feature: MA Experiment ID: 20000184 Result: Down-regulated in Transcription
  misc_feature: MA Experiment 20000184 PARAMETER Experiment Name: At_Shoots__P Parameter: Age (day) Value: 7
  misc_feature: MA Experiment 20000184 PARAMETER Experiment Name: At_Shoots__P Parameter: Tissue Value: Shoots vs. Whole Plant
  misc_feature: MA Experiment ID: 20000185 Result: Down-regulated in Transcription
  misc_feature: MA Experiment 20000185 PARAMETER Experiment Name: At_Roots__P Parameter: Age (day) Value: 7 vs. 21
  misc_feature: MA Experiment 20000185 PARAMETER Experiment Name: At_Roots__P Parameter: Organism Value: A. thaliana
  misc_feature: MA Experiment 20000185 PARAMETER Experiment Name: At_Roots__P Parameter: Tissue Value: Roots vs. Whole Plant
  misc_feature: MA Experiment ID: 20000224 Result: Up-regulated in Transcription
  misc_feature: MA Experiment ID: 20000439 Result: Down-regulated in Transcription
  misc_feature: MA Experiment 20000439 PARAMETER Experiment Name: At_Roots__P Parameter: Age (day) Value: 14 vs. 21
  misc_feature: MA Experiment 20000439 PARAMETER Experiment Name: At_Roots__P Parameter: Organism Value: A. thaliana
  misc_feature: MA Experiment 20000439 PARAMETER Experiment Name: At_Roots__P Parameter: Tissue Value: Roots vs. Whole Plant
  misc_feature: MA Experiment ID: 20000495 Result: Down-regulated in Transcription
  misc_feature: MA Experiment 20000495 PARAMETER Experiment Name: At_Guard_Cells_P Parameter: Harvest Date Value: 8/2/2002
  misc_feature: MA Experiment 20000495 PARAMETER Experiment Name: At_Guard_Cells_P Parameter: Organism Value: A. thaliana
  misc_feature: MA Experiment 20000495 PARAMETER Experiment Name: At_Guard_Cells_P Parameter: Tissue Value: Guard Cells vs. Leaves
  misc_feature: MA Experiment ID: 20001450 Result: Down-regulated in Transcription
  misc_feature: MA Experiment 20001450 PARAMETER Experiment Name: At_Far-red-induction_P Parameter: Age (day) Value: 7
  misc_feature: MA Experiment 20001450 PARAMETER Experiment Name: At_Far-red-induction_P Parameter: Light Value: Far-red vs. White
  misc_feature: MA Experiment 20001450 PARAMETER Experiment Name: At_Far-red-induction_P Parameter: Organism Value: A. thaliana
  misc_feature: MA Experiment 20001450 PARAMETER Experiment Name: At_Far-red-induction_P Parameter: Plant Line Value: Columbia
  misc_feature: MA Experiment 20001450 PARAMETER Experiment Name: At_Far-red-induction_P Parameter: Timepoint (hr) Value: 8
  misc_feature: MA Experiment 20001450 PARAMETER Experiment Name: At_Far-red-induction_P Parameter: Tissue Value: Whole Plant
  misc_feature: MA Experiment ID: 20001451 Result: Down-regulated in Transcription
  misc_feature: MA Experiment 20001451 PARAMETER Experiment Name: At_Far-red-induction_P Parameter: Age (day) Value: 7
  misc_feature: MA Experiment 20001451 PARAMETER Experiment Name: At_Far-red-induction_P Parameter: Light Value: Far-red vs. White
  misc_feature: MA Experiment 20001451 PARAMETER Experiment Name: At_Far-red-induction_P Parameter: Organism Value: A. thaliana
  misc_feature: MA Experiment 20001451 PARAMETER Experiment Name: At_Far-red-induction_P Parameter: Plant Line Value: Columbia
  misc_feature: MA Experiment 20001451 PARAMETER Experiment Name: At_Far-red-induction_P Parameter: Timepoint (hr) Value: 24
  misc_feature: MA Experiment 20001451 PARAMETER Experiment Name: At_Far-red-induction_P Parameter: Tissue Value: Whole Plant
  misc_feature: MA Experiment ID: 20001557 Result: Down-regulated in Transcription
  misc_feature: MA Experiment 20001557 PARAMETER Experiment Name: At_Drought_Soil_Dry_P Parameter: Age (day) Value: 27
  misc_feature: MA Experiment 20001557 PARAMETER Experiment Name: At_Drought_Soil_Dry_P Parameter: Organism Value: A. thaliana
  misc_feature: MA Experiment 20001557 PARAMETER Experiment Name: At_Drought_Soil_Dry_P Parameter: Plant Line Value: WS
  misc_feature: MA Experiment 20001557 PARAMETER Experiment Name: At_Drought_Soil_Dry_P Parameter: Post Timepoint (hr) Value: 3
  misc_feature: MA Experiment 20001557 PARAMETER Experiment Name: At_Drought_Soil_Dry_P Parameter: Post-Treatment Value: Re-Water vs. No Drought
  misc_feature: MA Experiment 20001557 PARAMETER Experiment Name: At_Drought_Soil_Dry_P Parameter: Timepoint (day) Value: 13
  misc_feature: MA Experiment 20001557 PARAMETER Experiment Name: At_Drought_Soil_Dry_P Parameter: Treatment Value: Drought vs. No Drought
  misc_feature: MA Experiment ID: 20001558 Result: Down-regulated in Transcription
  misc_feature: MA Experiment 20001558 PARAMETER Experiment Name: At_Drought_Soil_Dry_P Parameter: Age (day) Value: 27
  misc_feature: MA Experiment 20001558 PARAMETER Experiment Name: At_Drought_Soil_Dry_P Parameter: Organism Value: A. thaliana
  misc_feature: MA Experiment 20001558 PARAMETER Experiment Name: At_Drought_Soil_Dry_P Parameter: Plant Line Value: WS
  misc_feature: MA Experiment 20001558 PARAMETER Experiment Name: At_Drought_Soil_Dry_P Parameter: Post Timepoint (hr) Value: 6
  misc_feature: MA Experiment 20001558 PARAMETER Experiment Name: At_Drought_Soil_Dry_P Parameter: Post-Treatment Value: Re-Water vs. No Drought
  misc_feature: MA Experiment 20001558 PARAMETER Experiment Name: At_Drought_Soil_Dry_P Parameter: Timepoint (day) Value: 13
  misc_feature: MA Experiment 20001558 PARAMETER Experiment Name: At_Drought_Soil_Dry_P Parameter: Treatment Value: Drought vs. No Drought
  misc_feature: MA Experiment ID: 20001560 Result: Down-regulated in Transcription
  misc_feature: MA Experiment 20001560 PARAMETER Experiment Name: At_Drought_Soil_Dry_P Parameter: Age (day) Value: 28
  misc_feature: MA Experiment 20001560 PARAMETER Experiment Name: At_Drought_Soil_Dry_P Parameter: Organism Value: A. thaliana
  misc_feature: MA Experiment 20001560 PARAMETER Experiment Name: At_Drought_Soil_Dry_P Parameter: Plant Line Value: WS
  misc_feature: MA Experiment 20001560 PARAMETER Experiment Name: At_Drought_Soil_Dry_P Parameter: Post Timepoint (hr) Value: None
  misc_feature: MA Experiment 20001560 PARAMETER Experiment Name: At_Drought_Soil_Dry_P Parameter: Post-Treatment Value: None
  misc_feature: MA Experiment 20001560 PARAMETER Experiment Name: At_Drought_Soil_Dry_P Parameter: Timepoint (day) Value: 14
  misc_feature: MA Experiment 20001560 PARAMETER Experiment Name: At_Drought_Soil_Dry_P Parameter: Treatment Value: Drought vs. No Drought
  misc_feature: MA Experiment ID: 20001905 Result: Down-regulated in Transcription
  misc_feature: MA Experiment 20001905 PARAMETER Experiment Name: At_Drought_Reproduction_P Parameter: Age (day) Value: 40
  misc_feature: MA Experiment 20001905 PARAMETER Experiment Name: At_Drought_Reproduction_P Parameter: Organism Value: A. thaliana
  misc_feature: MA Experiment 20001905 PARAMETER Experiment Name: At_Drought_Reproduction_P Parameter: Plant Line Value: WS
  misc_feature: MA Experiment 20001905 PARAMETER Experiment Name: At_Drought_Reproduction_P Parameter: Timepoint (day) Value: 10
  misc_feature: MA Experiment 20001905 PARAMETER Experiment Name: At_Drought_Reproduction_P Parameter: Tissue Value: Rosettes
  misc_feature: MA Experiment 20001905 PARAMETER Experiment Name: At_Drought_Reproduction_P Parameter: Treatment Value: Drought vs. No Drought
atcattcatcatcatcagacatcaggtgcgtcataagctccacaaaaaactcatccatggcgattcttagttacatctcagcaacatcaaccacaccaccaattcctcaagatcaatctcccaattctcgtctaccaaccaaaatcattctacccaataagaaacctgagaaatggtccaccggagttgctcccggagagtacggtggtcctccgactaccaccaagctccgaaagtactggggaggtgaaaaagaagatcccattacttccacagacttaatctggaacagagattttatggatcaaatgaagaaattgtttgatgatcctaatgattcttctctcgacccatctccttcaaaggaaaagtcttctgggtttctgagctttagcagagttatgagtcttgacagtatggatgttgatttaagtaaagagcttgcatcgtcttctaaatccgttgtgaaaaatcgtcttgacacctccaagtcagaagctaaaaagcaaatgagtaaggctattgtgtctcctaaatggaagctggcacctacacgtcgtgagcaagagaaatgggatagagcaacgaaggctgcaactggtggcagtgatgtgatgtttagggagctgagacggccacgtggtgacccagaagtacaagctgctaaagacagggaacaatattttaagctgaaaaataagattcaggttctcacactcggtattggtggtgttggtttagtctcagcttatatctcatacaccccagagatagcacttagttttggtgctggcttgttgggttcacttgcatatatgaggatgcttggtaactctgtagatgccatggcagatggagccagaggagttgccaaaggtgcagctaaccagccacggttactagtccccgttgtgttggttatgatattcaatagatggaacgcaatacttgttcctgagtatggattcatgcatttggagttgataccaatgttggttgggttctttacttacaaaattgctacgttctttcaagctatagaagaagccatctccattactactcaaaaacccgaatcaatctctccagacacacaggccagtgattaataaggtcaaggtcagtgttgtaagaaatgtaattaaacacagaagtgttaatgtaataaaaactaataactca

SEQ ID NO: 98733 - protein, 368 aa, Arabidopsis thaliana; identical to SEQ ID NO: 22994
  peptide (1)..(368): Ceres Seq. ID no. 13601411
  misc_feature (19)..(368): Homolog of NCBI NO: 18402535 NR Description: expressed protein [Arabidopsis thaliana]
  misc_feature (19)..(368): Homolog of NCBI NO: 21593011 NR Description: unknown [Arabidopsis thaliana]
  misc_feature (174)..(350): Homolog of NCBI NO: 34911056 NR Description: P0007F06.23 [Oryza sativa (japonica
  misc_feature (37)..(106): Homolog of NCBI NO: 34911056 NR Description: P0007F06.23 [Oryza sativa (japonica
  misc_feature (225)..(350): Homolog of NCBI NO: 23043223 NR Description: hypothetical protein [Trichodesmium erythraeum
  misc_feature (225)..(349): Homolog of NCBI NO: 17227507 NR Description: ATP synthase subunit 1 [Nostoc sp. PCC 7120]
  misc_feature (215)..(349): Homolog of NCBI NO: 33863740 NR Description: possible H+-transporting ATP synthase
  misc_feature (225)..(349): Homolog of NCBI NO: 79743 NR Description: hypothetical 14K protein (atpI 5' region) - sp >gi|141997|gb|AAA21985.1| ATP synthase subunit 1 [Nostoc sp.
  misc_feature (226)..(350): Homolog of NCBI NO: 114706 NR Description: ATP synthase protein I >gi|72440|pir||G1YC gene 1 - Synechococcus sp. (strain PCC 6301) >gi|48011|emb|CAA28922.1|

SEQ ID NO: 98734 - protein, 350 aa, Arabidopsis thaliana; identical to SEQ ID NO: 22995
  peptide (1)..(350): Ceres Seq. ID no. 13601412
  misc_feature (1)..(350): Homolog of NCBI NO: 18402535 NR Description: expressed protein [Arabidopsis thaliana]
  misc_feature (1)..(350): Homolog of NCBI NO: 21593011 NR Description: unknown [Arabidopsis thaliana]
  misc_feature (156)..(332): Homolog of NCBI NO: 34911056 NR Description: P0007F06.23 [Oryza sativa (japonica
  misc_feature (19)..(88): Homolog of NCBI NO: 34911056 NR Description: P0007F06.23 [Oryza sativa (japonica
  misc_feature (207)..(332): Homolog of NCBI NO: 23043223 NR Description: hypothetical protein [Trichodesmium erythraeum
  misc_feature (207)..(331): Homolog of NCBI NO: 17227507 NR Description: ATP synthase subunit 1 [Nostoc sp. PCC 7120]
  misc_feature (197)..(331): Homolog of NCBI NO: 33863740 NR Description: possible H+-transporting ATP synthase
  misc_feature (207)..(331): Homolog of NCBI NO: 79743 NR Description: hypothetical 14K protein (atpI 5' region) - sp >gi|141997|gb|AAA21985.1| ATP synthase subunit 1 [Nostoc sp.
  misc_feature (208)..(332): Homolog of NCBI NO: 114706 NR Description: ATP synthase protein I >gi|72440|pir||G1YC gene 1 - Synechococcus sp. (strain PCC 6301) >gi|48011|emb|CAA28922.1|

SEQ ID NO: 98735 - protein, 269 aa, Arabidopsis thaliana; identical to SEQ ID NO: 22996
  peptide (1)..(269): Ceres Seq. ID no. 13601413
  misc_feature (1)..(269): Homolog of NCBI NO: 18402535 NR Description: expressed protein [Arabidopsis thaliana]
  misc_feature (1)..(269): Homolog of NCBI NO: 21593011 NR Description: unknown [Arabidopsis thaliana]
  misc_feature (75)..(251): Homolog of NCBI NO: 34911056 NR Description: P0007F06.23 [Oryza sativa (japonica
  misc_feature (126)..(251): Homolog of NCBI NO: 23043223 NR Description: hypothetical protein [Trichodesmium erythraeum
  misc_feature (126)..(250): Homolog of NCBI NO: 17227507 NR Description: ATP synthase subunit 1 [Nostoc sp. PCC 7120]
  misc_feature (116)..(250): Homolog of NCBI NO: 33863740 NR Description: possible H+-transporting ATP synthase
  misc_feature (126)..(250): Homolog of NCBI NO: 79743 NR Description: hypothetical 14K protein (atpI 5' region) - sp >gi|141997|gb|AAA21985.1| ATP synthase subunit 1 [Nostoc sp.
  misc_feature (127)..(251): Homolog of NCBI NO: 114706 NR Description: ATP synthase protein I >gi|72440|pir||G1YC gene 1 - Synechococcus sp. (strain PCC 6301) >gi|48011|emb|CAA28922.1|

SEQ ID NO: 98736 - DNA, 1237 bp, Arabidopsis thaliana
  misc_feature (1)..(1237): Ceres Seq. ID no. 13601414
  misc_feature: MA Experiment ID: 108434 Result: Down-regulated in Transcription
  misc_feature: MA Experiment 108434 PARAMETER Experiment Name: At_Root_Tips_cDNA_P Parameter: Tissue Value: Root Tips
  misc_feature: MA Experiment ID: 108462 Result: Up-regulated in Transcription
  misc_feature: MA Experiment 108462 PARAMETER Experiment Name: At_Germinating_Seeds_cDNA_P Parameter: Age (day) Value: 2 vs. 0
  misc_feature: MA Experiment 108462 PARAMETER Experiment Name: At_Germinating_Seeds_cDNA_P Parameter: Tissue Value: Germinating Seeds
  misc_feature: MA Experiment ID: 108463 Result: Up-regulated in Transcription
  misc_feature: MA Experiment 108463 PARAMETER Experiment Name: At_Germinating_Seeds_cDNA_P Parameter: Age (day) Value: 3 vs. 0
  misc_feature: MA Experiment 108463 PARAMETER Experiment Name: At_Germinating_Seeds_cDNA_P Parameter: Tissue Value: Germinating Seeds
  misc_feature: MA Experiment ID: 20000089 Result: Down-regulated in Transcription
  misc_feature: MA Experiment ID: 20000090 Result: Down-regulated in Transcription
  misc_feature: MA Experiment ID: 20000180 Result: Up-regulated in Transcription
  misc_feature: MA Experiment 20000180 PARAMETER Experiment Name: At_Germinating_Seeds_P Parameter: Age (hr) Value: 24 vs. 0
  misc_feature: MA Experiment 20000180 PARAMETER Experiment Name: At_Germinating_Seeds_P Parameter: Tissue Value: Germinating Seeds
  misc_feature: MA Experiment ID: 20000185 Result: Down-regulated in Transcription
  misc_feature: MA Experiment 20000185 PARAMETER Experiment Name: At_Roots__P Parameter: Age (day) Value: 7 vs. 21
  misc_feature: MA Experiment 20000185 PARAMETER Experiment Name: At_Roots__P Parameter: Organism Value: A. thaliana
  misc_feature: MA Experiment 20000185 PARAMETER Experiment Name: At_Roots__P Parameter: Tissue Value: Roots vs. Whole Plant
  misc_feature: MA Experiment ID: 20000224 Result: Down-regulated in Transcription
  misc_feature: MA Experiment ID: 20000438 Result: Down-regulated in Transcription
  misc_feature: MA Experiment 20000438 PARAMETER Experiment Name: At_Shoots__P Parameter: Age (day) Value: 14
  misc_feature: MA Experiment 20000438 PARAMETER Experiment Name: At_Shoots__P Parameter: Tissue Value: Shoots vs. Whole Plant
  misc_feature: MA Experiment ID: 20000495 Result: Up-regulated in Transcription
  misc_feature: MA Experiment 20000495 PARAMETER Experiment Name: At_Guard_Cells_P Parameter: Harvest Date Value: 8/2/2002
  misc_feature: MA Experiment 20000495 PARAMETER Experiment Name: At_Guard_Cells_P Parameter: Organism Value: A. thaliana
  misc_feature: MA Experiment 20000495 PARAMETER Experiment Name: At_Guard_Cells_P Parameter: Tissue Value: Guard Cells vs. Leaves
  misc_feature: MA Experiment ID: 20001773 Result: Up-regulated in Transcription
  misc_feature: MA Experiment 20001773 PARAMETER Experiment Name: At_Far-red-enriched-adult_P Parameter: Age (day) Value: 30
  misc_feature: MA Experiment 20001773 PARAMETER Experiment Name: At_Far-red-enriched-adult_P Parameter: Light Value: Far-red enriched vs. White
  misc_feature: MA Experiment 20001773 PARAMETER Experiment Name: At_Far-red-enriched-adult_P Parameter: Organism Value: A. thaliana
  misc_feature: MA Experiment 20001773 PARAMETER Experiment Name: At_Far-red-enriched-adult_P Parameter: Plant Line Value: Columbia
  misc_feature: MA Experiment 20001773 PARAMETER Experiment Name: At_Far-red-enriched-adult_P Parameter: Timepoint (hr) Value: 48
  misc_feature: MA Experiment 20001773 PARAMETER Experiment Name: At_Far-red-enriched-adult_P Parameter: Tissue Value: Aerial
  misc_feature: MA Experiment ID: 20001905 Result: Down-regulated in Transcription
  misc_feature: MA Experiment 20001905 PARAMETER Experiment Name: At_Drought_Reproduction_P Parameter: Age (day) Value: 40
  misc_feature: MA Experiment 20001905 PARAMETER Experiment Name: At_Drought_Reproduction_P Parameter: Organism Value: A. thaliana
  misc_feature: MA Experiment 20001905 PARAMETER Experiment Name: At_Drought_Reproduction_P Parameter: Plant Line Value: WS
  misc_feature: MA Experiment 20001905 PARAMETER Experiment Name: At_Drought_Reproduction_P Parameter: Timepoint (day) Value: 10
  misc_feature: MA Experiment 20001905 PARAMETER Experiment Name: At_Drought_Reproduction_P Parameter: Tissue Value: Rosettes
  misc_feature: MA Experiment 20001905 PARAMETER Experiment Name: At_Drought_Reproduction_P Parameter: Treatment Value: Drought vs. No Drought
  misc_feature: MA Experiment ID: 20001906 Result: Down-regulated in Transcription
  misc_feature: MA Experiment 20001906 PARAMETER Experiment Name: At_Drought_Reproduction_P Parameter: Age (day) Value: 35
  misc_feature: MA Experiment 20001906 PARAMETER Experiment Name: At_Drought_Reproduction_P Parameter: Organism Value: A. thaliana
  misc_feature: MA Experiment 20001906 PARAMETER Experiment Name: At_Drought_Reproduction_P Parameter: Plant Line Value: WS
  misc_feature: MA Experiment 20001906 PARAMETER Experiment Name: At_Drought_Reproduction_P Parameter: Timepoint (day) Value: 5
  misc_feature: MA Experiment 20001906 PARAMETER Experiment Name: At_Drought_Reproduction_P Parameter: Tissue Value: Siliques
  misc_feature: MA Experiment 20001906 PARAMETER Experiment Name: At_Drought_Reproduction_P Parameter: Treatment Value: Drought vs. No Drought
  misc_feature: MA Experiment ID: 20001908 Result: Down-regulated in Transcription
  misc_feature: MA Experiment 20001908 PARAMETER Experiment Name: At_Drought_Reproduction_P Parameter: Age (day) Value: 40
  misc_feature: MA Experiment 20001908 PARAMETER Experiment Name: At_Drought_Reproduction_P Parameter: Organism Value: A. thaliana
  misc_feature: MA Experiment 20001908 PARAMETER Experiment Name: At_Drought_Reproduction_P Parameter: Plant Line Value: WS
  misc_feature: MA Experiment 20001908 PARAMETER Experiment Name: At_Drought_Reproduction_P Parameter: Timepoint (day) Value: 10
  misc_feature: MA Experiment 20001908 PARAMETER Experiment Name: At_Drought_Reproduction_P Parameter: Tissue Value: Siliques
  misc_feature: MA Experiment 20001908 PARAMETER Experiment Name: At_Drought_Reproduction_P Parameter: Treatment Value: Drought vs. No Drought
  misc_feature: MA Experiment ID: 20001911 Result: Down-regulated in Transcription
  misc_feature: MA Experiment 20001911 PARAMETER Experiment Name: At_Drought_Reproduction_P Parameter: Age (day) Value: 40
  misc_feature: MA Experiment 20001911 PARAMETER Experiment Name: At_Drought_Reproduction_P Parameter: Organism Value: A. thaliana
  misc_feature: MA Experiment 20001911 PARAMETER Experiment Name: At_Drought_Reproduction_P Parameter: Plant Line Value: WS
  misc_feature: MA Experiment 20001911 PARAMETER Experiment Name: At_Drought_Reproduction_P Parameter: Timepoint (day) Value: 10
  misc_feature: MA Experiment 20001911 PARAMETER Experiment Name: At_Drought_Reproduction_P Parameter: Tissue Value: Flowers
  misc_feature: MA Experiment 20001911 PARAMETER Experiment Name: At_Drought_Reproduction_P Parameter: Treatment Value: Drought vs. No Drought
cttggcgaccttaaatacaaaatgggactctgtttccaactcaacttagcctctctgtctctcatactcttctcttcattccctggacttttagcacaatctcaacaacatttcttgggacaaaacaacacaagcttgttgagtggagggagatgcaatttggctagaggcaaatgggtctatgattcttcatatcctctctatagtgcttttagttgtcccttcatcgattccgaattcaactgccagaaagcgggtcgtccggacactaactatcaacacttccgttggcagcctttctcctgtcctctccctagattcgatggggcgaattttatgaggagaatgagagggaagaagataatgatggtaggtgactcactgagtcttaacatgttcgaatcgttggcctgcttgcttcatgcttctctccctaatgctaagtactctcttcgtcgaagccaacctctcacttccctcactttccaggattatggagtgacgataaatttgtatagaacacagtttctagtagatgtggttcaagaaaaggcaggacgagtgcttgtgcttgactccatcaaacaagccgatgcttggcttggcatggatgttcttatcttcaactcgtggcactggtggactcacacctccggacttcagccctgggattatatgagggaaggaaaccaattgtacaaagacatgaacaggcttgtggcttattacaaaggacttaacacatgggctcgttggattaacaataacattgtcccttcacgtactcaagtcttctttcaaggtgtttctcctgtccactatgacggaagagagtggaacgaaccattgaagtcgtgcaatggtcaaactcagccgttcatgggacaaagatatccaggaggattgcccttaggttgggttgtggttaacaaagtgttgagccgaattagaaaaccggtccatcttctcgatctcactactctctcggagtatcgcaaagacgcacatccaagtctctacaatggtatctcaaaggatctagactgtagccattggtgcctccctggactccctgatacttggaacttacttctctactcatctcttacttcctagtccttgttttacatatttgtttgtttctaccattttataaatagtttgtgatgatcctgtgtgattgtgattgatatttttccttcgttaatttaatcttaaatgtaattaacattgttac

SEQ ID NO: 98737 - protein, 371 aa, Arabidopsis thaliana
  peptide (1)..(371): Ceres Seq. ID no. 13601415
  misc_feature (8)..(371): Homolog of NCBI NO: 21593142 NR Description: unknown [Arabidopsis thaliana]
  misc_feature (15)..(371): Homolog of NCBI NO: 28393769 NR Description: unknown protein [Arabidopsis thaliana]
  misc_feature (47)..(371): Homolog of NCBI NO: 18406003 NR Description: expressed protein [Arabidopsis thaliana]
  misc_feature (52)..(370): Homolog of NCBI NO: 18396930 NR Description: expressed protein [Arabidopsis thaliana] unknown protein [Arabidopsis thaliana]
  misc_feature (52)..(370): Homolog of NCBI NO: 18403435 NR Description: expressed protein [Arabidopsis thaliana] expressed protein [Arabidopsis thaliana]
  misc_feature (52)..(370): Homolog of NCBI NO: 25366741 NR Description: F28N24.24 protein - Arabidopsis thaliana
  misc_feature (36)..(369): Homolog of NCBI NO: 34911864 NR Description: OSJNBb0032K15.9 [Oryza sativa (japonica
  misc_feature (41)..(371): Homolog of NCBI NO: 15219157 NR Description: hypothetical protein [Arabidopsis thaliana]
  misc_feature (203)..(371): Homolog of NCBI NO: 15224614 NR Description: expressed protein [Arabidopsis thaliana]
  misc_feature (161)..(370): Homolog of NCBI NO: 34904010 NR Description: unnamed protein product [Oryza sativa (japonica group)] >gi|7523484|dbj|BAA94212.1| unnamed protein product
LGDLKYKMGLCFQLNLASLSLILFSSFPGLLAQSQQHFLGQNNTSLLSGGRCNLARGKWVYDSSYPLYSAFSCPFIDSEFNCQKAGRPDTNYQHFRWQPFSCPLPRFDGANFMRRMRGKKIMMVGDSLSLNMFESLACLLHASLPNAKYSLRRSQPLTSLTFQDYGVTINLYRTQFLVDVVQEKAGRVLVLDSIKQADAWLGMDVLIFNSWHWWTHTSGLQPWDYMREGNQLYKDMNRLVAYYKGLNTWARWINNNIVPSRTQVFFQGVSPVHYDGREWNEPLKSCNGQTQPFMGQRYPGGLPLGWVVVNKVLSRIRKPVHLLDLTTLSEYRKDAHPSLYNGISKDLDCSHWCLPGLPDTWNLLLYSSLTS

SEQ ID NO: 98738 - protein, 364 aa, Arabidopsis thaliana
  peptide (1)..(364): Ceres Seq. ID no. 13601416
  misc_feature (1)..(364): Homolog of NCBI NO: 21593142 NR Description: unknown [Arabidopsis thaliana]
  misc_feature (8)..(364): Homolog of NCBI NO: 28393769 NR Description: unknown protein [Arabidopsis thaliana]
  misc_feature (40)..(364): Homolog of NCBI NO: 18406003 NR Description: expressed protein [Arabidopsis thaliana]
  misc_feature (45)..(363): Homolog of NCBI NO: 18396930 NR Description: expressed protein [Arabidopsis thaliana] unknown protein [Arabidopsis thaliana]
  misc_feature (45)..(363): Homolog of NCBI NO: 18403435 NR Description: expressed protein [Arabidopsis thaliana] expressed protein [Arabidopsis thaliana]
  misc_feature (45)..(363): Homolog of NCBI NO: 25366741 NR Description: F28N24.24 protein - Arabidopsis thaliana
  misc_feature (29)..(362): Homolog of NCBI NO: 34911864 NR Description: OSJNBb0032K15.9 [Oryza sativa (japonica
  misc_feature (34)..(364): Homolog of NCBI NO: 15219157 NR Description: hypothetical protein [Arabidopsis thaliana]
  misc_feature (196)..(364): Homolog of NCBI NO: 15224614 NR Description: expressed protein [Arabidopsis thaliana]
  misc_feature (154)..(363): Homolog of NCBI NO: 34904010 NR Description: unnamed protein product [Oryza sativa (japonica group)] >gi|7523484|dbj|BAA94212.1| unnamed protein product
MGLCFQLNLASLSLILFSSFPGLLAQSQQHFLGQNNTSLLSGGRCNLARGKWVYDSSYPLYSAFSCPFIDSEFNCQKAGRPDTNYQHFRWQPFSCPLPRFDGANFMRRMRGKKIMMVGDSLSLNMFESLACLLHASLPNAKYSLRRSQPLTSLTFQDYGVTINLYRTQFLVDVVQEKAGRVLVLDSIKQADAWLGMDVLIFNSWHWWTHTSGLQPWDYMREGNQLYKDMNRLVAYYKGLNTWARWINNNIVPSRTQVFFQGVSPVHYDGREWNEPLKSCNGQTQPFMGQRYPGGLPLGWVVVNKVLSRIRKPVHLLDLTTLSEYRKDAHPSLYNGISKDLDCSHWCLPGLPDTWNLLLYSSLTS

SEQ ID NO: 98739 - protein, 259 aa, Arabidopsis thaliana; identical to SEQ ID NO: 23519
  peptide (1)..(259): Ceres Seq. ID no. 13601417
  misc_feature (1)..(259): Homolog of NCBI NO: 21593142 NR Description: unknown [Arabidopsis thaliana]
  misc_feature (1)..(259): Homolog of NCBI NO: 28393769 NR Description: unknown protein [Arabidopsis thaliana]
  misc_feature (1)..(259): Homolog of NCBI NO: 18406003 NR Description: expressed protein [Arabidopsis thaliana]
  misc_feature (1)..(258): Homolog of NCBI NO: 18396930 NR Description: expressed protein [Arabidopsis thaliana] unknown protein [Arabidopsis thaliana]
  misc_feature (1)..(258): Homolog of NCBI NO: 18403435 NR Description: expressed protein [Arabidopsis thaliana] expressed protein [Arabidopsis thaliana]
  misc_feature (1)..(258): Homolog of NCBI NO: 25366741 NR Description: F28N24.24 protein - Arabidopsis thaliana
  misc_feature (1)..(257): Homolog of NCBI NO: 34911864 NR Description: OSJNBb0032K15.9 [Oryza sativa (japonica
  misc_feature (1)..(259): Homolog of NCBI NO: 15219157 NR Description: hypothetical protein [Arabidopsis thaliana]
  misc_feature (91)..(259): Homolog of NCBI NO: 15224614 NR Description: expressed protein [Arabidopsis thaliana]
  misc_feature (49)..(258): Homolog of NCBI NO: 34904010 NR Description: unnamed protein product [Oryza sativa (japonica group)] >gi|7523484|dbj|BAA94212.1| unnamed protein product

SEQ ID NO: 98740 - DNA, 2216 bp, Arabidopsis thaliana
  misc_feature (1)..(2216): Ceres Seq. ID no. 13601436
  misc_feature: MA Experiment ID: 20000234 Result: Up-regulated in Transcription
  misc_feature: MA Experiment 20000234 PARAMETER Experiment Name: At_Siliques_P Parameter: Age (day) Value: 21
  misc_feature: MA Experiment 20000234 PARAMETER Experiment Name: At_Siliques_P Parameter: Organism Value: A. thaliana
  misc_feature: MA Experiment 20000234 PARAMETER Experiment Name: At_Siliques_P Parameter: Plant Line Value: WS
  misc_feature: MA Experiment 20000234 PARAMETER Experiment Name: At_Siliques_P Parameter: Tissue Value: Less Than 5mm Siliques vs. Whole Plant
  misc_feature: MA Experiment ID: 20000264 Result: Up-regulated in Transcription
  misc_feature: MA Experiment 20000264 PARAMETER Experiment Name: At_Open_Flower_P Parameter: Age (day) Value: 21
  misc_feature: MA Experiment 20000264 PARAMETER Experiment Name: At_Open_Flower_P Parameter: Plant Line Value: WS
  misc_feature: MA Experiment 20000264 PARAMETER Experiment Name: At_Open_Flower_P Parameter: Tissue Value: Open Flower vs. Whole Plant
  misc_feature: MA Experiment ID: 20000265 Result: Up-regulated in Transcription
  misc_feature: MA Experiment 20000265 PARAMETER Experiment Name: At_Open_Flower_P Parameter: Age (day) Value: 21
  misc_feature: MA Experiment 20000265 PARAMETER Experiment Name: At_Open_Flower_P Parameter: Plant Line Value: WS
  misc_feature: MA Experiment 20000265 PARAMETER Experiment Name: At_Open_Flower_P Parameter: Tissue Value: Closed Flower vs. Whole Plant
  misc_feature: MA Experiment ID: 20000286 Result: Up-regulated in Transcription
  misc_feature: MA Experiment 20000286 PARAMETER Experiment Name: At_Open_Flower_P Parameter: Age (day) Value: 21
  misc_feature: MA Experiment 20000286 PARAMETER Experiment Name: At_Open_Flower_P Parameter: Plant Line Value: WS
  misc_feature: MA Experiment 20000286 PARAMETER Experiment Name: At_Open_Flower_P Parameter: Tissue Value: Half Open vs. Whole Plant
  misc_feature: MA Experiment ID: 20000794 Result: Up-regulated in Transcription
  misc_feature: MA Experiment 20000794 PARAMETER Experiment Name: At_Petals_P Parameter: Age (day) Value: 23-25 days
  misc_feature: MA Experiment 20000794 PARAMETER Experiment Name: At_Petals_P Parameter: Plant Line Value: WS
  misc_feature: MA Experiment 20000794 PARAMETER Experiment Name: At_Petals_P Parameter: Tissue Value: Petals vs. Whole plant
  misc_feature: MA Experiment ID: 20001757 Result: Down-regulated in Transcription
  misc_feature: MA Experiment 20001757 PARAMETER Experiment Name: At_50mM_NH4NO3_L-to-H_P Parameter: Timepoint (hr) Value: 6
  misc_feature: MA Experiment 20001757 PARAMETER Experiment Name: At_50mM_NH4NO3_L-to-H_P Parameter: Tissue Value: Leaf
  misc_feature: MA Experiment 20001757 PARAMETER Experiment Name: At_50mM_NH4NO3_L-to-H_P Parameter: Treatment Value: 50mM NH4NO3 vs 100mM Mannitol
  misc_feature: MA Experiment ID: 20001909 Result: Up-regulated in Transcription
  misc_feature: MA Experiment 20001909 PARAMETER Experiment Name: At_Drought_Reproduction_P Parameter: Age (day) Value: 35
  misc_feature: MA Experiment 20001909 PARAMETER Experiment Name: At_Drought_Reproduction_P Parameter: Organism Value: A. thaliana
  misc_feature: MA Experiment 20001909 PARAMETER Experiment Name: At_Drought_Reproduction_P Parameter: Plant Line Value: WS
  misc_feature: MA Experiment 20001909 PARAMETER Experiment Name: At_Drought_Reproduction_P Parameter: Timepoint (day) Value: 5
  misc_feature: MA Experiment 20001909 PARAMETER Experiment Name: At_Drought_Reproduction_P Parameter: Tissue Value: Flowers
  misc_feature: MA Experiment 20001909 PARAMETER Experiment Name: At_Drought_Reproduction_P Parameter: Treatment Value: Drought vs. No Drought
  misc_feature: MA Experiment ID: 20001910 Result: Up-regulated in Transcription
  misc_feature: MA Experiment 20001910 PARAMETER Experiment Name: At_Drought_Reproduction_P Parameter: Age (day) Value: 37
  misc_feature: MA Experiment 20001910 PARAMETER Experiment Name: At_Drought_Reproduction_P Parameter: Organism Value: A. thaliana
  misc_feature: MA Experiment 20001910 PARAMETER Experiment Name: At_Drought_Reproduction_P Parameter: Plant Line Value: WS
  misc_feature: MA Experiment 20001910 PARAMETER Experiment Name: At_Drought_Reproduction_P Parameter: Timepoint (day) Value: 7
  misc_feature: MA Experiment 20001910 PARAMETER Experiment Name: At_Drought_Reproduction_P Parameter: Tissue Value: Flowers
  misc_feature: MA Experiment 20001910 PARAMETER Experiment Name: At_Drought_Reproduction_P Parameter: Treatment Value: Drought vs. No Drought
acaaccgattaacaaatagaaaacgaagcacaaaagatatcagaagaagagagaagtctcctcccaaaaaaaccaaaaaaaaaaaaaaaaaagagaaagaaaagaactcgagtgcaaaaagcttctctcttccttcccatggggtgcatttgaactaatctcctccttgaaatcgcttgattgattgttataaatcgattaatcgattcaaaccgttggatattattccaaaacaacccaaaaagagaatcccatgggaagttgtgtttcgtcgccattgaaaggctctccttttggaaagagaccggtaagaaggcgacacagtagtaatagcagaacatcctctgttcctcgtttcgattcttcaactaatctttcccggagattgattttccagccaccaagccgcgttctccccgagcctatcggtgatggaattcacctcaagtatgatttgggaaaagaactaggccgtggtgaatttggtgtcactcatgaatgtatcgagatcagtacccgagaaagatttgcgtgtaagaggatatcgaaggagaagctaaggacggagatagatgtggaggatgtgagaagagaggttgagatcatgagatgtttaccaaaacatcctaatattgttagctttaaggaagcttttgaggacaaagacgctgtctatcttgtcatggagatttgtgaaggaggtgaactttttgaccgcattgtctctagagggcattacactgaacgcgccgctgcatctgttgctaaaaccattcttgaagttgtcaaggtgtgtcatgaacatggagtgattcatcgtgatcttaaaccagagaacttcctcttttcgaatggaactgagactgcacaactcaaagccattgattttggtctctccattttcttcaaaccggcccagcggttcaatgagattgtgggaagtccttactacatggctccagaggttttgagacgaaattacggtcctgagatcgatgtttggagtgctggtgttatactctatatcttgctttgtggtgttcctcccttttgggcagaaaccgaggaaggaatcgcgcacgctattgtgagagggaacatcgatttcgagagagatccatggccaaaagtctcacatgaagccaaggaactcgttaagaacatgcttgatgcaaatccttatagcagactcacagtccaagaagtgcttgaacatccatggatccggaacgcagagagagcaccaaatgtgaatcttggagataacgtcaggaccaagattcaacaattcttgttgatgaacaggttcaagaagaaagtcctcaggattgtagcggacaatctaccaaacgaggagatagcagcgatagtacagatgtttcaaacaatggacactgataagaatggtcacttgacttttgaggagctaagagatggactgaagaagattggacaagttgttcccgatggcgatgtgaagatgctaatggatgcagcggatacagatggaaatgggatgttgagctgtgatgagtttgtgacactctcaatacatttgaagagaatgggatgtgatgagcatttgcaggaagcattcaagtattttgacaagaacgggaacggatttatcgagctagatgagctcaaggtagctctttgcgatgataagctaggccacgctaacggtaacgaccagtggatcaaagatatcttctttgacgtcgacctcaacaaggatggacggataagctttgatgagtttaaggcaatgatgaaatcagggacggattggaaaatggcgtcgaggcagtactcgagggcgttgttgaatgctctaagcatcaagatgttcaaagaagattttggggacaatggtcctaagtcacattccatggagttccctatagcaaggaagagggctaagctgcttgatgctcccaagaacaaatcaatggagcttcagatctccaaaacctataaaccctcaggtctaagaaactaaagaagagaaaaaatgaacaagcaaaagactctttgattctttttaatgtgtttgtttttggtgctacaagtgcaaaaagtgtgatttaatgggcttaactctgcgttgttcatctttttccttaaaggtcgttaaacacattcatttaatttattaagttgtagcattaagaatggcgtcacatgtagtgtaaagttttccaagctgtgcaaac

SEQ ID NO: 98741 - protein, 582 aa, Arabidopsis thaliana
  peptide (1)..(582): Ceres Seq. ID no. 13601437
  misc_feature (66)..(324): Pfam Name: Protein kinase domain Pfam Description: Protein kinase domain
  misc_feature (1)..(582): Homolog of NCBI NO: 26450847 NR Description: putative calcium-dependent protein kinase
  misc_feature (1)..(535): Homolog of NCBI NO: 15239742 NR Description: calcium-dependent protein kinase 19 (CDPK19)
  misc_feature (53)..(535): Homolog of NCBI NO: 34393291 NR Description: putative calcium-dependent protein kinase [Oryza
  misc_feature (53)..(535): Homolog of NCBI NO: 11259874 NR Description: calcium-dependent protein kinase - Arabidopsis
  misc_feature (53)..(535): Homolog of NCBI NO: 30694663 NR Description: calcium-dependent protein kinase, putative (CDPK)
  misc_feature (53)..(535): Homolog of NCBI NO: 18416872 NR Description: calcium-dependent protein kinase 7 (CDPK)(CPK7)
  misc_feature (53)..(535): Homolog of NCBI NO: 2665890 NR Description: calcium-dependent protein kinase [Fragaria x
  misc_feature (53)..(541): Homolog of NCBI NO: 15227452 NR Description: calcium-dependent protein kinase, putative (CDPK) thaliana] >gi|25287680|pir||A84847 probable Ca2+ dependent
  misc_feature (53)..(535): Homolog of NCBI NO: 34899838 NR Description: putative calcium-dependent protein kinase [Oryza
  misc_feature (53)..(511): Homolog of NCBI NO: 5162878 NR Description: calcium-dependent protein kinase [Marchantia
MGSCVSSPLKGSPFGKRPVRRRHSSNSRTSSVPRFDSSTNLSRRLIFQPPSRVLPEPIGDGIHLKYDLGKELGRGEFGVTHECIEISTRERFACKRISKEKLRTEIDVEDVRREVEIMRCLPKHPNIVSFKEAFEDKDAVYLVMEICEGGELFDRIVSRGHYTERAAASVAKTILEVVKVCHEHGVIHRDLKPENFLFSNGTETAQLKAIDFGLSIFFKPAQRFNEIVGSPYYMAPEVLRRNYGPEIDVWSAGVILYILLCGVPPFWAETEEGIAHAIVRGNIDFERDPWPKVSHEAKELVKNMLDANPYSRLTVQEVLEHPWIRNAERAPNVNLGDNVRTKIQQFLLMNRFKKKVLRIVADNLPNEEIAAIVQMFQTMDTDKNGHLTFEELRDGLKKIGQVVPDGDVKMLMDAADTDGNGMLSCDEFVTLSIHLKRMGCDEHLQEAFKYFDKNGNGFIELDELKVALCDDKLGHANGNDQWIKDIFFDVDLNKDGRISFDEFKAMMKSGTDWKMASRQYSRALLNALSIKMFKEDFGDNGPKSHSMEFPIARKRAKLLDAPKNKSMELQISKTYKPSGLRN

SEQ ID NO: 98742 - protein, 465 aa, Arabidopsis thaliana
  peptide (1)..(465): Ceres Seq. ID no. 13601438
  misc_feature (1)..(207): Pfam Name: Protein kinase domain Pfam Description: Protein kinase domain
  misc_feature (1)..(465): Homolog of NCBI NO: 26450847 NR Description: putative calcium-dependent protein kinase
  misc_feature (1)..(418): Homolog of NCBI NO: 15239742 NR Description: calcium-dependent protein kinase 19 (CDPK19)
  misc_feature (1)..(418): Homolog of NCBI NO: 34393291 NR Description: putative calcium-dependent protein kinase [Oryza
  misc_feature (1)..(418): Homolog of NCBI NO: 11259874 NR Description: calcium-dependent protein kinase - Arabidopsis
  misc_feature (1)..(418): Homolog of NCBI NO: 30694663 NR Description: calcium-dependent protein kinase, putative (CDPK)
  misc_feature (1)..(418): Homolog of NCBI NO: 18416872 NR Description: calcium-dependent protein kinase 7 (CDPK)(CPK7)
  misc_feature (1)..(418): Homolog of NCBI NO: 2665890 NR Description: calcium-dependent protein kinase [Fragaria x
  misc_feature (1)..(424): Homolog of NCBI NO: 15227452 NR Description: calcium-dependent protein kinase, putative (CDPK) thaliana] >gi|25287680|pir||A84847 probable Ca2+ dependent
  misc_feature (1)..(418): Homolog of NCBI NO: 34899838 NR Description: putative calcium-dependent protein kinase [Oryza
  misc_feature (1)..(394): Homolog of NCBI NO: 5162878 NR Description: calcium-dependent protein kinase [Marchantia
MRCLPKHPNIVSFKEAFEDKDAVYLVMEICEGGELFDRIVSRGHYTERAAASVAKTILEVVKVCHEHGVIHRDLKPENFLFSNGTETAQLKAIDFGLSIFFKPAQRFNEIVGSPYYMAPEVLRRNYGPEIDVWSAGVILYILLCGVPPFWAETEEGIAHAIVRGNIDFERDPWPKVSHEAKELVKNMLDANPYSRLTVQEVLEHPWIRNAERAPNVNLGDNVRTKIQQFLLMNRFKKKVLRIVADNLPNEEIAAIVQMFQTMDTDKNGHLTFEELRDGLKKIGQVVPDGDVKMLMDAADTDGNGMLSCDEFVTLSIHLKRMGCDEHLQEAFKYFDKNGNGFIELDELKVALCDDKLGHANGNDQWIKDIFFDVDLNKDGRISFDEFKAMMKSGTDWKMASRQYSRALLNALSIKMFKEDFGDNGPKSHSMEFPIARKRAKLLDAPKNKSMELQISKTYKPSGLRN

SEQ ID NO: 98743 - protein, 439 aa, Arabidopsis thaliana
  peptide (1)..(439): Ceres Seq. ID no. 13601439
  misc_feature (1)..(181): Pfam Name: Protein kinase domain Pfam Description: Protein kinase domain
  misc_feature (1)..(439): Homolog of NCBI NO: 26450847 NR Description: putative calcium-dependent protein kinase
  misc_feature (1)..(392): Homolog of NCBI NO: 15239742 NR Description: calcium-dependent protein kinase 19 (CDPK19)
  misc_feature (1)..(392): Homolog of NCBI NO: 34393291 NR Description: putative calcium-dependent protein kinase [Oryza
  misc_feature (1)..(392): Homolog of NCBI NO: 11259874 NR Description: calcium-dependent protein kinase - Arabidopsis
  misc_feature (1)..(392): Homolog of NCBI NO: 30694663 NR Description: calcium-dependent protein kinase, putative (CDPK)
  misc_feature (1)..(392): Homolog of NCBI NO: 18416872 NR Description: calcium-dependent protein kinase 7 (CDPK)(CPK7)
  misc_feature (1)..(392): Homolog of NCBI NO: 2665890 NR Description: calcium-dependent protein kinase [Fragaria x
  misc_feature (1)..(398): Homolog of NCBI NO: 15227452 NR Description: calcium-dependent protein kinase, putative (CDPK) thaliana] >gi|25287680|pir||A84847 probable Ca2+ dependent
  misc_feature (1)..(392): Homolog of NCBI NO: 34899838 NR Description: putative calcium-dependent protein kinase [Oryza
  misc_feature (1)..(368): Homolog of NCBI NO: 5162878 NR Description: calcium-dependent protein kinase [Marchantia
MEICEGGELFDRIVSRGHYTERAAASVAKTILEVVKVCHEHGVIHRDLKPENFLFSNGTETAQLKAIDFGLSIFFKPAQRFNEIVGSPYYMAPEVLRRNYGPEIDVWSAGVILYILLCGVPPFWAETEEGIAHAIVRGNIDFERDPWPKVSHEAKELVKNMLDANPYSRLTVQEVLEHPWIRNAERAPNVNLGDNVRTKIQQFLLMNRFKKKVLRIVADNLPNEEIAAIVQMFQTMDTDKNGHLTFEELRDGLKKIGQVVPDGDVKMLMDAADTDGNGMLSCDEFVTLSIHLKRMGCDEHLQEAFKYFDKNGNGFIELDELKVALCDDKLGHANGNDQWIKDIFFDVDLNKDGRISFDEFKAMMKSGTDWKMASRQYSRALLNALSIKMFKEDFGDNGPKSHSMEFPIARKRAKLLDAPKNKSMELQISKTYKPSGLRN

SEQ ID NO: 98744 - DNA, 1199 bp, Arabidopsis thaliana
  misc_feature (1)..(1199): Ceres Seq. ID no. 13601440
  misc_feature: MA Experiment ID: 108501 Result: Down-regulated in Transcription
  misc_feature: MA Experiment 108501 PARAMETER Experiment Name: At_ap2_floral_buds_cDNA_P Parameter: Plant Line Value: ap2 (Ler.)
  misc_feature: MA Experiment 108501 PARAMETER Experiment Name: At_ap2_floral_buds_cDNA_P Parameter: Tissue Value: Closed Flower
  misc_feature: MA Experiment ID: 108594 Result: Down-regulated in Transcription
  misc_feature: MA Experiment 108594 PARAMETER Experiment Name: At_Ler-rhl_Root_cDNA_P Parameter: Plant Line Value: null
  misc_feature: MA Experiment ID: 20000227 Result: Up-regulated in Transcription
  misc_feature: MA Experiment 20000227 PARAMETER Experiment Name: At_Root-Tips-vs-Tops_P Parameter: Tissue Value: Root Tips vs. Root Tops
aaatccaccaaaaacaaaaaatgtcgacttctaaagccataaccttaactctcttcattgcaacaacattactagcgccctgcaacgcagccgcaaacgcaacaacgaagccgctcttcccagcgattctaatcttcggtgattcaaccgtcgatacaggaaacaacaactaccctttaccaacaatcttcagagctgaacactttccttacggcatggatcttccagacggaaaagctaacggaagattctcaaacggaaaacttatctccgacataatcgcaaccaaactcaacatcaaagagtttattcctcctttcttacaaccaaatctctccgaccaagacattctaaccggagtctgtttcgcatcagctggtgccggttacgacgacctgaccagtctctcgacacaagccattcgtgtctcggaacaaccaaacatgttcaagagttacattgctcgtctcaaaggtatcgtgggagacaagaaagcgatggagatcataaacaatgccttcgtggttgtgagtgcagggcctaacgatttcattttgaactattacgaaattccctcaaggcgtctcgagtatcctttcatttctggttaccaagactttattcttaagaggcttgaaaatttcgtgcgggagctttacagtttaggtgtccggaatgttttggttggaggtttaccgccaatggggtgtttaccgatccatatgactgctaaattccgcaacatttttagattctgcttggaacaccataacaaagactctgttttatacaatgagaaacttcagaatctcttgccccaaatcgaagcatctcttccaggaagcaaattcctttacgccgatgtctataatcctatgatggagatgatccaaaaccctagcaaatacgggttcaaagagacgaagagaggatgttgtggaacagggttcctggagacgagcttcatgtgtaatgttttttctcctgtgtgtcaaaatcggtcggagtttttgttctttgactcgattcatccatcggaagctacctataatgtcataggcaatcttctggatcctctaattcgtggaaagttccaggcttaagtcatcacgagttgcaaaactgacacaattaattttcttgtttctttaatgcgactagttgtggactttcgtttatgaatcaaatgtaactttggc

SEQ ID NO: 98745 - protein, 366 aa, Arabidopsis thaliana
  peptide (1)..(366): Ceres Seq. ID no. 13601441
  misc_feature (42)..(356): Pfam Name: GDSL-like Lipase/Acylhydrolase Pfam Description: GDSL-like Lipase/Acylhydrolase
  misc_feature (7)..(366): Homolog of NCBI NO: 15225096 NR Description: GDSL-motif lipase/hydrolase protein [Arabidopsis
  misc_feature (7)..(366): Homolog of NCBI NO: 21537117 NR Description: putative GDSL-motif lipase/hydrolase [Arabidopsis
  misc_feature (158)..(366): Homolog of NCBI NO: 25336273 NR Description: probable GDSL-motif lipase/hydrolase [imported] -
  misc_feature (7)..(149): Homolog of NCBI NO: 25336273 NR Description: probable GDSL-motif lipase/hydrolase [imported] -
  misc_feature (7)..(366): Homolog of NCBI NO: 15217963 NR Description: GDSL-motif lipase/hydrolase protein [Arabidopsis
  misc_feature (7)..(366): Homolog of NCBI NO: 25336283 NR Description: hypothetical protein RXF26 [imported] -
  misc_feature (7)..(366): Homolog of NCBI NO: 21592974 NR Description: proline-rich protein, putative [Arabidopsis
  misc_feature (7)..(366): Homolog of NCBI NO: 15227734 NR Description: GDSL-motif lipase/hydrolase protein [Arabidopsis
  misc_feature (7)..(307): Homolog of NCBI NO: 15224162 NR Description: GDSL-motif lipase/hydrolase protein [Arabidopsis
  misc_feature (7)..(361): Homolog of NCBI NO: 15227723 NR Description: GDSL-motif lipase/hydrolase protein [Arabidopsis
IHQKQKMSTSKAITLTLFIATTLLAPCNAAANATTKPLFPAILIFGDSTVDTGNNNYPLPTIFRAEHFPYGMDLPDGKANGRFSNGKLISDIIATKLNIKEFIPPFLQPNLSDQDILTGVCFASAGAGYDDLTSLSTQAIRVSEQPNMFKSYIARLKGIVGDKKAMEIINNAFVVVSAGPNDFILNYYEIPSRRLEYPFISGYQDFILKRLENFVRELYSLGVRNVLVGGLPPMGCLPIHMTAKFRNIFRFCLEHHNKDSVLYNEKLQNLLPQIEASLPGSKFLYADVYNPMMEMIQNPSKYGFKETKRGCCGTGFLETSFMCNVFSPVCQNRSEFLFFDSIHPSEATYNVIGNLLDPLIRGKFQA

SEQ ID NO: 98746 - protein, 360 aa, Arabidopsis thaliana
  peptide (1)..(360): Ceres Seq. ID no. 13601442
  misc_feature (36)..(350): Pfam Name: GDSL-like Lipase/Acylhydrolase Pfam Description: GDSL-like Lipase/Acylhydrolase
  misc_feature (1)..(360): Homolog of NCBI NO: 15225096 NR Description: GDSL-motif lipase/hydrolase protein [Arabidopsis
  misc_feature (1)..(360): Homolog of NCBI NO: 21537117 NR Description: putative GDSL-motif lipase/hydrolase [Arabidopsis
  misc_feature (152)..(360): Homolog of NCBI NO: 25336273 NR Description: probable GDSL-motif lipase/hydrolase [imported] -
  misc_feature (1)..(143): Homolog of NCBI NO: 25336273 NR Description: probable GDSL-motif lipase/hydrolase [imported] -
  misc_feature (1)..(360): Homolog of NCBI NO: 15217963 NR Description: GDSL-motif lipase/hydrolase protein [Arabidopsis
  misc_feature (1)..(360): Homolog of NCBI NO: 25336283 NR Description: hypothetical protein RXF26 [imported] -
  misc_feature (1)..(360): Homolog of NCBI NO: 21592974 NR Description: proline-rich protein, putative [Arabidopsis
  misc_feature (1)..(360): Homolog of NCBI NO: 15227734 NR Description: GDSL-motif lipase/hydrolase protein [Arabidopsis
  misc_feature (1)..(301): Homolog of NCBI NO: 15224162 NR Description: GDSL-motif lipase/hydrolase protein [Arabidopsis
  misc_feature (1)..(355): Homolog of NCBI NO: 15227723 NR Description: GDSL-motif lipase/hydrolase protein [Arabidopsis
MSTSKAITLTLFIATTLLAPCNAAANATTKPLFPAILIFGDSTVDTGNNNYPLPTIFRAEHFPYGMDLPDGKANGRFSNGKLISDIIATKLNIKEFIPPFLQPNLSDQDILTGVCFASAGAGYDDLTSLSTQAIRVSEQPNMFKSYIARLKGIVGDKKAMEIINNAFVVVSAGPNDFILNYYEIPSRRLEYPFISGYQDFILKRLENFVRELYSLGVRNVLVGGLPPMGCLPIHMTAKFRNIFRFCLEHHNKDSVLYNEKLQNLLPQIEASLPGSKFLYADVYNPMMEMIQNPSKYGFKETKRGCCGTGFLETSFMCNVFSPVCQNRSEFLFFDSIHPSEATYNVIGNLLDPLIRGKFQA

SEQ ID NO: 98747 - protein, 295 aa, Arabidopsis thaliana
  peptide (1)..(295): Ceres Seq. ID no. 13601443
  misc_feature (1)..(285): Pfam Name: GDSL-like Lipase/Acylhydrolase Pfam Description: GDSL-like Lipase/Acylhydrolase
  misc_feature (1)..(295): Homolog of NCBI NO: 15225096 NR Description: GDSL-motif lipase/hydrolase protein [Arabidopsis
  misc_feature (1)..(295): Homolog of NCBI NO: 21537117 NR Description: putative GDSL-motif lipase/hydrolase [Arabidopsis
  misc_feature (87)..(295): Homolog of NCBI NO: 25336273 NR Description: probable GDSL-motif lipase/hydrolase [imported] -
  misc_feature (1)..(78): Homolog of NCBI NO: 25336273 NR Description: probable GDSL-motif lipase/hydrolase [imported] -
  misc_feature (1)..(295): Homolog of NCBI NO: 15217963 NR Description: GDSL-motif lipase/hydrolase protein [Arabidopsis
  misc_feature (1)..(295): Homolog of NCBI NO: 25336283 NR Description: hypothetical protein RXF26 [imported] -
  misc_feature (1)..(295): Homolog of NCBI NO: 21592974 NR Description: proline-rich protein, putative [Arabidopsis
  misc_feature (1)..(295): Homolog of NCBI NO: 15227734 NR Description: GDSL-motif lipase/hydrolase protein [Arabidopsis
  misc_feature (1)..(236): Homolog of NCBI NO: 15224162 NR Description: GDSL-motif lipase/hydrolase protein [Arabidopsis
  misc_feature (1)..(290): Homolog of NCBI NO: 15227723 NR Description: GDSL-motif lipase/hydrolase protein [Arabidopsis
MDLPDGKANGRFSNGKLISDIIATKLNIKEFIPPFLQPNLSDQDILTGVCFASAGAGYDDLTSLSTQAIRVSEQPNMFKSYIARLKGIVGDKKAMEIINNAFVVVSAGPNDFILNYYEIPSRRLEYPFISGYQDFILKRLENFVRELYSLGVRNVLVGGLPPMGCLPIHMTAKFRNIFRFCLEHHNKDSVLYNEKLQNLLPQIEASLPGSKFLYADVYNPMMEMIQNPSKYGFKETKRGCCGTGFLETSFMCNVFSPVCQNRSEFLFFDSIHPSEATYNVIGNLLDPLIRGKFQA

SEQ ID NO: 98748 - DNA, 611 bp, Arabidopsis thaliana
  misc_feature (1)..(611): Ceres Seq. ID no. 13601448
  misc_feature: MA Experiment ID: 108434 Result: Up-regulated in Transcription
  misc_feature: MA Experiment 108434 PARAMETER Experiment Name: At_Root_Tips_cDNA_P Parameter: Tissue Value: Root Tips
  misc_feature: MA Experiment ID: 108461 Result: Down-regulated in Transcription
  misc_feature: MA Experiment 108461 PARAMETER Experiment Name: At_Germinating_Seeds_cDNA_P Parameter: Age (day) Value: 1 vs. 0
  misc_feature: MA Experiment 108461 PARAMETER Experiment Name: At_Germinating_Seeds_cDNA_P Parameter: Tissue Value: Germinating Seeds
  misc_feature: MA Experiment ID: 108462 Result: Down-regulated in Transcription
  misc_feature: MA Experiment 108462 PARAMETER Experiment Name: At_Germinating_Seeds_cDNA_P Parameter: Age (day) Value: 2 vs. 0
  misc_feature: MA Experiment 108462 PARAMETER Experiment Name: At_Germinating_Seeds_cDNA_P Parameter: Tissue Value: Germinating Seeds
  misc_feature: MA Experiment ID: 108463 Result: Down-regulated in Transcription
  misc_feature: MA Experiment 108463 PARAMETER Experiment Name: At_Germinating_Seeds_cDNA_P Parameter: Age (day) Value: 3 vs. 0
  misc_feature: MA Experiment 108463 PARAMETER Experiment Name: At_Germinating_Seeds_cDNA_P Parameter: Tissue Value: Germinating Seeds
  misc_feature: MA Experiment ID: 108464 Result: Down-regulated in Transcription
  misc_feature: MA Experiment 108464 PARAMETER Experiment Name: At_Germinating_Seeds_cDNA_P Parameter: Age (day) Value: 4 vs. 0
  misc_feature: MA Experiment 108464 PARAMETER Experiment Name: At_Germinating_Seeds_cDNA_P Parameter: Tissue Value: Germinating Seeds
  misc_feature: MA Experiment ID: 108573 Result: Down-regulated in Transcription
  misc_feature: MA Experiment 108573 PARAMETER Experiment Name: At_Drought_cDNA_P Parameter: Timepoint (hr) Value: 6
  misc_feature: MA Experiment 108573 PARAMETER Experiment Name: At_Drought_cDNA_P Parameter: Tissue Value: Aerial
  misc_feature: MA Experiment 108573 PARAMETER Experiment Name: At_Drought_cDNA_P Parameter: Treatment Value: Drought vs. No Drought
  misc_feature: MA Experiment ID: 20000234 Result: Up-regulated in Transcription
  misc_feature: MA Experiment 20000234 PARAMETER Experiment Name: At_Siliques_P Parameter: Age (day) Value: 21
  misc_feature: MA Experiment 20000234 PARAMETER Experiment Name: At_Siliques_P Parameter: Organism Value: A. thaliana
  misc_feature: MA Experiment 20000234 PARAMETER Experiment Name: At_Siliques_P Parameter: Plant Line Value: WS
  misc_feature: MA Experiment 20000234 PARAMETER Experiment Name: At_Siliques_P Parameter: Tissue Value: Less Than 5mm Siliques vs. Whole Plant
  misc_feature: MA Experiment ID: 20000264 Result: Up-regulated in Transcription
  misc_feature: MA Experiment 20000264 PARAMETER Experiment Name: At_Open_Flower_P Parameter: Age (day) Value: 21
  misc_feature: MA Experiment 20000264 PARAMETER Experiment Name: At_Open_Flower_P Parameter: Plant Line Value: WS
  misc_feature: MA Experiment 20000264 PARAMETER Experiment Name: At_Open_Flower_P Parameter: Tissue Value: Open Flower vs. Whole Plant
  misc_feature: MA Experiment ID: 20000265 Result: Up-regulated in Transcription
  misc_feature: MA Experiment 20000265 PARAMETER Experiment Name: At_Open_Flower_P Parameter: Age (day) Value: 21
  misc_feature: MA Experiment 20000265 PARAMETER Experiment Name: At_Open_Flower_P Parameter: Plant Line Value: WS
  misc_feature: MA Experiment 20000265 PARAMETER Experiment Name: At_Open_Flower_P Parameter: Tissue Value: Closed Flower vs. Whole Plant
  misc_feature: MA Experiment ID: 20001247 Result: Down-regulated in Transcription
  misc_feature: MA Experiment 20001247 PARAMETER Experiment Name: At_Far-red-induction_P Parameter: Age (day) Value: 7
  misc_feature: MA Experiment 20001247 PARAMETER Experiment Name: At_Far-red-induction_P Parameter: Light Value: Far-red vs. White
  misc_feature: MA Experiment 20001247 PARAMETER Experiment Name: At_Far-red-induction_P Parameter: Organism Value: A. thaliana
  misc_feature: MA Experiment 20001247 PARAMETER Experiment Name: At_Far-red-induction_P Parameter: Plant Line Value: Columbia
  misc_feature: MA Experiment 20001247 PARAMETER Experiment Name: At_Far-red-induction_P Parameter: Timepoint (hr) Value: 1
  misc_feature: MA Experiment 20001247 PARAMETER Experiment Name: At_Far-red-induction_P Parameter: Tissue Value: Whole Plant
  misc_feature: MA Experiment ID: 20001557 Result: Up-regulated in Transcription
  misc_feature: MA Experiment 20001557 PARAMETER Experiment Name: At_Drought_Soil_Dry_P Parameter: Age (day) Value: 27
  misc_feature: MA Experiment 20001557 PARAMETER Experiment Name: At_Drought_Soil_Dry_P Parameter: Organism Value: A. thaliana
  misc_feature: MA Experiment 20001557 PARAMETER Experiment Name: At_Drought_Soil_Dry_P Parameter: Plant Line Value: WS
  misc_feature: MA Experiment 20001557 PARAMETER Experiment Name: At_Drought_Soil_Dry_P Parameter: Post Timepoint (hr) Value: 3
  misc_feature: MA Experiment 20001557 PARAMETER Experiment Name: At_Drought_Soil_Dry_P Parameter: Post-Treatment Value: Re-Water vs. No Drought
  misc_feature: MA Experiment 20001557 PARAMETER Experiment Name: At_Drought_Soil_Dry_P Parameter: Timepoint (day) Value: 13
  misc_feature: MA Experiment 20001557 PARAMETER Experiment Name: At_Drought_Soil_Dry_P Parameter: Treatment Value: Drought vs. No Drought
  misc_feature: MA Experiment ID: 20001558 Result: Up-regulated in Transcription
  misc_feature: MA Experiment 20001558 PARAMETER Experiment Name: At_Drought_Soil_Dry_P Parameter: Age (day) Value: 27
  misc_feature: MA Experiment 20001558 PARAMETER Experiment Name: At_Drought_Soil_Dry_P Parameter: Organism Value: A. thaliana
  misc_feature: MA Experiment 20001558 PARAMETER Experiment Name: At_Drought_Soil_Dry_P Parameter: Plant Line Value: WS
  misc_feature: MA Experiment 20001558 PARAMETER Experiment Name: At_Drought_Soil_Dry_P Parameter: Post Timepoint (hr) Value: 6
  misc_feature: MA Experiment 20001558 PARAMETER Experiment Name: At_Drought_Soil_Dry_P Parameter: Post-Treatment Value: Re-Water vs. No Drought
  misc_feature: MA Experiment 20001558 PARAMETER Experiment Name: At_Drought_Soil_Dry_P Parameter: Timepoint (day) Value: 13
  misc_feature: MA Experiment 20001558 PARAMETER Experiment Name: At_Drought_Soil_Dry_P Parameter: Treatment Value: Drought vs. No Drought
  misc_feature: MA Experiment ID: 20001560 Result: Up-regulated in Transcription
  misc_feature: MA Experiment 20001560 PARAMETER Experiment Name: At_Drought_Soil_Dry_P Parameter: Age (day) Value: 28
  misc_feature: MA Experiment 20001560 PARAMETER Experiment Name: At_Drought_Soil_Dry_P Parameter: Organism Value: A. thaliana
  misc_feature: MA Experiment 20001560 PARAMETER Experiment Name: At_Drought_Soil_Dry_P Parameter: Plant Line Value: WS
  misc_feature: MA Experiment 20001560 PARAMETER Experiment Name: At_Drought_Soil_Dry_P Parameter: Post Timepoint (hr) Value: None
  misc_feature: MA Experiment 20001560 PARAMETER Experiment Name: At_Drought_Soil_Dry_P Parameter: Post-Treatment Value: None
  misc_feature: MA Experiment 20001560 PARAMETER Experiment Name: At_Drought_Soil_Dry_P Parameter: Timepoint (day) Value: 14
  misc_feature: MA Experiment 20001560 PARAMETER Experiment Name: At_Drought_Soil_Dry_P Parameter: Treatment Value: Drought vs. No Drought
  misc_feature: MA Experiment ID: 20001757 Result: Up-regulated in Transcription
  misc_feature: MA Experiment 20001757 PARAMETER Experiment Name: At_50mM_NH4NO3_L-to-H_P Parameter: Timepoint (hr) Value: 6
  misc_feature: MA Experiment 20001757 PARAMETER Experiment Name: At_50mM_NH4NO3_L-to-H_P Parameter: Tissue Value: Leaf
  misc_feature: MA Experiment 20001757 PARAMETER Experiment Name: At_50mM_NH4NO3_L-to-H_P Parameter: Treatment Value: 50mM NH4NO3 vs 100mM Mannitol
agctaaaaccctaaagccctaaaatcaaaattacgctaaacagagaaggcgacaatggatcacatcgctgcggcggaagagcaaatcgtatcggagagacttcgaagaaagcttgaagaagttaatgtagctgctcagactcagctttctcctatccaagatcacatcaatttcacccttcagcaagcttatttcaaatgtgcatatgagtgctttgatagaagaagaaagcaagaggagataagtaactgcgtcgagcactgcagtgttcccgttgtcaaatctcaacagtatttcgagaacgaaatggctcaatttcaggaaagattgaacagatcactggtggtgtgtcaagacaagtttgaggcctcaaagctccagaagataaggcctgaagcggttaacgagatggagagttgtgtgcacaaatccattgaggaaaatctcaatacattaccacatattgtgcagagaatgaagacagcatttaacataaccaactaaaagctctcgtgaaaaaccttggattccagaacttgactagccatattgtttgaaaagaccttttcttttgtcttaatatgatctacaaatttgttttcctttttctt

SEQ ID NO: 98749 - protein, 149 aa, Arabidopsis thaliana; identical to SEQ ID NO: 35790
  peptide (1)..(149): Ceres Seq. ID no. 13601449
  misc_feature (15)..(145): Pfam Name: Eukaryotic protein of unknown function (DUF842) Pfam Description: Eukaryotic protein of unknown function (DUF842)
  misc_feature (1)..(149): Homolog of NCBI NO: 18402744 NR Description: expressed protein [Arabidopsis thaliana] expressed protein [Arabidopsis thaliana] expressed protein [Arabidopsis thaliana]
  misc_feature (1)..(149): Homolog of NCBI NO: 15221245 NR Description: hypothetical Protein [Arabidopsis thaliana]
  misc_feature (7)..(149): Homolog of NCBI NO: 15224344 NR Description: expressed protein [Arabidopsis thaliana]
  misc_feature (1)..(124): Homolog of NCBI NO: 15221247 NR Description: hypothetical protein [Arabidopsis thaliana]
  misc_feature (35)..(146): Homolog of NCBI NO: 37589716 NR Description: Unknown (protein for MGC:73247) [Danio rerio]
  misc_feature (19)..(144): Homolog of NCBI NO: 15929034 NR Description: hypothetical protein FLJ14668 [Homo sapiens]
  misc_feature (19)..(144): Homolog of NCBI NO: 14249520 NR Description: hypothetical protein FLJ14668 [Homo sapiens]
  misc_feature (42)..(146): Homolog of NCBI NO: 13385042 NR Description: RIKEN cDNA 2010309E21 [Mus musculus] unnamed protein product [Mus musculus] unnamed protein product [Mus musculus]
  misc_feature (42)..(146): Homolog of NCBI NO: 15489002 NR Description: 2010309E21Rik protein [Mus musculus]
  misc_feature (23)..(146): Homolog of NCBI NO: 28482029 NR Description: similar to RIKEN cDNA 2010309E21 [Mus musculus]

SEQ ID NO: 98750 - DNA, 1602 bp, Arabidopsis thaliana
  misc_feature (1)..(1602): Ceres Seq. ID no. 13601450
  misc_feature: MA Experiment ID: 108434 Result: Up-regulated in Transcription
  misc_feature: MA Experiment 108434 PARAMETER Experiment Name: At_Root_Tips_cDNA_P Parameter: Tissue Value: Root Tips
  misc_feature: MA Experiment ID: 108462 Result: Up-regulated in Transcription
  misc_feature: MA Experiment 108462 PARAMETER Experiment Name: At_Germinating_Seeds_cDNA_P Parameter: Age (day) Value: 2 vs. 0
  misc_feature: MA Experiment 108462 PARAMETER Experiment Name: At_Germinating_Seeds_cDNA_P Parameter: Tissue Value: Germinating Seeds
  misc_feature: MA Experiment ID: 108463 Result: Up-regulated in Transcription
  misc_feature: MA Experiment 108463 PARAMETER Experiment Name: At_Germinating_Seeds_cDNA_P Parameter: Age (day) Value: 3 vs. 0
  misc_feature: MA Experiment 108463 PARAMETER Experiment Name: At_Germinating_Seeds_cDNA_P Parameter: Tissue Value: Germinating Seeds
  misc_feature: MA Experiment ID: 108464 Result: Up-regulated in Transcription
  misc_feature: MA Experiment 108464 PARAMETER Experiment Name: At_Germinating_Seeds_cDNA_P Parameter: Age (day) Value: 4 vs. 0
  misc_feature: MA Experiment 108464 PARAMETER Experiment Name: At_Germinating_Seeds_cDNA_P Parameter: Tissue Value: Germinating Seeds
  misc_feature: MA Experiment ID: 108585 Result: Up-regulated in Transcription
  misc_feature: MA Experiment 108585 PARAMETER Experiment Name: At_5mM_NaNP_cDNA_P Parameter: Timepoint (hr) Value: 6
  misc_feature: MA Experiment 108585 PARAMETER Experiment Name: At_5mM_NaNP_cDNA_P Parameter: Tissue Value: Aerial
  misc_feature: MA Experiment 108585 PARAMETER Experiment Name: At_5mM_NaNP_cDNA_P Parameter: Treatment Value: null
  misc_feature: MA Experiment ID: 108595 Result: Down-regulated in Transcription
  misc_feature: MA Experiment 108595 PARAMETER Experiment Name: At_Ler-pi_Ovule_cDNA_P Parameter: Plant Line Value: null
  misc_feature: MA Experiment ID: 20000087 Result: Down-regulated in Transcription
  misc_feature: MA Experiment 20000087 PARAMETER Experiment Name: At_100uM_ABA_Mutants_cDNA_P Parameter: Plant Line Value: WS
  misc_feature: MA Experiment 20000087 PARAMETER Experiment Name: At_100uM_ABA_Mutants_cDNA_P Parameter: Timepoint (hr) Value: 6
  misc_feature: MA Experiment 20000087 PARAMETER Experiment Name: At_100uM_ABA_Mutants_cDNA_P Parameter: Tissue Value: Aerial
  misc_feature: MA Experiment 20000087 PARAMETER Experiment Name: At_100uM_ABA_Mutants_cDNA_P Parameter: Treatment Value: 100uM ABA vs. No Treatment
  misc_feature: MA Experiment ID: 20000306 Result: Up-regulated in Transcription
  misc_feature: MA Experiment 20000306 PARAMETER Experiment Name: At_Germinating_Seeds_Sub_P Parameter: Age (hr) Value: 6 vs. 0
  misc_feature: MA Experiment 20000306 PARAMETER Experiment Name: At_Germinating_Seeds_Sub_P Parameter: Organism Value: A. thaliana
  misc_feature: MA Experiment 20000306 PARAMETER Experiment Name: At_Germinating_Seeds_Sub_P Parameter: Plant Line Value: WS
  misc_feature: MA Experiment 20000306 PARAMETER Experiment Name: At_Germinating_Seeds_Sub_P Parameter: Tissue Value: Germinating Seeds
  misc_feature: MA Experiment ID: 20000307 Result: Up-regulated in Transcription
  misc_feature: MA Experiment 20000307 PARAMETER Experiment Name: At_Germinating_Seeds_Sub_P Parameter: Age (hr) Value: 24 vs. 0
  misc_feature: MA Experiment 20000307 PARAMETER Experiment Name: At_Germinating_Seeds_Sub_P Parameter: Organism Value: A. thaliana
  misc_feature: MA Experiment 20000307 PARAMETER Experiment Name: At_Germinating_Seeds_Sub_P Parameter: Plant Line Value: WS
  misc_feature: MA Experiment 20000307 PARAMETER Experiment Name: At_Germinating_Seeds_Sub_P Parameter: Tissue Value: Germinating Seeds
  misc_feature: MA Experiment ID: 20000314 Result: Up-regulated in Transcription
  misc_feature: MA Experiment 20000314 PARAMETER Experiment Name: At_14day_Shoots-Roots_Sub_P Parameter: Age (day) Value: 14
  misc_feature: MA Experiment 20000314 PARAMETER Experiment Name: At_14day_Shoots-Roots_Sub_P Parameter: Organism Value: A. thaliana
  misc_feature: MA Experiment 20000314 PARAMETER Experiment Name: At_14day_Shoots-Roots_Sub_P Parameter: Plant Line Value: WS
  misc_feature: MA Experiment 20000314 PARAMETER Experiment Name: At_14day_Shoots-Roots_Sub_P Parameter: Tissue Value: Roots vs. Whole Plant
  misc_feature: MA Experiment ID: 20000315 Result: Up-regulated in Transcription
  misc_feature: MA Experiment 20000315 PARAMETER Experiment Name: At_14day_Shoots-Roots_Sub_P Parameter: Age (day) Value: 14
  misc_feature: MA Experiment 20000315 PARAMETER Experiment Name: At_14day_Shoots-Roots_Sub_P Parameter: Organism Value: A. thaliana
  misc_feature: MA Experiment 20000315 PARAMETER Experiment Name: At_14day_Shoots-Roots_Sub_P Parameter: Plant Line Value: WS
  misc_feature: MA Experiment 20000315 PARAMETER Experiment Name: At_14day_Shoots-Roots_Sub_P Parameter: Tissue Value: Shoots vs. Whole Plant
  misc_feature: MA Experiment ID: 20000440 Result: Up-regulated in Transcription
  misc_feature: MA Experiment 20000440 PARAMETER Experiment Name: At_Closed-Flower__Sub_P Parameter: Tissue Value: Closed Flower vs. Whole Plant
atatatccgataaatacttccgtcataacagagtaagagtttgtatgtaacaaatttcaacaaaaagaagagaaaaacaatgggagagaaagcgaaagcaaatgtgttagtcttctcatttccgatacaaggtcacataaaccctctcctccaattctcaaaacgcctactctctaaaaacgtcaacgtcacattcctcaccacttcctccacccacaactccatcctccgccgtgccatcaccggcggagccactgctcttcctctctcttttgtccccattgacgatggattcgaggaagatcacccatctacggacacatctcccgactacttcgcaaagttccaagaaaacgtatctcgaagcctctcagagcttatctcctcgatggacccaaaaccaaacgccgtcgtttacgactcgtgcctgccttatgtcctcgacgtttgccggaaacatcctggcgttgctgcggcgtcgtttttcactcagtcctccaccgtgaacgcgacctatattcatttcttgcgtggagagtttaaggagtttcaaaatgatgtcgttttgcctgcaatgcctccgctgaagggtaatgacttaccggtgtttctgtacgataacaatctctgccggccgttgtttgagctcattagtagccagttcgtgaatgttgacgacattgacttcttcttggttaactctttcgacgaactcgaagtcgaggtgctacaatggatgaaaaaccaatggccggtcaagaacataggaccgatgattccatcaatgtacttagacaaacgattagcaggtgacaaagactacggaatcaacctcttcaatgcccaagtcaacgaatgccttgattggcttgactcaaaaccgcccggttcagtgatctacgtgtcttttggaagcttggccgtcttaaaagacgatcaaatgatagaagtcgcggctggtctaaaacaaactggccataacttcttatgggttgttagagaaactgaaacaaagaagcttccaagcaattacatagaggacatttgtgacaagggattgatagtgaattggagtcctcaattacaagttcttgcacataaatcaatcggttgtttcatgactcattgcgggtggaattcgactttagaggcattgagcttaggagttgctttgataggaatgccggcttatagcgaccagccgactaatgctaagtttattgaagatgtgtggaaggttggggttagggttaaggcagatcaaaatgggtttgttccgaaggaagagattgtgagatgtgttggagaagttatggaagatatgtcggagaaagggaaggagattagaaaaaatgctcggaggttgatggagtttgcaagggaagctttgtctgatggaggaaattctgataagaatattgatgagtttgttgctaaaattgtgaggtaaagtgactgtatgattaatctttgatgcttaattaataatgtgtttttaagagttttcaaaggacgaaatgtttagaatgtaacttgttggtttctttcaaagttatttatgatgtgaacaatgtgatctaaaatggtgttgaacttgggaaa

SEQ ID NO: 98751 - protein, 456 aa, Arabidopsis thaliana; identical to SEQ ID NO: 40585
  peptide (1)..(456): Ceres Seq. ID no. 13601451
  misc_feature (9)..(456): Pfam Name: UDP-glucoronosyl and UDP-glucosyl transferase Pfam Description: UDP-glucoronosyl and UDP-glucosyl transferase
  misc_feature (1)..(456): Homolog of NCBI NO: 15225134 NR Description: glycosyltransferase family [Arabidopsis thaliana]
  misc_feature (1)..(456): Homolog of NCBI NO: 21536917 NR Description: putative glucosyltransferase [Arabidopsis
  misc_feature (7)..(452): Homolog of NCBI NO: 15221233 NR Description: glycosyltransferase family [Arabidopsis thaliana]
  misc_feature (7)..(413): Homolog of NCBI NO: 15221232 NR Description: indole-3-acetate beta-glucosyltransferase [Arabidopsis thaliana] >gi|25406853|pir||H86190 hypothetical
  misc_feature (6)..(455): Homolog of NCBI NO: 7385017 NR Description: UDP-glucose:salicylic acid glucosyltransferase
  misc_feature (1)..(452): Homolog of NCBI NO: 15225138 NR Description: UDP-glycosyltransferase family [Arabidopsis
  misc_feature (3)..(454): Homolog of NCBI NO: 15224372 NR Description: glycosyltransferase family [Arabidopsis thaliana]
  misc_feature (3)..(454): Homolog of NCBI NO: 15224368 NR Description: glycosyltransferase family [Arabidopsis thaliana]
  misc_feature (1)..(454): Homolog of NCBI NO: 15824451 NR Description: thiohydroximate S-glucosyltransferase [Brassica
  misc_feature (4)..(454): Homolog of NCBI NO: 15221668 NR Description: UDP-glycosyltransferase family [Arabidopsis

SEQ ID NO: 98752 - protein, 353 aa, Arabidopsis thaliana; identical to SEQ ID NO: 40586
  peptide (1)..(353): Ceres Seq. ID no. 13601452
  misc_feature (1)..(353): Pfam Name: UDP-glucoronosyl and UDP-glucosyl transferase Pfam Description: UDP-glucoronosyl and UDP-glucosyl transferase
  misc_feature (1)..(353): Homolog of NCBI NO: 15225134 NR Description: glycosyltransferase family [Arabidopsis thaliana]
  misc_feature (1)..(353): Homolog of NCBI NO: 21536917 NR Description: putative glucosyltransferase [Arabidopsis
  misc_feature (1)..(349): Homolog of NCBI NO: 15221233 NR Description: glycosyltransferase family [Arabidopsis thaliana]
  misc_feature (1)..(310): Homolog of NCBI NO: 15221232 NR Description: indole-3-acetate beta-glucosyltransferase [Arabidopsis thaliana] >gi|25406853|pir||H86190 hypothetical
  misc_feature (1)..(352): Homolog of NCBI NO: 7385017 NR Description: UDP-glucose:salicylic acid glucosyltransferase
  misc_feature (1)..(349): Homolog of NCBI NO: 15225138 NR Description: UDP-glycosyltransferase family [Arabidopsis
  misc_feature (1)..(351): Homolog of NCBI NO: 15224372 NR Description: glycosyltransferase family [Arabidopsis thaliana]
  misc_feature (1)..(351): Homolog of NCBI NO: 15224368 NR Description: glycosyltransferase family [Arabidopsis thaliana]
  misc_feature (1)..(351): Homolog of NCBI NO: 15824451 NR Description: thiohydroximate S-glucosyltransferase [Brassica
  misc_feature (1)..(351): Homolog of NCBI NO: 15221668 NR Description: UDP-glycosyltransferase family [Arabidopsis

SEQ ID NO: 98753 - protein, 291 aa, Arabidopsis thaliana; identical to SEQ ID NO: 40587
  peptide (1)..(291): Ceres Seq. ID no. 13601453
  misc_feature (1)..(291): Pfam Name: UDP-glucoronosyl and UDP-glucosyl transferase Pfam Description: UDP-glucoronosyl and UDP-glucosyl transferase
  misc_feature (1)..(291): Homolog of NCBI NO: 15225134 NR Description: glycosyltransferase family [Arabidopsis thaliana]
  misc_feature (1)..(291): Homolog of NCBI NO: 21536917 NR Description: putative glucosyltransferase [Arabidopsis
  misc_feature (1)..(287): Homolog of NCBI NO: 15221233 NR Description: glycosyltransferase family [Arabidopsis thaliana]
  misc_feature (1)..(248): Homolog of NCBI NO: 15221232 NR Description: indole-3-acetate beta-glucosyltransferase [Arabidopsis thaliana] >gi|25406853|pir||H86190 hypothetical
  misc_feature (1)..(290): Homolog of NCBI NO: 7385017 NR Description: UDP-glucose:salicylic acid glucosyltransferase
  misc_feature (1)..(287): Homolog of NCBI NO: 15225138 NR Description: UDP-glycosyltransferase family [Arabidopsis
  misc_feature (1)..(289): Homolog of NCBI NO: 15224372 NR Description: glycosyltransferase family [Arabidopsis thaliana]
  misc_feature (1)..(289): Homolog of NCBI NO: 15224368 NR Description: glycosyltransferase family [Arabidopsis thaliana]
  misc_feature (1)..(289): Homolog of NCBI NO: 15824451 NR Description: thiohydroximate S-glucosyltransferase [Brassica
  misc_feature (1)..(289): Homolog of NCBI NO: 15221668 NR Description: UDP-glycosyltransferase family [Arabidopsis

SEQ ID NO: 98754 - DNA, 1421 bp, Arabidopsis thaliana
  misc_feature (1)..(1421): Ceres Seq. ID no. 13601454
  misc_feature: MA Experiment ID: 20000307 Result: Up-regulated in Transcription
  misc_feature: MA Experiment 20000307 PARAMETER Experiment Name: At_Germinating_Seeds_Sub_P Parameter: Age (hr) Value: 24 vs. 0
  misc_feature: MA Experiment 20000307 PARAMETER Experiment Name: At_Germinating_Seeds_Sub_P Parameter: Organism Value: A. thaliana
  misc_feature: MA Experiment 20000307 PARAMETER Experiment Name: At_Germinating_Seeds_Sub_P Parameter: Plant Line Value: WS
  misc_feature: MA Experiment 20000307 PARAMETER Experiment Name: At_Germinating_Seeds_Sub_P Parameter: Tissue Value: Germinating Seeds
  misc_feature: MA Experiment ID: 20000355 Result: Up-regulated in Transcription
  misc_feature: MA Experiment 20000355 PARAMETER Experiment Name: At_Siliques_Sub_P Parameter: Age (day) Value: 21
  misc_feature: MA Experiment 20000355 PARAMETER Experiment Name: At_Siliques_Sub_P Parameter: Organism Value: A. thaliana
  misc_feature: MA Experiment 20000355 PARAMETER Experiment Name: At_Siliques_Sub_P Parameter: Plant Line Value: WS
  misc_feature: MA Experiment 20000355 PARAMETER Experiment Name: At_Siliques_Sub_P Parameter: Tissue Value: Less Than 5mm Siliques vs. Whole Plant
  misc_feature: MA Experiment ID: 20000440 Result: Up-regulated in Transcription
  misc_feature: MA Experiment 20000440 PARAMETER Experiment Name: At_Closed-Flower__Sub_P Parameter: Tissue Value: Closed Flower vs. Whole Plant
atcatcgatatatacaccgatacatacaccgacacatacgcatgagtgtaagtatacgctcaagtgtgggagcaatctcagatccctccatgaaaacaacgctttataagatgactcattttctgaaacgaactcaactccaagtgtgacacattctcaacgagagatcgtgatcgtacttatatacacacacgcacacttgcaaagcttgggaggaagaagtgatggacaagtatgaggttgtgaaggatttgggagctggaaattttggtgtggctcgtcttcttagacacaaagagaccaaagagctcgttgctatgaaatacattgagagaggtcgcaagattgatgagaatgtggcaagagagattatcaatcatagatcacttaggcatcctaatatcatcagattcaaggaggtgattctgactccaactcatcttgcaattgtaatggagtatgcttctggaggagagctctttgaaagaatctgtaatgctggtagattcagtgaagctgaggctagatacttctttcagcagctgatttgtggcgtggattactgtcattcactgcaaatatgtcatagagatttgaagcttgagaatacactgcttgatggtagtccagccccgcttttgaaaatctgtgattttggttactccaagtcatctctgcttcactctagacctaaatcaactgttggtactccagcttatatcgcacctgaagttctttcccgaagagaatatgacggaaagcatgcggatgtttggtcctgtggtgtgactctttatgtgatgttagttggaggttatccgtttgaagacccggatgatccgagaaacttcaggaaaacaatccaacgtataatggctgtccagtacaagatcccggattacgttcatatatcgcaggagtgcagacaccttctctctcgcatatttgtcactaattcagctaagagaatcacacttaaagagatcaagaagcatccatggtacttaaagaacttgccaaaggagcttacagagcctgctcaagcggcgtactacaagagagaaaccccaagcttttccctccaaagcgtagaggacataatgaagatcgttggagaagccaggaatccagctccgtcttctaatgccgtcaagggctttgatgatgatgaggaagatgtggaggacgaggttgaagaagaagaagaagaagaagaagaagaggaggaagaagaggaagaggaagaagatgaatacgagaagcatgttaaagaggcccattcttgtcaagagcctcccaaagcttaagaaactctcactctgttgtgtaatattcaatctccttgtatctttacgtttatgtgaattcgaagtttcaaaactttatctacgcaattgaccaattagttatcatagcatttg

SEQ ID NO: 98755 - protein, 360 aa, Arabidopsis thaliana
  peptide (1)..(360): Ceres Seq. ID no. 13601455
  misc_feature (4)..(260): Pfam Name: Protein kinase domain Pfam Description: Protein kinase domain
  misc_feature (1)..(360): Homolog of NCBI NO: 15242858 NR Description: serine/threonine protein kinase, putative
  misc_feature (1)..(360): Homolog of NCBI NO: 21593536 NR Description: serine/threonine-protein kinase [Arabidopsis
  misc_feature (1)..(360): Homolog of NCBI NO: 15242317 NR Description: serine/threonine protein kinase (ASK2)
  misc_feature (1)..(360): Homolog of NCBI NO: 99748 NR Description: probable serine/threonine-specific protein kinase
  misc_feature (1)..(356): Homolog of NCBI NO: 19568098 NR Description: osmotic stress-activated protein kinase
MDKYEVVKDLGAGNFGVARLLRHKETKELVAMKYIERGRKIDENVAREIINHRSLRHPNIIRFKEVILTPTHLAIVMEYASGGELFERICNAGRFSEAEARYFFQQLICGVDYCHSLQICHRDLKLENTLLDGSPAPLLKICDFGYSKSSLLHSRPKSTVGTPAYIAPEVLSRREYDGKHADVWSCGVTLYVMLVGGYPFEDPDDPRNFRKTIQRIMAVQYKIPDYVHISQECRHLLSRIFVTNSAKRITLKEIKKHPWYLKNLPKELTEPAQAAYYKRETPSFSLQSVEDIMKIVGEARNPAPSSNAVKGFDDDEEDVEDEVEEEEEEEEEEEEEEEEEEDEYEKHVKEAHSCQEPPKA

SEQ ID NO: 98756 - protein, 329 aa, Arabidopsis thaliana
  peptide (1)..(329): Ceres Seq. ID no. 13601456
  misc_feature (1)..(229): Pfam Name: Protein kinase domain Pfam Description: Protein kinase domain
  misc_feature (1)..(329): Homolog of NCBI NO: 15242858 NR Description: serine/threonine protein kinase, putative
  misc_feature (1)..(329): Homolog of NCBI NO: 21593536 NR Description: serine/threonine-protein kinase [Arabidopsis
  misc_feature (1)..(329): Homolog of NCBI NO: 15242317 NR Description: serine/threonine protein kinase (ASK2)
  misc_feature (1)..(329): Homolog of NCBI NO: 99748 NR Description: probable serine/threonine-specific protein kinase
  misc_feature (1)..(325): Homolog of NCBI NO: 19568098 NR Description: osmotic stress-activated protein kinase
MKYIERGRKIDENVAREIINHRSLRHPNIIRFKEVILTPTHLAIVMEYASGGELFERICNAGRFSEAEARYFFQQLICGVDYCHSLQICHRDLKLENTLLDGSPAPLLKICDFGYSKSSLLHSRPKSTVGTPAYIAPEVLSRREYDGKHADVWSCGVTLYVMLVGGYPFEDPDDPRNFRKTIQRIMAVQYKIPDYVHISQECRHLLSRIFVTNSAKRITLKEIKKHPWYLKNLPKELTEPAQAAYYKRETPSFSLQSVEDIMKIVGEARNPAPSSNAVKGFDDDEEDVEDEVEEEEEEEEEEEEEEEEEEDEYEKHVKEAHSCQEPPKA

SEQ ID NO: 98757 - protein, 284 aa, Arabidopsis thaliana
  peptide (1)..(284): Ceres Seq. ID no. 13601457
  misc_feature (1)..(184): Pfam Name: Protein kinase domain Pfam Description: Protein kinase domain
  misc_feature (1)..(284): Homolog of NCBI NO: 15242858 NR Description: serine/threonine protein kinase, putative
  misc_feature (1)..(284): Homolog of NCBI NO: 21593536 NR Description: serine/threonine-protein kinase [Arabidopsis
  misc_feature (1)..(284): Homolog of NCBI NO: 15242317 NR Description: serine/threonine protein kinase (ASK2)
  misc_feature (1)..(284): Homolog of NCBI NO: 99748 NR Description: probable serine/threonine-specific protein kinase
  misc_feature (1)..(280): Homolog of NCBI NO: 19568098 NR Description: osmotic stress-activated protein kinase
MEYASGGELFERICNAGRFSEAEARYFFQQLICGVDYCHSLQICHRDLKLENTLLDGSPAPLLKICDFGYSKSSLLHSRPKSTVGTPAYIAPEVLSRREYDGKHADVWSCGVTLYVMLVGGYPFEDPDDPRNFRKTIQRIMAVQYKIPDYVHISQECRHLLSRIFVTNSAKRITLKEIKKHPWYLKNLPKELTEPAQAAYYKRETPSFSLQSVEDIMKIVGEARNPAPSSNAVKGFDDDEEDVEDEVEEEEEEEEEEEEEEEEEEDEYEKHVKEAHSCQEPPKA

SEQ ID NO: 98758 - DNA, 1680 bp, Arabidopsis thaliana
  misc_feature (1)..(1680): Ceres Seq. ID no. 13601458
  misc_feature: MA Experiment ID: 20000307 Result: Up-regulated in Transcription
  misc_feature: MA Experiment 20000307 PARAMETER Experiment Name: At_Germinating_Seeds_Sub_P Parameter: Age (hr) Value: 24 vs. 0
  misc_feature: MA Experiment 20000307 PARAMETER Experiment Name: At_Germinating_Seeds_Sub_P Parameter: Organism Value: A. thaliana
  misc_feature: MA Experiment 20000307 PARAMETER Experiment Name: At_Germinating_Seeds_Sub_P Parameter: Plant Line Value: WS
  misc_feature: MA Experiment 20000307 PARAMETER Experiment Name: At_Germinating_Seeds_Sub_P Parameter: Tissue Value: Germinating Seeds
  misc_feature: MA Experiment ID: 20000327 Result: Down-regulated in Transcription
  misc_feature: MA Experiment 20000327 PARAMETER Experiment Name: At_42deg_Heat_Sub_P Parameter: Age (day) Value: 14
  misc_feature: MA Experiment 20000327 PARAMETER Experiment Name: At_42deg_Heat_Sub_P Parameter: Organism Value: A. thaliana
  misc_feature: MA Experiment 20000327 PARAMETER Experiment Name: At_42deg_Heat_Sub_P Parameter: Plant Line Value: WS
  misc_feature: MA Experiment 20000327 PARAMETER Experiment Name: At_42deg_Heat_Sub_P Parameter: Temperature (deg C) Value: 42 vs. 22
  misc_feature: MA Experiment 20000327 PARAMETER Experiment Name: At_42deg_Heat_Sub_P Parameter: Timepoint (hr) Value: 1
  misc_feature: MA Experiment 20000327 PARAMETER Experiment Name: At_42deg_Heat_Sub_P Parameter: Tissue Value: Aerial
  misc_feature: MA Experiment ID: 20000328 Result: Down-regulated in Transcription
  misc_feature: MA Experiment 20000328 PARAMETER Experiment Name: At_42deg_Heat_Sub_P Parameter: Age (day) Value: 14
  misc_feature: MA Experiment 20000328 PARAMETER Experiment Name: At_42deg_Heat_Sub_P Parameter: Organism Value: A. thaliana
  misc_feature: MA Experiment 20000328 PARAMETER Experiment Name: At_42deg_Heat_Sub_P Parameter: Plant Line Value: WS
  misc_feature: MA Experiment 20000328 PARAMETER Experiment Name: At_42deg_Heat_Sub_P Parameter: Temperature (deg C) Value: 42 vs. 22
  misc_feature: MA Experiment 20000328 PARAMETER Experiment Name: At_42deg_Heat_Sub_P Parameter: Timepoint (hr) Value: 6
  misc_feature: MA Experiment 20000328 PARAMETER Experiment Name: At_42deg_Heat_Sub_P Parameter: Tissue Value: Aerial
  misc_feature: MA Experiment ID: 20000347 Result: Down-regulated in Transcription
  misc_feature: MA Experiment 20000347 PARAMETER Experiment Name: At_2mM_SA_Sub_P Parameter: Age (day) Value: 14
  misc_feature: MA Experiment 20000347 PARAMETER Experiment Name: At_2mM_SA_Sub_P Parameter: Organism Value: A. thaliana
  misc_feature: MA Experiment 20000347 PARAMETER Experiment Name: At_2mM_SA_Sub_P Parameter: Plant Line Value: WS
  misc_feature: MA Experiment 20000347 PARAMETER Experiment Name: At_2mM_SA_Sub_P Parameter: Timepoint (hr) Value: 6
  misc_feature: MA Experiment 20000347 PARAMETER Experiment Name: At_2mM_SA_Sub_P Parameter: Tissue Value: Aerial
  misc_feature: MA Experiment 20000347 PARAMETER Experiment Name: At_2mM_SA_Sub_P Parameter: Treatment Value: 2mM SA vs. No Treatment
  misc_feature: MA Experiment ID: 20001807 Result: Up-regulated in Transcription
  misc_feature: MA Experiment 20001807 PARAMETER Experiment Name: At_50mM_NH4NO3_L-to-H_Sub_P Parameter: Timepoint (hr) Value: 6
  misc_feature: MA Experiment 20001807 PARAMETER Experiment Name: At_50mM_NH4NO3_L-to-H_Sub_P Parameter: Tissue Value: Leaf
  misc_feature: MA Experiment 20001807 PARAMETER Experiment Name: At_50mM_NH4NO3_L-to-H_Sub_P Parameter: Treatment Value: 50mM NH4NO3 vs 100mM Mannitol
tgaatctaaaaccactcagctctccgcaccatgtgaaaggttggtgtagtggcaagaactctttcgaatctgaacgccttaagctctgagagacgagcattttccagaaaattcccattacctaatccccaggattcgatgaacccagaaatgatggttttcgaaaggctctagctttctcaaatccagattttgctgaggagctcgttgaaagaatgcaaaatagaccatctctctcttgtcctttgtctttcagatcgtttctctttcaacgtgatattagagtacaatactagataccgtgaggtcctttgtattattggaccttgagttgtcttgtctaagtgggataacctttctagtgaacattttcttggtcagttcatctagtgaactttttttggtctcgtgaagaaatagaagttttctttttcgggcttgatgggtaaagagaatcagttggagacaacaaattgtggagtcaatgatcacgattgtccacccgtcaagaacgaggaactagcagctgaggcgcgttatagtacagacagtgactcgggtttgccaacctgtcgtgtatgccattctgcagaatccgacagacgaggagataccgccttggggtttttggggattacccctccggttccagaagctcgtaaaagcaatgtagatggaaccgctgatgatgtcagcaaagctacagagtctgagctgaagaattctgttgtcaaaagcaatggaagggaatctggcttcatcgaattaacaagtcctgatgcggaagttttcatttgcacaaatgatatagaaatgggaatccagcagcatcaggatgcattgcttgagcttggatgttcttgcaaaaacgagcttgctttggtacactacgcttgcgcgctcaagtggtttctcaaccatggatccaccgtgtgtgaaatctgtggacatcctgcagaaaatataaagactgctgatttcaacaaagtggtcattgccttgagagattacacagcaataagagaaagaactgctgatggaggagatcaaatccctgtattaccggtgaatacagattcaaccattgattcagatgaagttgctgtcattcgaaggcaacgacttagtgagataacgtcatggtttggtccccattccctgaacaacaacaacaacaacaatagttctgttgcggctatccctgaccaacctttaggtgttgtgaacttcgacatcttacctatggaaaaccgtgcaactaaatgggctgtggaaggtactgggattctacttgctacaggtttactcactgttactttggtctggctcattgcccctcgtgttggaaagaaaactgctaggagcggacttcacatacttcttggtggtctctgtgctttaacaatagtcatcttcttcagatttgttgtgctcactagaatcaggtatggtcctgcacgctactgggcaatcttattcatcttctggtttcttgtgtttggtatttgggcttctcgttctaatgcttctcacaatagcccttgaatccaccatctctctcaatctctcatgtctctctatctatctgagtctgtgtattctttctcttggagaaaaatgtacattgcttcattaaagaagaaataagctcatgcttcattgaatatatatatgattcat

SEQ ID NO: 98759 - protein, 367 aa, Arabidopsis thaliana
  peptide (1)..(367): Ceres Seq. ID no. 13601459
  misc_feature (118)..(168): Pfam Name: Zinc finger, C3HC4 type (RING finger) Pfam Description: Zinc finger, C3HC4 type (RING finger)
  misc_feature (1)..(367): Homolog of NCBI NO: 30697894 NR Description: zinc finger (C3HC4-type RING finger) protein [Arabidopsis thaliana] >gi|27311831|gb|AAO00881.1| putative [Arabidopsis thaliana] >gi|30725586|gb|AAP37815.1| At5g63780
  misc_feature (1)..(310): Homolog of NCBI NO: 10177059 NR Description: gb|AAD32776.1~gene_id:MBK5.26~similar to unknown
  misc_feature (303)..(329): Homolog of NCBI NO: 10177059 NR Description: gb|AAD32776.1~gene_id:MBK5.26~similar to unknown
  misc_feature (1)..(366): Homolog of NCBI NO: 18415916 NR Description: zinc finger (C3HC4-type RING finger) protein [Arabidopsis thaliana] >gi|13548333|emb|CAC35880.1| putative [Arabidopsis thaliana] >gi|26451043|dbj|BAC42627.1| unknown
  misc_feature (1)..(366): Homolog of NCBI NO: 16209722 NR Description: AT5g63780/MBK5_26 [Arabidopsis thaliana]
  misc_feature (38)..(357): Homolog of NCBI NO: 38567835 NR Description: OSJNBb0020J19.13 [Oryza sativa (japonica
  misc_feature (81)..(200): Homolog of NCBI NO: 29725746 NR Description: hypothetical protein [Arabidopsis thaliana]
  misc_feature (89)..(200): Homolog of NCBI NO: 15224415 NR Description: zinc finger (C3HC4-type RING finger) protein [Arabidopsis thaliana] >gi|25408580|pir||B84799 hypothetical
MGKENQLETTNCGVNDHDCPPVKNEELAAEARYSTDSDSGLPTCRVCHSAESDRRGDTALGFLGITPPVPEARKSNVDGTADDVSKATESELKNSVVKSNGRESGFIELTSPDAEVFICTNDIEMGIQQHQDALLELGCSCKNELALVHYACALKWFLNHGSTVCEICGHPAENIKTADFNKVVIALRDYTAIRERTADGGDQIPVLPVNTDSTIDSDEVAVIRRQRLSEITSWFGPHSLNNNNNNNSSVAAIPDQPLGVVNFDILPMENRATKWAVEGTGILLATGLLTVTLVWLIAPRVGKKTARSGLHILLGGLCALTIVIFFRFVVLTRIRYGPARYWAILFIFWFLVFGIWASRSNASHNSP

SEQ ID NO: 98760 - protein, 243 aa, Arabidopsis thaliana
  peptide (1)..(243): Ceres Seq. ID no. 13601460
  misc_feature (1)..(44): Pfam Name: Zinc finger, C3HC4 type (RING finger) Pfam Description: Zinc finger, C3HC4 type (RING finger)
  misc_feature (1)..(243): Homolog of NCBI NO: 30697894 NR Description: zinc finger (C3HC4-type RING finger) protein [Arabidopsis thaliana] >gi|27311831|gb|AAO00881.1| putative [Arabidopsis thaliana] >gi|30725586|gb|AAP37815.1| At5g63780
  misc_feature (1)..(186): Homolog of NCBI NO: 10177059 NR Description: gb|AAD32776.1~gene_id:MBK5.26~similar to unknown
  misc_feature (179)..(205): Homolog of NCBI NO: 10177059 NR Description: gb|AAD32776.1~gene_id:MBK5.26~similar to unknown
  misc_feature (1)..(242): Homolog of NCBI NO: 18415916 NR Description: zinc finger (C3HC4-type RING finger) protein [Arabidopsis thaliana] >gi|13548333|emb|CAC35880.1| putative [Arabidopsis thaliana] >gi|26451043|dbj|BAC42627.1| unknown
  misc_feature (1)..(242): Homolog of NCBI NO: 16209722 NR Description: AT5g63780/MBK5_26 [Arabidopsis thaliana]
  misc_feature (1)..(233): Homolog of NCBI NO: 38567835 NR Description: OSJNBb0020J19.13 [Oryza sativa (japonica
  misc_feature (1)..(76): Homolog of NCBI NO: 29725746 NR Description: hypothetical protein [Arabidopsis thaliana]
  misc_feature (1)..(76): Homolog of NCBI NO: 15224415 NR Description: zinc finger (C3HC4-type RING finger) protein [Arabidopsis thaliana] >gi|25408580|pir||B84799 hypothetical
MGIQQHQDALLELGCSCKNELALVHYACALKWFLNHGSTVCEICGHPAENIKTADFNKVVIALRDYTAIRERTADGGDQIPVLPVNTDSTIDSDEVAVIRRQRLSEITSWFGPHSLNNNNNNNSSVAAIPDQPLGVVNFDILPMENRATKWAVEGTGILLATGLLTVTLVWLIAPRVGKKTARSGLHILLGGLCALTIVIFFRFVVLTRIRYGPARYWAILFIFWFLVFGIWASRSNASHNSP

SEQ ID NO: 98761 - DNA, 1801 bp, Arabidopsis thaliana
  misc_feature (1)..(1801): Ceres Seq. ID no. 13601461
  misc_feature: MA Experiment ID: 108569 Result: Up-regulated in Transcription
  misc_feature: MA Experiment 108569 PARAMETER Experiment Name: At_0.001%_MeJA__cDNA_P Parameter: Timepoint (hr) Value: 6
  misc_feature: MA Experiment 108569 PARAMETER Experiment Name: At_0.001%_MeJA__cDNA_P Parameter: Tissue Value: Aerial
  misc_feature: MA Experiment 108569 PARAMETER Experiment Name: At_0.001%_MeJA__cDNA_P Parameter: Treatment Value: 0.001% MeJA vs. No Treatment
  misc_feature: MA Experiment ID: 108573 Result: Up-regulated in Transcription
  misc_feature: MA Experiment 108573 PARAMETER Experiment Name: At_Drought_cDNA_P Parameter: Timepoint (hr) Value: 6
  misc_feature: MA Experiment 108573 PARAMETER Experiment Name: At_Drought_cDNA_P Parameter: Tissue Value: Aerial
  misc_feature: MA Experiment 108573 PARAMETER Experiment Name: At_Drought_cDNA_P Parameter: Treatment Value: Drought vs. No Drought
  misc_feature: MA Experiment ID: 108577 Result: Down-regulated in Transcription
  misc_feature: MA Experiment 108577 PARAMETER Experiment Name: At_42deg_Heat_cDNA_P Parameter: Temperature (deg C) Value: 42 vs. 22
  misc_feature: MA Experiment 108577 PARAMETER Experiment Name: At_42deg_Heat_cDNA_P Parameter: Timepoint (hr) Value: 6
  misc_feature: MA Experiment 108577 PARAMETER Experiment Name: At_42deg_Heat_cDNA_P Parameter: Tissue Value: Aerial
ccgctttctctctctgtctttccttgttcaaccctcgagagattacggatagtgaaagagaagctacaaaatttcccaatttatcaaaaaatagaaatttcttacttttttcaaaattcatttctccccaaaaaaaatatcttgtgaaaactgcaactgtgatccatggcggaggatatggctgccgacgaagttacggctcctcctcgtaaggttcttatcatctccgctggtgctagccactccgtcgctcttctctctggtgacattgtttgttcttggggtcgaggagaggatggacagttaggtcatggcgatgcagaggatcgaccttctccgactcagcttagcgctttagatggccaccaaattgtttccgttacctgtggtgctgatcacactgttgcttattcacaatcaggcatggaagtctacagttggggatggggtgattttgggagattaggccatggtaactcaagcgacttgtttactccgctaccaatcaaagcattgcacggtattcggatcaagcagattgcttgtggggatagtcattgtttggctgtcactatggaaggagaggtccagagttggggccgcaaccagaatggtcaacttggtctgggggacaccgaagattctctagtgcctcagaagattcaagcctttgagggaatacgaatcaaaatggttgctgctggtgcagaacacactgctgcagttacagaagatggtgacctctatggatggggctggggaagatacggaaatttgggattaggtgaccggactgaccgcttagttcctgaaagagttacctctactggtggtgagaaaatgtcaatggttgcttgtggatggcggcacacaatatcagtttcctactctggagcattgtatacttatggatggagcaaatatggacagctaggacatggagacttggaggatcaccttattcctcacaaactggaagcactgagcaacagttttatctcccagatttcgggaggttggagacatacaatggcattgacttcagatggaaaactatatggatggggttggaataagtttggacaagtaggagtcggcaataatttagatcagtgttctcctgtgcaagtgcgatttcccgatgatcagaaagtagttcaagtctcatgtggatggagacataccttggctgtcactgaaagaaataacgtgtttgcttggggtagaggtacaaatggacagctcggcattggagagtcggttgacaggaactttcccaagattatagaggcactcagcgtcgatggagcaagtggacaacatatagaatcttctaatatcgatccatcttcagggaaaagctgggtgtcgcctgcagagagatatgcagttgttcctgatgaaacgggcctaacggatggttcaagcaaaggtaatggaggtgatatcagtgttccacaaactgatgtcaagcgtgtacgaatttgagcctgagtcaattccgttttttttttacttccggttcttccgttggattcgaaggtttttcagtgatctcttttgggttgaggtttgtactaagagtacgtctgtctagtttgggattgtactttttgttgttgttgttagtttgtaacttgtgatgcttccctccccctagctctcttattacatgggcgttgtaaactgtgtgtactactactactagtctctagggtatgtactttttttttcctcaccataataataccttctggttctatatctttcatttcttaaaaagttttctgttttttccttc

SEQ ID NO: 98762 - protein, 440 aa, Arabidopsis thaliana; identical to SEQ ID NO: 98159
  peptide (1)..(440): Ceres Seq. ID no. 13601462
  misc_feature (294)..(343): Pfam Name: Regulator of chromosome condensation (RCC1) Pfam Description: Regulator of chromosome condensation (RCC1)
  misc_feature (1)..(440): Homolog of NCBI NO: 15237540 NR Description: UVB-resistance protein UVR8 (gb|AAD43920.1)
  misc_feature (1)..(440): Homolog of NCBI NO: 11358913 NR Description: UVB-resistance protein UVR8 [imported] -
  misc_feature (1)..(440): Homolog of NCBI NO: 32487442 NR Description: OSJNBa0006B20.1 [Oryza sativa (japonica
  misc_feature (1)..(220): Homolog of NCBI NO: 21741206 NR Description: OSJNBb0086G13.1 [Oryza sativa (japonica
  misc_feature (1)..(256): Homolog of NCBI NO: 31240555 NR Description: ENSANGP00000020044 [Anopheles gambiae]
  misc_feature (240)..(378): Homolog of NCBI NO: 31240555 NR Description: ENSANGP00000020044 [Anopheles gambiae]
  misc_feature (15)..(323): Homolog of NCBI NO: 32451488 NR Description: RIKEN cDNA 1700056O17 [Mus musculus]
  misc_feature (15)..(323): Homolog of NCBI NO: 34852488 NR Description: similar to HECT domain and RCC1-like domain
  misc_feature (15)..(323): Homolog of NCBI NO: 37620181 NR Description: DKFZP564G092 protein [Homo sapiens]
  misc_feature (15)..(321): Homolog of NCBI NO: 24659266 NR Description: Similar to hect domain and RLD 3 [Homo sapiens]

SEQ ID NO: 98763 - protein, 436 aa, Arabidopsis thaliana; identical to SEQ ID NO: 98160
  peptide (1)..(436): Ceres Seq. ID no. 13601463
  misc_feature (290)..(339): Pfam Name: Regulator of chromosome condensation (RCC1) Pfam Description: Regulator of chromosome condensation (RCC1)
  misc_feature (1)..(436): Homolog of NCBI NO: 15237540 NR Description: UVB-resistance protein UVR8 (gb|AAD43920.1)
  misc_feature (1)..(436): Homolog of NCBI NO: 11358913 NR Description: UVB-resistance protein UVR8 [imported] -
  misc_feature (1)..(436): Homolog of NCBI NO: 32487442 NR Description: OSJNBa0006B20.1 [Oryza sativa (japonica
  misc_feature (1)..(216): Homolog of NCBI NO: 21741206 NR Description: OSJNBb0086G13.1 [Oryza sativa (japonica
  misc_feature (1)..(252): Homolog of NCBI NO: 31240555 NR Description: ENSANGP00000020044 [Anopheles gambiae]
  misc_feature (236)..(374): Homolog of NCBI NO: 31240555 NR Description: ENSANGP00000020044 [Anopheles gambiae]
  misc_feature (11)..(319): Homolog of NCBI NO: 32451488 NR Description: RIKEN cDNA 1700056O17 [Mus musculus]
  misc_feature (11)..(319): Homolog of NCBI NO: 34852488 NR Description: similar to HECT domain and RCC1-like domain
  misc_feature (11)..(319): Homolog of NCBI NO: 37620181 NR Description: DKFZP564G092 protein [Homo sapiens]
  misc_feature (11)..(317): Homolog of NCBI NO: 24659266 NR Description: Similar to hect domain and RLD 3 [Homo sapiens]

SEQ ID NO: 98764 - protein, 354 aa, Arabidopsis thaliana; identical to SEQ ID NO: 98161
  peptide (1)..(354): Ceres Seq. ID no. 13601464
  misc_feature (208)..(257): Pfam Name: Regulator of chromosome condensation (RCC1) Pfam Description: Regulator of chromosome condensation (RCC1)
  misc_feature (1)..(354): Homolog of NCBI NO: 15237540 NR Description: UVB-resistance protein UVR8 (gb|AAD43920.1)
  misc_feature (1)..(354): Homolog of NCBI NO: 11358913 NR Description: UVB-resistance protein UVR8 [imported] -
  misc_feature (1)..(354): Homolog of NCBI NO: 32487442 NR Description: OSJNBa0006B20.1 [Oryza sativa (japonica
  misc_feature (1)..(134): Homolog of NCBI NO: 21741206 NR Description: OSJNBb0086G13.1 [Oryza sativa (japonica
  misc_feature (1)..(170): Homolog of NCBI NO: 31240555 NR Description: ENSANGP00000020044 [Anopheles gambiae]
  misc_feature (154)..(292): Homolog of NCBI NO: 31240555 NR Description: ENSANGP00000020044 [Anopheles gambiae]
  misc_feature (1)..(237): Homolog of NCBI NO: 32451488 NR Description: RIKEN cDNA 1700056O17 [Mus musculus]
  misc_feature (1)..(237): Homolog of NCBI NO: 34852488 NR Description: similar to HECT domain and RCC1-like domain
  misc_feature (1)..(237): Homolog of NCBI NO: 37620181 NR Description: DKFZP564G092 protein [Homo sapiens]
  misc_feature (1)..(235): Homolog of NCBI NO: 24659266 NR Description: Similar to hect domain and RLD 3 [Homo sapiens]

SEQ ID NO: 98765 - DNA, 493 bp, Arabidopsis thaliana
  misc_feature (1)..(493): Ceres Seq. ID no. 13601467
  misc_feature: MA Experiment ID: 20000265 Result: Down-regulated in Transcription
  misc_feature: MA Experiment 20000265 PARAMETER Experiment Name: At_Open_Flower_P Parameter: Age (day) Value: 21
  misc_feature: MA Experiment 20000265 PARAMETER Experiment Name: At_Open_Flower_P Parameter: Plant Line Value: WS
  misc_feature: MA Experiment 20000265 PARAMETER Experiment Name: At_Open_Flower_P Parameter: Tissue Value: Closed Flower vs. Whole Plant
  misc_feature: MA Experiment ID: 20000794 Result: Up-regulated in Transcription
  misc_feature: MA Experiment 20000794 PARAMETER Experiment Name: At_Petals_P Parameter: Age (day) Value: 23-25 days
  misc_feature: MA Experiment 20000794 PARAMETER Experiment Name: At_Petals_P Parameter: Plant Line Value: WS
  misc_feature: MA Experiment 20000794 PARAMETER Experiment Name: At_Petals_P Parameter: Tissue Value: Petals vs. Whole plant
  misc_feature: MA Experiment ID: 20001247 Result: Up-regulated in Transcription
  misc_feature: MA Experiment 20001247 PARAMETER Experiment Name: At_Far-red-induction_P Parameter: Age (day) Value: 7
  misc_feature: MA Experiment 20001247 PARAMETER Experiment Name: At_Far-red-induction_P Parameter: Light Value: Far-red vs. White
  misc_feature: MA Experiment 20001247 PARAMETER Experiment Name: At_Far-red-induction_P Parameter: Organism Value: A. thaliana
  misc_feature: MA Experiment 20001247 PARAMETER Experiment Name: At_Far-red-induction_P Parameter: Plant Line Value: Columbia
  misc_feature: MA Experiment 20001247 PARAMETER Experiment Name: At_Far-red-induction_P Parameter: Timepoint (hr) Value: 1
  misc_feature: MA Experiment 20001247 PARAMETER Experiment Name: At_Far-red-induction_P Parameter: Tissue Value: Whole Plant
  misc_feature: MA Experiment ID: 20001451 Result: Up-regulated in Transcription
  misc_feature: MA Experiment 20001451 PARAMETER Experiment Name: At_Far-red-induction_P Parameter: Age (day) Value: 7
  misc_feature: MA Experiment 20001451 PARAMETER Experiment Name: At_Far-red-induction_P Parameter: Light Value: Far-red vs. White
  misc_feature: MA Experiment 20001451 PARAMETER Experiment Name: At_Far-red-induction_P Parameter: Organism Value: A. thaliana
  misc_feature: MA Experiment 20001451 PARAMETER Experiment Name: At_Far-red-induction_P Parameter: Plant Line Value: Columbia
  misc_feature: MA Experiment 20001451 PARAMETER Experiment Name: At_Far-red-induction_P Parameter: Timepoint (hr) Value: 24
  misc_feature: MA Experiment 20001451 PARAMETER Experiment Name: At_Far-red-induction_P Parameter: Tissue Value: Whole Plant
attctgcagaagacgcgtcttctttcttcttcggtaaacttcaaatcagaagcgaagaagagatcaaatcaatctgatcgtagatgggttgtttcagttgcttcgacggaacccaaaaggaacagcgtaaggaagaagagagacaagcctccgccgaagctcgtgccaaagccgccgaagctgcccagcgacggaaagagcagtttgataagtctgcagctggaagagctgcacaagctcaattacaacaaatggctaaacaatctgcaaatactaacaaaggagagcctgttcttaagtggcaaatgacgtagtgatgagtcctggtttcaaaaggaatcaatttgtgcgatttggttctttgtaaattgtgtgttcttcaatgtttgcaatactttggttatgtgaattgaagcttattttcttccttattcatctgattatcttttgacttttgtaaaacaaaaaagaaataacagagtacaatgttaag

SEQ ID NO: 98766 - protein, 102 aa, Arabidopsis thaliana
  peptide (1)..(102): Ceres Seq. ID no. 13601468
ILQKTRLLSSSVNFKSEAKKRSNQSDRRWVVSVASTEPKRNSVRKKRDKPPPKLVPKPPKLPSDGKSSLISLQLEELHKLNYNKWLNNLQILTKESLFLSGK

SEQ ID NO: 98767 - protein, 76 aa, Arabidopsis thaliana; identical to SEQ ID NO: 23164
  peptide (1)..(76): Ceres Seq. ID no. 13601469
  misc_feature (1)..(76): Homolog of NCBI NO: 18424765 NR Description: expressed protein [Arabidopsis thaliana]

SEQ ID NO: 98768 - DNA, 1251 bp, Arabidopsis thaliana
  misc_feature (1)..(1251): Ceres Seq. ID no. 13601474
  misc_feature: MA Experiment ID: 108461 Result: Up-regulated in Transcription
  misc_feature: MA Experiment 108461 PARAMETER Experiment Name: At_Germinating_Seeds_cDNA_P Parameter: Age (day) Value: 1 vs. 0
  misc_feature: MA Experiment 108461 PARAMETER Experiment Name: At_Germinating_Seeds_cDNA_P Parameter: Tissue Value: Germinating Seeds
  misc_feature: MA Experiment ID: 108579 Result: Up-regulated in Transcription
  misc_feature: MA Experiment 108579 PARAMETER Experiment Name: At_4deg_Cold_cDNA_P Parameter: Temperature (deg C) Value: 4 vs. 22
  misc_feature: MA Experiment 108579 PARAMETER Experiment Name: At_4deg_Cold_cDNA_P Parameter: Timepoint (hr) Value: 6
  misc_feature: MA Experiment 108579 PARAMETER Experiment Name: At_4deg_Cold_cDNA_P Parameter: Tissue Value: Aerial
  misc_feature: MA Experiment ID: 108595 Result: Up-regulated in Transcription
  misc_feature: MA Experiment 108595 PARAMETER Experiment Name: At_Ler-pi_Ovule_cDNA_P Parameter: Plant Line Value: null
  misc_feature: MA Experiment ID: 108668 Result: Up-regulated in Transcription
  misc_feature: MA Experiment 108668 PARAMETER Experiment Name: At_2mM_SA_cDNA_P Parameter: Plant Line Value: WS
  misc_feature: MA Experiment 108668 PARAMETER Experiment Name: At_2mM_SA_cDNA_P Parameter: Timepoint (hr) Value: 6
  misc_feature: MA Experiment 108668 PARAMETER Experiment Name: At_2mM_SA_cDNA_P Parameter: Treatment Value: 2mM SA vs. No Treatment
  misc_feature: MA Experiment ID: 20000224 Result: Up-regulated in Transcription
  misc_feature: MA Experiment ID: 20000527 Result: Down-regulated in Transcription
  misc_feature: MA Experiment 20000527 PARAMETER Experiment Name: At_10percent_PEG_P Parameter: Age (day) Value: 20
  misc_feature: MA Experiment 20000527 PARAMETER Experiment Name: At_10percent_PEG_P Parameter: Organism Value: A. thaliana
  misc_feature: MA Experiment 20000527 PARAMETER Experiment Name: At_10percent_PEG_P Parameter: Plant Line Value: WS
  misc_feature: MA Experiment 20000527 PARAMETER Experiment Name: At_10percent_PEG_P Parameter: Timepoint (day) Value: 20
  misc_feature: MA Experiment 20000527 PARAMETER Experiment Name: At_10percent_PEG_P Parameter: Tissue Value: Whole Plant
  misc_feature: MA Experiment 20000527 PARAMETER Experiment Name: At_10percent_PEG_P Parameter: Treatment Value: 10percent PEG vs. No Treatment
aacttcgtggtactcttttgctttacccatttttcaatgtcttacgatgagatgctttctgctgcgaagaaagctgtttctctcgctgctcgtctcagcaacgaagtgaggaaatctctgttggtaactgacgtttggaacaaatcagatgatagtcctgttactgttgctgattatggttcgcaggcggtggttagccttgtactggaaagggaactccagaatgaacctgtgtctttagtggctgaagaggattctggtgagttaaggaagattgctgctgagaccgttttggctcgtattacagagcttgtcaaagatactcttgcaagtgatgaatcatatgctattgcttctcctttgacttcggatgatgtgctcaacgctatagatcgtggtaaatcagaaggaggtcctaagggtcgccactggatcttggatcctattggtggcactagaggatttataagaggagaacaatatgcaataggattagcattgttggtggaaggcaaagtagtactaggtgtaatggcttgtcctaagcttccattggcatcaactgctggtaatgcactcaagtctttacctgaaaaagttggttgccttttctatggttcggttggcaatgggacttatgtccagtctctcagtgtcgactctcttcctgcgaaggtggaggttagcagcatagatgatcctgcgaaagcgagtttcttcgagtcataccacacacctgtccccatccataacaccattgctacgaaattggggataaaagaatctccaatcaagatcaacagccagactaagtatgcagctttatctagaggagatggagaggtttacttgaggtttactcgcaaagcaagacccgaatcaatatggaatcacgctgctggctcaatcattgtttcagaagcaggagggaaagtgactgatgcagcagggaatccattggacttttcgaaagggaagtatcttgattacaagagaggaatcgtcgttacgacgcagaaactgttgccaaggcttttaacagcagtaagagaatcaattaaagaagaagaagaggaagaagaaaaagctgcttctctaaaacttcactaacacgcaactgtaatatacttattattgttgtctttgggtatactctgttgtctctgtgtttttcacagtctatttattgaaaaccagaaacaaaaaaaaaactcacctttgatatatataagaaacactaattctcttttg

SEQ ID NO: 98769 - protein, 369 aa, Arabidopsis thaliana; identical to SEQ ID NO: 38592
  peptide (1)..(369): Ceres Seq. ID no. 13601475
  misc_feature (13)..(369): Homolog of NCBI NO: 18424775 NR Description: 3(2),5-bisphosphate nucleotidase [Arabidopsis
  misc_feature (13)..(369): Homolog of NCBI NO: 21618152 NR Description: 3(2),5-bisphosphate nucleotidase [Arabidopsis
  misc_feature (13)..(369): Homolog of NCBI NO: 8777312 NR Description: 3'(2'),5'-bisphosphate nucleotidase [Arabidopsis
  misc_feature (13)..(356): Homolog of NCBI NO: 15237589 NR Description: 3(2),5-bisphosphate nucleotidase (emb|CAB05889.1)
  misc_feature (13)..(358): Homolog of NCBI NO: 15237567 NR Description: 3(2),5-bisphosphate nucleotidase [Arabidopsis
  misc_feature (13)..(356): Homolog of NCBI NO: 34395640 NR Description: Probable SAL4 phosphatase (3'(2'),5'-bisphosphate
  misc_feature (13)..(356): Homolog of NCBI NO: 15242383 NR Description: 3'(2'),5'-bisphosphate nucleotidase-related
  misc_feature (15)..(366): Homolog of NCBI NO: 14268820 NR Description: diphosphonucleotide phosphatase 1 [Zea mays]
  misc_feature (15)..(358): Homolog of NCBI NO: 3913517 NR Description: 3'(2'),5'-BISPHOSPHATE NUCLEOTIDASE (3'(2'),5-
  misc_feature (14)..(329): Homolog of NCBI NO: 15239631 NR Description: HAL2-related protein (Ahl) [Arabidopsis thaliana]

SEQ ID NO: 98770 - protein, 357 aa, Arabidopsis thaliana; identical to SEQ ID NO: 38593
  peptide (1)..(357): Ceres Seq. ID no. 13601476
  misc_feature (1)..(357): Homolog of NCBI NO: 18424775 NR Description: 3(2),5-bisphosphate nucleotidase [Arabidopsis
  misc_feature (1)..(357): Homolog of NCBI NO: 21618152 NR Description: 3(2),5-bisphosphate nucleotidase [Arabidopsis
  misc_feature (1)..(357): Homolog of NCBI NO: 8777312 NR Description: 3'(2'),5'-bisphosphate nucleotidase [Arabidopsis
  misc_feature (1)..(344): Homolog of NCBI NO: 15237589 NR Description: 3(2),5-bisphosphate nucleotidase (emb|CAB05889.1)
  misc_feature (1)..(346): Homolog of NCBI NO: 15237567 NR Description: 3(2),5-bisphosphate nucleotidase [Arabidopsis
  misc_feature (1)..(344): Homolog of NCBI NO: 34395640 NR Description: Probable SAL4 phosphatase (3'(2'),5'-bisphosphate
  misc_feature (1)..(344): Homolog of NCBI NO: 15242383 NR Description: 3'(2'),5'-bisphosphate nucleotidase-related
  misc_feature (3)..(354): Homolog of NCBI NO: 14268820 NR Description: diphosphonucleotide phosphatase 1 [Zea mays]
  misc_feature (3)..(346): Homolog of NCBI NO: 3913517 NR Description: 3'(2'),5'-BISPHOSPHATE NUCLEOTIDASE (3'(2'),5-
  misc_feature (2)..(317): Homolog of NCBI NO: 15239631 NR Description: HAL2-related protein (Ahl) [Arabidopsis thaliana]

SEQ ID NO: 98771 - protein, 352 aa, Arabidopsis thaliana; identical to SEQ ID NO: 38594
  peptide (1)..(352): Ceres Seq. ID no. 13601477
  misc_feature (1)..(352): Homolog of NCBI NO: 18424775 NR Description: 3(2),5-bisphosphate nucleotidase [Arabidopsis
  misc_feature (1)..(352): Homolog of NCBI NO: 21618152 NR Description: 3(2),5-bisphosphate nucleotidase [Arabidopsis
  misc_feature (1)..(352): Homolog of NCBI NO: 8777312 NR Description: 3'(2'),5'-bisphosphate nucleotidase [Arabidopsis
  misc_feature (1)..(339): Homolog of NCBI NO: 15237589 NR Description: 3(2),5-bisphosphate nucleotidase (emb|CAB05889.1)
  misc_feature (1)..(341): Homolog of NCBI NO: 15237567 NR Description: 3(2),5-bisphosphate nucleotidase [Arabidopsis
  misc_feature (1)..(339): Homolog of NCBI NO: 34395640 NR Description: Probable SAL4 phosphatase (3'(2'),5'-bisphosphate
  misc_feature (1)..(339): Homolog of NCBI NO: 15242383 NR Description: 3'(2'),5'-bisphosphate nucleotidase-related
  misc_feature (1)..(349): Homolog of NCBI NO: 14268820 NR Description: diphosphonucleotide phosphatase 1 [Zea mays]
  misc_feature (1)..(341): Homolog of NCBI NO: 3913517 NR Description: 3'(2'),5'-BISPHOSPHATE NUCLEOTIDASE (3'(2'),5-
  misc_feature (1)..(312): Homolog of NCBI NO: 15239631 NR Description: HAL2-related protein (Ahl) [Arabidopsis thaliana]

SEQ ID NO: 98772 - DNA, 845 bp, Arabidopsis thaliana
  misc_feature (1)..(845): Ceres Seq. ID no. 13601478
  misc_feature: MA Experiment ID: 108462 Result: Down-regulated in Transcription
  misc_feature: MA Experiment 108462 PARAMETER Experiment Name: At_Germinating_Seeds_cDNA_P Parameter: Age (day) Value: 2 vs. 0
  misc_feature: MA Experiment 108462 PARAMETER Experiment Name: At_Germinating_Seeds_cDNA_P Parameter: Tissue Value: Germinating Seeds
  misc_feature: MA Experiment ID: 108464 Result: Down-regulated in Transcription
  misc_feature: MA Experiment 108464 PARAMETER Experiment Name: At_Germinating_Seeds_cDNA_P Parameter: Age (day) Value: 4 vs. 0
  misc_feature: MA Experiment 108464 PARAMETER Experiment Name: At_Germinating_Seeds_cDNA_P Parameter: Tissue Value: Germinating Seeds
  misc_feature: MA Experiment ID: 108573 Result: Up-regulated in Transcription
  misc_feature: MA Experiment 108573 PARAMETER Experiment Name: At_Drought_cDNA_P Parameter: Timepoint (hr) Value: 6
  misc_feature: MA Experiment 108573 PARAMETER Experiment Name: At_Drought_cDNA_P Parameter: Tissue Value: Aerial
  misc_feature: MA Experiment 108573 PARAMETER Experiment Name: At_Drought_cDNA_P Parameter: Treatment Value: Drought vs. No Drought
  misc_feature: MA Experiment ID: 108668 Result: Down-regulated in Transcription
  misc_feature: MA Experiment 108668 PARAMETER Experiment Name: At_2mM_SA_cDNA_P Parameter: Plant Line Value: WS
  misc_feature: MA Experiment 108668 PARAMETER Experiment Name: At_2mM_SA_cDNA_P Parameter: Timepoint (hr) Value: 6
  misc_feature: MA Experiment 108668 PARAMETER Experiment Name: At_2mM_SA_cDNA_P Parameter: Treatment Value: 2mM SA vs. No Treatment
  misc_feature: MA Experiment ID: 20000111 Result: Up-regulated in Transcription
  misc_feature: MA Experiment 20000111 PARAMETER Experiment Name: At_42deg_Heat_cDNA_P Parameter: Temperature (deg C) Value: 42 vs. 22
  misc_feature: MA Experiment 20000111 PARAMETER Experiment Name: At_42deg_Heat_cDNA_P Parameter: Timepoint (hr) Value: 6
  misc_feature: MA Experiment 20000111 PARAMETER Experiment Name: At_42deg_Heat_cDNA_P Parameter: Tissue Value: Aerial
  misc_feature: MA Experiment ID: 20000180 Result: Down-regulated in Transcription
  misc_feature: MA Experiment 20000180 PARAMETER Experiment Name: At_Germinating_Seeds_P Parameter: Age (hr) Value: 24 vs. 0
  misc_feature: MA Experiment 20000180 PARAMETER Experiment Name: At_Germinating_Seeds_P Parameter: Tissue Value: Germinating Seeds
  misc_feature: MA Experiment ID: 20000227 Result: Down-regulated in Transcription
  misc_feature: MA Experiment 20000227 PARAMETER Experiment Name: At_Root-Tips-vs-Tops_P Parameter: Tissue Value: Root Tips vs. Root Tops
  misc_feature: MA Experiment ID: 20000234 Result: Up-regulated in Transcription
  misc_feature: MA Experiment 20000234 PARAMETER Experiment Name: At_Siliques_P Parameter: Age (day) Value: 21
  misc_feature: MA Experiment 20000234 PARAMETER Experiment Name: At_Siliques_P Parameter: Organism Value: A. thaliana
  misc_feature: MA Experiment 20000234 PARAMETER Experiment Name: At_Siliques_P Parameter: Plant Line Value: WS
  misc_feature: MA Experiment 20000234 PARAMETER Experiment Name: At_Siliques_P Parameter: Tissue Value: Less Than 5mm Siliques vs. Whole Plant
  misc_feature: MA Experiment ID: 20000264 Result: Up-regulated in Transcription
  misc_feature: MA Experiment 20000264 PARAMETER Experiment Name: At_Open_Flower_P Parameter: Age (day) Value: 21
  misc_feature: MA Experiment 20000264 PARAMETER Experiment Name: At_Open_Flower_P Parameter: Plant Line Value: WS
  misc_feature: MA Experiment 20000264 PARAMETER Experiment Name: At_Open_Flower_P Parameter: Tissue Value: Open Flower vs. Whole Plant
  misc_feature: MA Experiment ID: 20000265 Result: Up-regulated in Transcription
  misc_feature: MA Experiment 20000265 PARAMETER Experiment Name: At_Open_Flower_P Parameter: Age (day) Value: 21
  misc_feature: MA Experiment 20000265 PARAMETER Experiment Name: At_Open_Flower_P Parameter: Plant Line Value: WS
  misc_feature: MA Experiment 20000265 PARAMETER Experiment Name: At_Open_Flower_P Parameter: Tissue Value: Closed Flower vs. Whole Plant
  misc_feature: MA Experiment ID: 20000286 Result: Up-regulated in Transcription
  misc_feature: MA Experiment 20000286 PARAMETER Experiment Name: At_Open_Flower_P Parameter: Age (day) Value: 21
  misc_feature: MA Experiment 20000286 PARAMETER Experiment Name: At_Open_Flower_P Parameter: Plant Line Value: WS
  misc_feature: MA Experiment 20000286 PARAMETER Experiment Name: At_Open_Flower_P Parameter: Tissue Value: Half Open vs. Whole Plant
  misc_feature: MA Experiment ID: 20000436 Result: Up-regulated in Transcription
  misc_feature: MA Experiment 20000436 PARAMETER Experiment Name: At_Drought_P Parameter: Age (day) Value: 7
  misc_feature: MA Experiment 20000436 PARAMETER Experiment Name: At_Drought_P Parameter: Organism Value: A. thaliana
  misc_feature: MA Experiment 20000436 PARAMETER Experiment Name: At_Drought_P Parameter: Plant Line Value: WS
  misc_feature: MA Experiment 20000436 PARAMETER Experiment Name: At_Drought_P Parameter: Timepoint (hr) Value: 12
  misc_feature: MA Experiment 20000436 PARAMETER Experiment Name: At_Drought_P Parameter: Tissue Value: Whole Plant
  misc_feature: MA Experiment 20000436 PARAMETER Experiment Name: At_Drought_P Parameter: Treatment Value: Drought vs. No Drought
  misc_feature: MA Experiment ID: 20000437 Result: Up-regulated in Transcription
  misc_feature: MA Experiment 20000437 PARAMETER Experiment Name: At_Drought_P Parameter: Age (day) Value: 8
  misc_feature: MA Experiment 20000437 PARAMETER Experiment Name: At_Drought_P Parameter: Organism Value: A. thaliana
  misc_feature: MA Experiment 20000437 PARAMETER Experiment Name: At_Drought_P Parameter: Plant Line Value: WS
  misc_feature: MA Experiment 20000437 PARAMETER Experiment Name: At_Drought_P Parameter: Timepoint (hr) Value: 24
  misc_feature: MA Experiment 20000437 PARAMETER Experiment Name: At_Drought_P Parameter: Tissue Value: Whole Plant
  misc_feature: MA Experiment 20000437 PARAMETER Experiment Name: At_Drought_P Parameter: Treatment Value: Drought vs. No Drought
  misc_feature: MA Experiment ID: 20000495 Result: Up-regulated in Transcription
  misc_feature: MA Experiment 20000495 PARAMETER Experiment Name: At_Guard_Cells_P Parameter: Harvest Date Value: 8/2/2002
  misc_feature: MA Experiment 20000495 PARAMETER Experiment Name: At_Guard_Cells_P Parameter: Organism Value: A. thaliana
  misc_feature: MA Experiment 20000495 PARAMETER Experiment Name: At_Guard_Cells_P Parameter: Tissue Value: Guard Cells vs. Leaves
  misc_feature: MA Experiment ID: 20001450 Result: Down-regulated in Transcription
  misc_feature: MA Experiment 20001450 PARAMETER Experiment Name: At_Far-red-induction_P Parameter: Age (day) Value: 7
  misc_feature: MA Experiment 20001450 PARAMETER Experiment Name: At_Far-red-induction_P Parameter: Light Value: Far-red vs. White
  misc_feature: MA Experiment 20001450 PARAMETER Experiment Name: At_Far-red-induction_P Parameter: Organism Value: A. thaliana
  misc_feature: MA Experiment 20001450 PARAMETER Experiment Name: At_Far-red-induction_P Parameter: Plant Line Value: Columbia
  misc_feature: MA Experiment 20001450 PARAMETER Experiment Name: At_Far-red-induction_P Parameter: Timepoint (hr) Value: 8
  misc_feature: MA Experiment 20001450 PARAMETER Experiment Name: At_Far-red-induction_P Parameter: Tissue Value: Whole Plant
  misc_feature: MA Experiment ID: 20001556 Result: Up-regulated in Transcription
  misc_feature: MA Experiment 20001556 PARAMETER Experiment Name: At_Drought_Soil_Dry_P Parameter: Age (day) Value: 26
  misc_feature: MA Experiment 20001556 PARAMETER Experiment Name: At_Drought_Soil_Dry_P Parameter: Organism Value: A. thaliana
  misc_feature: MA Experiment 20001556 PARAMETER Experiment Name: At_Drought_Soil_Dry_P Parameter: Plant Line Value: WS
  misc_feature: MA Experiment 20001556 PARAMETER Experiment Name: At_Drought_Soil_Dry_P Parameter: Post Timepoint (hr) Value: None
  misc_feature: MA Experiment 20001556 PARAMETER Experiment Name: At_Drought_Soil_Dry_P Parameter: Post-Treatment Value: None
  misc_feature: MA Experiment 20001556 PARAMETER Experiment Name: At_Drought_Soil_Dry_P Parameter: Timepoint (day) Value: 12
  misc_feature: MA Experiment 20001556 PARAMETER Experiment Name: At_Drought_Soil_Dry_P Parameter: Treatment Value: Drought vs. No Drought
  misc_feature: MA Experiment ID: 20001559 Result: Up-regulated in Transcription
  misc_feature: MA Experiment 20001559 PARAMETER Experiment Name: At_Drought_Soil_Dry_P Parameter: Age (day) Value: 28
  misc_feature: MA Experiment 20001559 PARAMETER Experiment Name: At_Drought_Soil_Dry_P Parameter: Organism Value: A. thaliana
  misc_feature: MA Experiment 20001559 PARAMETER Experiment Name: At_Drought_Soil_Dry_P Parameter: Plant Line Value: WS
  misc_feature: MA Experiment 20001559 PARAMETER Experiment Name: At_Drought_Soil_Dry_P Parameter: Post Timepoint (hr) Value: 29
  misc_feature: MA Experiment 20001559 PARAMETER Experiment Name: At_Drought_Soil_Dry_P Parameter: Post-Treatment Value: Re-Water vs. No Drought
  misc_feature: MA Experiment 20001559 PARAMETER Experiment Name: At_Drought_Soil_Dry_P Parameter: Timepoint (day) Value: 14
  misc_feature: MA Experiment 20001559 PARAMETER Experiment Name: At_Drought_Soil_Dry_P Parameter: Treatment Value: Drought vs. No Drought
  misc_feature: MA Experiment ID: 20001560 Result: Up-regulated in Transcription
  misc_feature: MA Experiment 20001560 PARAMETER Experiment Name: At_Drought_Soil_Dry_P Parameter: Age (day) Value: 28
  misc_feature: MA Experiment 20001560 PARAMETER Experiment Name: At_Drought_Soil_Dry_P Parameter: Organism Value: A. thaliana
  misc_feature: MA Experiment 20001560 PARAMETER Experiment Name: At_Drought_Soil_Dry_P Parameter: Plant Line Value: WS
  misc_feature: MA Experiment 20001560 PARAMETER Experiment Name: At_Drought_Soil_Dry_P Parameter: Post Timepoint (hr) Value: None
  misc_feature: MA Experiment 20001560 PARAMETER Experiment Name: At_Drought_Soil_Dry_P Parameter: Post-Treatment Value: None
  misc_feature: MA Experiment 20001560 PARAMETER Experiment Name: At_Drought_Soil_Dry_P Parameter: Timepoint (day) Value: 14
  misc_feature: MA Experiment 20001560 PARAMETER Experiment Name: At_Drought_Soil_Dry_P Parameter: Treatment Value: Drought vs. No Drought
  misc_feature: MA Experiment ID: 20001904 Result: Up-regulated in Transcription
  misc_feature: MA Experiment 20001904 PARAMETER Experiment Name: At_Drought_Reproduction_P Parameter: Age (day) Value: 37
  misc_feature: MA Experiment 20001904 PARAMETER Experiment Name: At_Drought_Reproduction_P Parameter: Organism Value: A. thaliana
  misc_feature: MA Experiment 20001904 PARAMETER Experiment Name: At_Drought_Reproduction_P Parameter: Plant Line Value: WS
  misc_feature: MA Experiment 20001904 PARAMETER Experiment Name: At_Drought_Reproduction_P Parameter: Timepoint (day) Value: 7
  misc_feature: MA Experiment 20001904 PARAMETER Experiment Name: At_Drought_Reproduction_P Parameter: Tissue Value: Rosettes
  misc_feature: MA Experiment 20001904 PARAMETER Experiment Name: At_Drought_Reproduction_P Parameter: Treatment Value: Drought vs. No Drought
  misc_feature: MA Experiment ID: 20001905 Result: Up-regulated in Transcription
  misc_feature: MA Experiment 20001905 PARAMETER Experiment Name: At_Drought_Reproduction_P Parameter: Age (day) Value: 40
  misc_feature: MA Experiment 20001905 PARAMETER Experiment Name: At_Drought_Reproduction_P Parameter: Organism Value: A. thaliana
  misc_feature: MA Experiment 20001905 PARAMETER Experiment Name: At_Drought_Reproduction_P Parameter: Plant Line Value: WS
  misc_feature: MA Experiment 20001905 PARAMETER Experiment Name: At_Drought_Reproduction_P Parameter: Timepoint (day) Value: 10
  misc_feature: MA Experiment 20001905 PARAMETER Experiment Name: At_Drought_Reproduction_P Parameter: Tissue Value: Rosettes
  misc_feature: MA Experiment 20001905 PARAMETER Experiment Name: At_Drought_Reproduction_P Parameter: Treatment Value: Drought vs. No Drought
  misc_feature: MA Experiment ID: 20001911 Result: Up-regulated in Transcription
  misc_feature: MA Experiment 20001911 PARAMETER Experiment Name: At_Drought_Reproduction_P Parameter: Age (day) Value: 40
  misc_feature: MA Experiment 20001911 PARAMETER Experiment Name: At_Drought_Reproduction_P Parameter: Organism Value: A. thaliana
  misc_feature: MA Experiment 20001911 PARAMETER Experiment Name: At_Drought_Reproduction_P Parameter: Plant Line Value: WS
  misc_feature: MA Experiment 20001911 PARAMETER Experiment Name: At_Drought_Reproduction_P Parameter: Timepoint (day) Value: 10
  misc_feature: MA Experiment 20001911 PARAMETER Experiment Name: At_Drought_Reproduction_P Parameter: Tissue Value: Flowers
  misc_feature: MA Experiment 20001911 PARAMETER Experiment Name: At_Drought_Reproduction_P Parameter: Treatment Value: Drought vs. No Drought
ctcattttccaccattaaaaaacctctctactctctcctcaaaaactcaaaagagcaaaaaaaagagaagaagaatcaaaatcccacacaatggcaacacactcttccttcaccgcaacaacacctctctttctcatcgttcttctatccctatcctccgtctcagttctcggcgcatctcaccaccacgcaacggcgccggctccgtctgtagactgttcgactctcatactcaacatggctgactgtttatccttcgtttcgagcggaggcacggtggcgaaaccggaaggtacatgttgctctggtcttaagacggtgcttaaagctgactctcagtgtctatgtgaagcgtttaagagcagtgcttctcttggagttactttgaatatcactaaggcttctactcttcccgccgcatgcaagcttcacgctccttctatcgctacttgtggattgtctgttgctccaagtactgctccaggtcttgctccaggagtagctgctgctggacctgagacagccggatttctagctccaaatccttcttcagggaacgatggatcttctttgattccgacctcgttcacaactgtactcagtgccgtactgttcgttttgttcttctctagtgcgtaaaaaaaaacctgaatcttttttcaccagctagatttggctgtatgaaattgattaatggtttttattagggttaatctatgtatgttttggagtgttctgtttttagaccatatcggtttctctattactagcgtttactcttttagtttatgttattactttgtctcacaacattggtccttttattcgatctatcgcttattcct

SEQ ID NO: 98773 - protein, 182 aa, Arabidopsis thaliana; identical to SEQ ID NO: 38534
  peptide (1)..(182): Ceres Seq. ID no. 13601479
  misc_feature (43)..(121): Pfam Name: Protease inhibitor/seed storage/LTP family Pfam Description: Protease inhibitor/seed storage/LTP family
  misc_feature (1)..(182): Homolog of NCBI NO: 18424785 NR Description: protease inhibitor/seed storage/lipid transfer (LTP) family [Arabidopsis thaliana] >gi|17979494|gb|AAL50083.1| [Arabidopsis thaliana] >gi|20147301|gb|AAM10364.1|
  misc_feature (1)..(182): Homolog of NCBI NO: 21618136 NR Description: nonspecific lipid-transfer protein-like protein
  misc_feature (1)..(182): Homolog of NCBI NO: 10176956 NR Description: contains similarity to nonspecific lipid-transfer
  misc_feature (14)..(179): Homolog of NCBI NO: 15225509 NR Description: protease inhibitor/seed storage/lipid transfer (LTP) family [Arabidopsis thaliana] >gi|25411519|pir||B84511
  misc_feature (14)..(179): Homolog of NCBI NO: 27765012 NR Description: At2g13820 [Arabidopsis thaliana]
  misc_feature (7)..(174): Homolog of NCBI NO: 30682659 NR Description: lipid transfer protein family [Arabidopsis >gi|9955524|emb|CAC05463.1| putative lipid transfer protein thaliana] >gi|26451986|dbj|BAC43083.1| putative lipid transfer
  misc_feature (14)..(181): Homolog of NCBI NO: 7487610 NR Description: hypothetical protein T3F12.2 - Arabidopsis >gi|2565001|gb|AAB81871.1|AAB81871 putative lipid transfer [Arabidopsis thaliana] >gi|7267509|emb|CAB77992.1| putative lipid
  misc_feature (14)..(168): Homolog of NCBI NO: 30680828 NR Description: protease inhibitor/seed storage/lipid transfer
  misc_feature (7)..(131): Homolog of NCBI NO: 18415958 NR Description: lipid transfer protein family [Arabidopsis >gi|21554304|gb|AAM63379.1| putative lipid transfer protein
  misc_feature (13)..(154): Homolog of NCBI NO: 15220327 NR Description: protease inhibitor/seed storage/lipid transfer

SEQ ID NO: 98774 - protein, 133 aa, Arabidopsis thaliana; identical to SEQ ID NO: 38535
  peptide (1)..(133): Ceres Seq. ID no. 13601480
  misc_feature (1)..(72): Pfam Name: Protease inhibitor/seed storage/LTP family Pfam Description: Protease inhibitor/seed storage/LTP family
  misc_feature (1)..(133): Homolog of NCBI NO: 18424785 NR Description: protease inhibitor/seed storage/lipid transfer (LTP) family [Arabidopsis thaliana] >gi|17979494|gb|AAL50083.1| [Arabidopsis thaliana] >gi|20147301|gb|AAM10364.1|
  misc_feature (1)..(133): Homolog of NCBI NO: 21618136 NR Description: nonspecific lipid-transfer protein-like protein
  misc_feature (1)..(133): Homolog of NCBI NO: 10176956 NR Description: contains similarity to nonspecific lipid-transfer
  misc_feature (1)..(130): Homolog of NCBI NO: 15225509 NR Description: protease inhibitor/seed storage/lipid transfer (LTP) family [Arabidopsis thaliana] >gi|25411519|pir||B84511
  misc_feature (1)..(130): Homolog of NCBI NO: 27765012 NR Description: At2g13820 [Arabidopsis thaliana]
  misc_feature (1)..(125): Homolog of NCBI NO: 30682659 NR Description: lipid transfer protein family [Arabidopsis >gi|9955524|emb|CAC05463.1| putative lipid transfer protein thaliana] >gi|26451986|dbj|BAC43083.1| putative lipid transfer
  misc_feature (1)..(132): Homolog of NCBI NO: 7487610 NR Description: hypothetical protein T3F12.2 - Arabidopsis >gi|2565001|gb|AAB81871.1|AAB81871 putative lipid transfer [Arabidopsis thaliana] >gi|7267509|emb|CAB77992.1| putative lipid
  misc_feature (1)..(119): Homolog of NCBI NO: 30680828 NR Description: protease inhibitor/seed storage/lipid transfer
  misc_feature (1)..(82): Homolog of NCBI NO: 18415958 NR Description: lipid transfer protein family [Arabidopsis >gi|21554304|gb|AAM63379.1| putative lipid transfer protein
  misc_feature (1)..(105): Homolog of NCBI NO: 15220327 NR Description: protease inhibitor/seed storage/lipid transfer

SEQ ID NO: 98775 - DNA, 1234 bp, Arabidopsis thaliana
  misc_feature (1)..(1234): Ceres Seq. ID no. 13601481
  misc_feature: MA Experiment ID: 108434 Result: Down-regulated in Transcription
  misc_feature: MA Experiment 108434 PARAMETER Experiment Name: At_Root_Tips_cDNA_P Parameter: Tissue Value: Root Tips
  misc_feature: MA Experiment ID: 20000184 Result: Up-regulated in Transcription
  misc_feature: MA Experiment 20000184 PARAMETER Experiment Name: At_Shoots__P Parameter: Age (day) Value: 7
  misc_feature: MA Experiment 20000184 PARAMETER Experiment Name: At_Shoots__P Parameter: Tissue Value: Shoots vs. Whole Plant
  misc_feature: MA Experiment ID: 20000185 Result: Up-regulated in Transcription
  misc_feature: MA Experiment 20000185 PARAMETER Experiment Name: At_Roots__P Parameter: Age (day) Value: 7 vs. 21
  misc_feature: MA Experiment 20000185 PARAMETER Experiment Name: At_Roots__P Parameter: Organism Value: A. thaliana
  misc_feature: MA Experiment 20000185 PARAMETER Experiment Name: At_Roots__P Parameter: Tissue Value: Roots vs. Whole Plant
  misc_feature: MA Experiment ID: 20000224 Result: Down-regulated in Transcription
  misc_feature: MA Experiment ID: 20000265 Result: Down-regulated in Transcription
  misc_feature: MA Experiment 20000265 PARAMETER Experiment Name: At_Open_Flower_P Parameter: Age (day) Value: 21
  misc_feature: MA Experiment 20000265 PARAMETER Experiment Name: At_Open_Flower_P Parameter: Plant Line Value: WS
  misc_feature: MA Experiment 20000265 PARAMETER Experiment Name: At_Open_Flower_P Parameter: Tissue Value: Closed Flower vs. Whole Plant
  misc_feature: MA Experiment ID: 20000267 Result: Down-regulated in Transcription
  misc_feature: MA Experiment 20000267 PARAMETER Experiment Name: At_Drought_P Parameter: Age (day) Value: 7
  misc_feature: MA Experiment 20000267 PARAMETER Experiment Name: At_Drought_P Parameter: Organism Value: A. thaliana
  misc_feature: MA Experiment 20000267 PARAMETER Experiment Name: At_Drought_P Parameter: Plant Line Value: WS
  misc_feature: MA Experiment 20000267 PARAMETER Experiment Name: At_Drought_P Parameter: Timepoint (hr) Value: 6
  misc_feature: MA Experiment 20000267 PARAMETER Experiment Name: At_Drought_P Parameter: Tissue Value: Whole Plant
  misc_feature: MA Experiment 20000267 PARAMETER Experiment Name: At_Drought_P Parameter: Treatment Value: Drought vs. No Drought
  misc_feature: MA Experiment ID: 20000268 Result: Down-regulated in Transcription
  misc_feature: MA Experiment 20000268 PARAMETER Experiment Name: At_100mM_NaCl__P Parameter: Age (day) Value: 14
  misc_feature: MA Experiment 20000268 PARAMETER Experiment Name: At_100mM_NaCl__P Parameter: Organism Value: A. thaliana
  misc_feature: MA Experiment 20000268 PARAMETER Experiment Name: At_100mM_NaCl__P Parameter: Plant Line Value: WS
  misc_feature: MA Experiment 20000268 PARAMETER Experiment Name: At_100mM_NaCl__P Parameter: Timepoint (hr) Value: 6
  misc_feature: MA Experiment 20000268 PARAMETER Experiment Name: At_100mM_NaCl__P Parameter: Tissue Value: Whole Plant
  misc_feature: MA Experiment 20000268 PARAMETER Experiment Name: At_100mM_NaCl__P Parameter: Treatment Value: 100mM NaCl vs. No Treatment
  misc_feature: MA Experiment ID: 20000436 Result: Down-regulated in Transcription
  misc_feature: MA Experiment 20000436 PARAMETER Experiment Name: At_Drought_P Parameter: Age (day) Value: 7
  misc_feature: MA Experiment 20000436 PARAMETER Experiment Name: At_Drought_P Parameter: Organism Value: A. thaliana
  misc_feature: MA Experiment 20000436 PARAMETER Experiment Name: At_Drought_P Parameter: Plant Line Value: WS
  misc_feature: MA Experiment 20000436 PARAMETER Experiment Name: At_Drought_P Parameter: Timepoint (hr) Value: 12
  misc_feature: MA Experiment 20000436 PARAMETER Experiment Name: At_Drought_P Parameter: Tissue Value: Whole Plant
  misc_feature: MA Experiment 20000436 PARAMETER Experiment Name: At_Drought_P Parameter: Treatment Value: Drought vs. No Drought
  misc_feature: MA Experiment ID: 20000437 Result: Down-regulated in Transcription
  misc_feature: MA Experiment 20000437 PARAMETER Experiment Name: At_Drought_P Parameter: Age (day) Value: 8
  misc_feature: MA Experiment 20000437 PARAMETER Experiment Name: At_Drought_P Parameter: Organism Value: A. thaliana
  misc_feature: MA Experiment 20000437 PARAMETER Experiment Name: At_Drought_P Parameter: Plant Line Value: WS
  misc_feature: MA Experiment 20000437 PARAMETER Experiment Name: At_Drought_P Parameter: Timepoint (hr) Value: 24
  misc_feature: MA Experiment 20000437 PARAMETER Experiment Name: At_Drought_P Parameter: Tissue Value: Whole Plant
  misc_feature: MA Experiment 20000437 PARAMETER Experiment Name: At_Drought_P Parameter: Treatment Value: Drought vs. No Drought
  misc_feature: MA Experiment ID: 20000439 Result: Up-regulated in Transcription
  misc_feature: MA Experiment 20000439 PARAMETER Experiment Name: At_Roots__P Parameter: Age (day) Value: 14 vs. 21
  misc_feature: MA Experiment 20000439 PARAMETER Experiment Name: At_Roots__P Parameter: Organism Value: A. thaliana
  misc_feature: MA Experiment 20000439 PARAMETER Experiment Name: At_Roots__P Parameter: Tissue Value: Roots vs. Whole Plant
acaacaaacacaacttctacaagactcaaatagtttctatttaattactaaaaagaaaaatgggtcgtggttacaatttgctattcgttctagtaacgtttttagtattggttgcagctgtaaccgcacaagggaaccgtggctcaaacagcggtggtggtcgaagaccacatgttgggttttatgggaatagatgccgaaacgtagagtctattgtgagatctgtagttcagtctcatgtccggtctatcccggctaatgcacctggaattttgcgaatgcatttccacgattgctttgtccatggctgcgatggctcggttctcctcgctggtaacacctcagagagaaccgcagttccgaaccgttcattgagagggttcgaagttattgaagaagctaaggctcggcttgagaaggcttgtcctcgtaccgtttcttgtgctgatattctcacccttgcagcccgagacgccgtcgttttgaccggtggacaacgctgggaagtgcccttgggacgtctcgacggccgaatctcgcaagcctcagacgtgaacttgcccggaccaagcgactccgttgctaagcagaagcaagacttcgctgctaaaactctcaacacattagacctcgtgactcttgttggcggacacacaataggaactgctggctgcggtctagtaaggggaaggttcgttaacttcaacggcacaggacaacctgacccatcaatcgacccgagttttgtgccgctgattctggctcagtgccctcaaaatggaggcacccgagtggagttagacgagggaagtgttgacaagtttgacacatcgttcctaaggaaggtgacgtcaagtcgcgtggttctccaatccgatctagtcctatggaaggatcccgagacccgagccatcattgaacgtttattaggattacgccgaccatccttgaggttcggaaccgagttcgggaagtcgatggtcaaaatgagtctcatagaagttaagactggatcagatggggagattcgtcgggtttgttccgccatcaactaagatttaaaaaaacacaaatgtgagctttgtttttcatttatgaattcgttaattaataatcacttgttttaaataaaagcttgctacagcattttgtggtcgatggttacgttttgattttcaagtgtaagattgtacttgtaaacaaaaaatgtattatataaaagtgttatttgttt

SEQ ID NO: 98776 - protein, 331 aa, Arabidopsis thaliana; identical to SEQ ID NO: 26687
  peptide (1)..(331): Ceres Seq. ID no. 13601482
  misc_feature (53)..(292): Pfam Name: Peroxidase Pfam Description: Peroxidase
  misc_feature (1)..(331): Homolog of NCBI NO: 15237613 NR Description: peroxidase, putative [Arabidopsis thaliana] Peroxidase 69 precursor (Atperox P69) (ATP3a) peroxidase; peroxidase ATP3a [Arabidopsis thaliana]
  misc_feature (6)..(331): Homolog of NCBI NO: 15237614 NR Description: peroxidase, putative [Arabidopsis thaliana] Peroxidase 70 precursor (Atperox P70) (ATP45) peroxidase ATP3a homolog homolog [Arabidopsis thaliana]
  misc_feature (5)..(331): Homolog of NCBI NO: 7433065 NR Description: peroxidase (EC 1.11.1.7) precursor, - tomato >gi|1161566|emb|CAA64413.1| peroxidase [Lycopersicon
  misc_feature (6)..(331): Homolog of NCBI NO: 129808 NR Description: Cationic peroxidase 2 precursor (PNPC2)
  misc_feature (34)..(331): Homolog of NCBI NO: 5381255 NR Description: peroxidase [Nicotiana tabacum]
  misc_feature (34)..(331): Homolog of NCBI NO: 17066703 NR Description: peroxidase [Capsicum annuum]
  misc_feature (4)..(331): Homolog of NCBI NO: 1232069 NR Description: cationic peroxidase [Stylosanthes humilis]
  misc_feature (9)..(331): Homolog of NCBI NO: 18558997 NR Description: bacterial-induced peroxidase [Gossypium hirsutum]
  misc_feature (8)..(331): Homolog of NCBI NO: 21592403 NR Description: peroxidase [Arabidopsis thaliana]
  misc_feature (8)..(331): Homolog of NCBI NO: 15237615 NR Description: peroxidase, putative [Arabidopsis thaliana] Peroxidase 71 precursor (Atperox P71) (ATP15a) (ATPO2) peroxidase [Arabidopsis thaliana] >gi|10176960|dbj|BAB10280.1|

SEQ ID NO: 98777 - protein, 258 aa, Arabidopsis thaliana; identical to SEQ ID NO: 26688
  peptide (1)..(258): Ceres Seq. ID no. 13601483
  misc_feature (1)..(219): Pfam Name: Peroxidase Pfam Description: Peroxidase
  misc_feature (1)..(258): Homolog of NCBI NO: 15237613 NR Description: peroxidase, putative [Arabidopsis thaliana] Peroxidase 69 precursor (Atperox P69) (ATP3a) peroxidase; peroxidase ATP3a [Arabidopsis thaliana]
  misc_feature (1)..(258): Homolog of NCBI NO: 15237614 NR Description: peroxidase, putative [Arabidopsis thaliana] Peroxidase 70 precursor (Atperox P70) (ATP45) peroxidase ATP3a homolog homolog [Arabidopsis thaliana]
  misc_feature (1)..(258): Homolog of NCBI NO: 7433065 NR Description: peroxidase (EC 1.11.1.7) precursor, - tomato >gi|1161566|emb|CAA64413.1| peroxidase [Lycopersicon
  misc_feature (1)..(258): Homolog of NCBI NO: 129808 NR Description: Cationic peroxidase 2 precursor (PNPC2)
  misc_feature (1)..(258): Homolog of NCBI NO: 5381255 NR Description: peroxidase [Nicotiana tabacum]
  misc_feature (1)..(258): Homolog of NCBI NO: 17066703 NR Description: peroxidase [Capsicum annuum]
  misc_feature (1)..(258): Homolog of NCBI NO: 1232069 NR Description: cationic peroxidase [Stylosanthes humilis]
  misc_feature (1)..(258): Homolog of NCBI NO: 18558997 NR Description: bacterial-induced peroxidase [Gossypium hirsutum]
  misc_feature (1)..(258): Homolog of NCBI NO: 21592403 NR Description: peroxidase [Arabidopsis thaliana]
  misc_feature (1)..(258): Homolog of NCBI NO: 15237615 NR Description: peroxidase, putative [Arabidopsis thaliana] Peroxidase 71 precursor (Atperox P71) (ATP15a) (ATPO2) peroxidase [Arabidopsis thaliana] >gi|10176960|dbj|BAB10280.1|

SEQ ID NO: 98778 - DNA, 648 bp, Arabidopsis thaliana
  misc_feature (1)..(648): Ceres Seq. ID no. 13601491
  misc_feature: MA Experiment ID: 108462 Result: Up-regulated in Transcription
  misc_feature: MA Experiment 108462 PARAMETER Experiment Name: At_Germinating_Seeds_cDNA_P Parameter: Age (day) Value: 2 vs. 0
  misc_feature: MA Experiment 108462 PARAMETER Experiment Name: At_Germinating_Seeds_cDNA_P Parameter: Tissue Value: Germinating Seeds
  misc_feature: MA Experiment ID: 108463 Result: Up-regulated in Transcription
  misc_feature: MA Experiment 108463 PARAMETER Experiment Name: At_Germinating_Seeds_cDNA_P Parameter: Age (day) Value: 3 vs. 0
  misc_feature: MA Experiment 108463 PARAMETER Experiment Name: At_Germinating_Seeds_cDNA_P Parameter: Tissue Value: Germinating Seeds
  misc_feature: MA Experiment ID: 108464 Result: Up-regulated in Transcription
  misc_feature: MA Experiment 108464 PARAMETER Experiment Name: At_Germinating_Seeds_cDNA_P Parameter: Age (day) Value: 4 vs. 0
  misc_feature: MA Experiment 108464 PARAMETER Experiment Name: At_Germinating_Seeds_cDNA_P Parameter: Tissue Value: Germinating Seeds
  misc_feature: MA Experiment ID: 108576 Result: Up-regulated in Transcription
  misc_feature: MA Experiment 108576 PARAMETER Experiment Name: At_42deg_Heat_cDNA_P Parameter: Temperature (deg C) Value: 42 vs. 22
  misc_feature: MA Experiment 108576 PARAMETER Experiment Name: At_42deg_Heat_cDNA_P Parameter: Timepoint (hr) Value: 1
  misc_feature: MA Experiment 108576 PARAMETER Experiment Name: At_42deg_Heat_cDNA_P Parameter: Tissue Value: Aerial
  misc_feature: MA Experiment ID: 108579 Result: Down-regulated in Transcription
  misc_feature: MA Experiment 108579 PARAMETER Experiment Name: At_4deg_Cold_cDNA_P Parameter: Temperature (deg C) Value: 4 vs. 22
  misc_feature: MA Experiment 108579 PARAMETER Experiment Name: At_4deg_Cold_cDNA_P Parameter: Timepoint (hr) Value: 6
  misc_feature: MA Experiment 108579 PARAMETER Experiment Name: At_4deg_Cold_cDNA_P Parameter: Tissue Value: Aerial
  misc_feature: MA Experiment ID: 20000111 Result: Up-regulated in Transcription
  misc_feature: MA Experiment 20000111 PARAMETER Experiment Name: At_42deg_Heat_cDNA_P Parameter: Temperature (deg C) Value: 42 vs. 22
  misc_feature: MA Experiment 20000111 PARAMETER Experiment Name: At_42deg_Heat_cDNA_P Parameter: Timepoint (hr) Value: 6
  misc_feature: MA Experiment 20000111 PARAMETER Experiment Name: At_42deg_Heat_cDNA_P Parameter: Tissue Value: Aerial
  misc_feature: MA Experiment ID: 20000112 Result: Up-regulated in Transcription
  misc_feature: MA Experiment 20000112 PARAMETER Experiment Name: At_42deg_Heat_cDNA_P Parameter: Temperature (deg C) Value: 42 vs. 22
  misc_feature: MA Experiment 20000112 PARAMETER Experiment Name: At_42deg_Heat_cDNA_P Parameter: Timepoint (hr) Value: 2
  misc_feature: MA Experiment 20000112 PARAMETER Experiment Name: At_42deg_Heat_cDNA_P Parameter: Tissue Value: Aerial
  misc_feature: MA Experiment ID: 20000113 Result: Up-regulated in Transcription
  misc_feature: MA Experiment 20000113 PARAMETER Experiment Name: At_42deg_Heat_cDNA_P Parameter: Temperature (deg C) Value: 42 vs. 22
  misc_feature: MA Experiment 20000113 PARAMETER Experiment Name: At_42deg_Heat_cDNA_P Parameter: Timepoint (hr) Value: 8
  misc_feature: MA Experiment 20000113 PARAMETER Experiment Name: At_42deg_Heat_cDNA_P Parameter: Tissue Value: Aerial
  misc_feature: MA Experiment ID: 20000144 Result: Up-regulated in Transcription
  misc_feature: MA Experiment 20000144 PARAMETER Experiment Name: At_42deg_Heat_cDNA_P Parameter: Temperature (deg C) Value: 42 vs. 22
  misc_feature: MA Experiment 20000144 PARAMETER Experiment Name: At_42deg_Heat_cDNA_P Parameter: Timepoint (hr) Value: 1
  misc_feature: MA Experiment 20000144 PARAMETER Experiment Name: At_42deg_Heat_cDNA_P Parameter: Tissue Value: Aerial
  misc_feature: MA Experiment ID: 20000171 Result: Up-regulated in Transcription
  misc_feature: MA Experiment 20000171 PARAMETER Experiment Name: At_42deg_Heat_P Parameter: Age (day) Value: 14
  misc_feature: MA Experiment 20000171 PARAMETER Experiment Name: At_42deg_Heat_P Parameter: Organism Value: A. thaliana
  misc_feature: MA Experiment 20000171 PARAMETER Experiment Name: At_42deg_Heat_P Parameter: Plant Line Value: WS
  misc_feature: MA Experiment 20000171 PARAMETER Experiment Name: At_42deg_Heat_P Parameter: Temperature (deg C) Value: 42 vs. 22
  misc_feature: MA Experiment 20000171 PARAMETER Experiment Name: At_42deg_Heat_P Parameter: Timepoint (hr) Value: 1
  misc_feature: MA Experiment 20000171 PARAMETER Experiment Name: At_42deg_Heat_P Parameter: Tissue Value: Aerial
  misc_feature: MA Experiment ID: 20000179 Result: Up-regulated in Transcription
  misc_feature: MA Experiment 20000179 PARAMETER Experiment Name: At_Germinating_Seeds_P Parameter: Age (hr) Value: 6 vs. 0
  misc_feature: MA Experiment 20000179 PARAMETER Experiment Name: At_Germinating_Seeds_P Parameter: Tissue Value: Germinating Seeds
  misc_feature: MA Experiment ID: 20000180 Result: Up-regulated in Transcription
  misc_feature: MA Experiment 20000180 PARAMETER Experiment Name: At_Germinating_Seeds_P Parameter: Age (hr) Value: 24 vs. 0
  misc_feature: MA Experiment 20000180 PARAMETER Experiment Name: At_Germinating_Seeds_P Parameter: Tissue Value: Germinating Seeds
  misc_feature: MA Experiment ID: 20000224 Result: Down-regulated in Transcription
  misc_feature: MA Experiment ID: 20000264 Result: Down-regulated in Transcription
  misc_feature: MA Experiment 20000264 PARAMETER Experiment Name: At_Open_Flower_P Parameter: Age (day) Value: 21
  misc_feature: MA Experiment 20000264 PARAMETER Experiment Name: At_Open_Flower_P Parameter: Plant Line Value: WS
  misc_feature: MA Experiment 20000264 PARAMETER Experiment Name: At_Open_Flower_P Parameter: Tissue Value: Open Flower vs. Whole Plant
  misc_feature: MA Experiment ID: 20000265 Result: Down-regulated in Transcription
  misc_feature: MA Experiment 20000265 PARAMETER Experiment Name: At_Open_Flower_P Parameter: Age (day) Value: 21
  misc_feature: MA Experiment 20000265 PARAMETER Experiment Name: At_Open_Flower_P Parameter: Plant Line Value: WS
  misc_feature: MA Experiment 20000265 PARAMETER Experiment Name: At_Open_Flower_P Parameter: Tissue Value: Closed Flower vs. Whole Plant
  misc_feature: MA Experiment ID: 20000286 Result: Down-regulated in Transcription
  misc_feature: MA Experiment 20000286 PARAMETER Experiment Name: At_Open_Flower_P Parameter: Age (day) Value: 21
  misc_feature: MA Experiment 20000286 PARAMETER Experiment Name: At_Open_Flower_P Parameter: Plant Line Value: WS
  misc_feature: MA Experiment 20000286 PARAMETER Experiment Name: At_Open_Flower_P Parameter: Tissue Value: Half Open vs. Whole Plant
  misc_feature: MA Experiment ID: 20001450 Result: Up-regulated in Transcription
  misc_feature: MA Experiment 20001450 PARAMETER Experiment Name: At_Far-red-induction_P Parameter: Age (day) Value: 7
  misc_feature: MA Experiment 20001450 PARAMETER Experiment Name: At_Far-red-induction_P Parameter: Light Value: Far-red vs. White
  misc_feature: MA Experiment 20001450 PARAMETER Experiment Name: At_Far-red-induction_P Parameter: Organism Value: A. thaliana
  misc_feature: MA Experiment 20001450 PARAMETER Experiment Name: At_Far-red-induction_P Parameter: Plant Line Value: Columbia
  misc_feature: MA Experiment 20001450 PARAMETER Experiment Name: At_Far-red-induction_P Parameter: Timepoint (hr) Value: 8
  misc_feature: MA Experiment 20001450 PARAMETER Experiment Name: At_Far-red-induction_P Parameter: Tissue Value: Whole Plant
  misc_feature: MA Experiment ID: 20001451 Result: Up-regulated in Transcription
  misc_feature: MA Experiment 20001451 PARAMETER Experiment Name: At_Far-red-induction_P Parameter: Age (day) Value: 7
  misc_feature: MA Experiment 20001451 PARAMETER Experiment Name: At_Far-red-induction_P Parameter: Light Value: Far-red vs. White
  misc_feature: MA Experiment 20001451 PARAMETER Experiment Name: At_Far-red-induction_P Parameter: Organism Value: A. thaliana
  misc_feature: MA Experiment 20001451 PARAMETER Experiment Name: At_Far-red-induction_P Parameter: Plant Line Value: Columbia
  misc_feature: MA Experiment 20001451 PARAMETER Experiment Name: At_Far-red-induction_P Parameter: Timepoint (hr) Value: 24
  misc_feature: MA Experiment 20001451 PARAMETER Experiment Name: At_Far-red-induction_P Parameter: Tissue Value: Whole Plant
  misc_feature: MA Experiment ID: 20001557 Result: Down-regulated in Transcription
  misc_feature: MA Experiment 20001557 PARAMETER Experiment Name: At_Drought_Soil_Dry_P Parameter: Age (day) Value: 27
  misc_feature: MA Experiment 20001557 PARAMETER Experiment Name: At_Drought_Soil_Dry_P Parameter: Organism Value: A. thaliana
  misc_feature: MA Experiment 20001557 PARAMETER Experiment Name: At_Drought_Soil_Dry_P Parameter: Plant Line Value: WS
  misc_feature: MA Experiment 20001557 PARAMETER Experiment Name: At_Drought_Soil_Dry_P Parameter: Post Timepoint (hr) Value: 3
  misc_feature: MA Experiment 20001557 PARAMETER Experiment Name: At_Drought_Soil_Dry_P Parameter: Post-Treatment Value: Re-Water vs. No Drought
  misc_feature: MA Experiment 20001557 PARAMETER Experiment Name: At_Drought_Soil_Dry_P Parameter: Timepoint (day) Value: 13
  misc_feature: MA Experiment 20001557 PARAMETER Experiment Name: At_Drought_Soil_Dry_P Parameter: Treatment Value: Drought vs. No Drought
  misc_feature: MA Experiment ID: 20001558 Result: Down-regulated in Transcription
  misc_feature: MA Experiment 20001558 PARAMETER Experiment Name: At_Drought_Soil_Dry_P Parameter: Age (day) Value: 27
  misc_feature: MA Experiment 20001558 PARAMETER Experiment Name: At_Drought_Soil_Dry_P Parameter: Organism Value: A. thaliana
  misc_feature: MA Experiment 20001558 PARAMETER Experiment Name: At_Drought_Soil_Dry_P Parameter: Plant Line Value: WS
  misc_feature: MA Experiment 20001558 PARAMETER Experiment Name: At_Drought_Soil_Dry_P Parameter: Post Timepoint (hr) Value: 6
  misc_feature: MA Experiment 20001558 PARAMETER Experiment Name: At_Drought_Soil_Dry_P Parameter: Post-Treatment Value: Re-Water vs. No Drought
  misc_feature: MA Experiment 20001558 PARAMETER Experiment Name: At_Drought_Soil_Dry_P Parameter: Timepoint (day) Value: 13
  misc_feature: MA Experiment 20001558 PARAMETER Experiment Name: At_Drought_Soil_Dry_P Parameter: Treatment Value: Drought vs. No Drought
tttagttgtttttccgatcgatctgcgagtcgagtagtttttttatttgccggcgccgggagagatcctttgatctttttccgatggaggagcaattcggcgggagcgatgagagatggaaaggatcattggagaatataacggagatggcatcgaatctcgattcgcttcagaaacttctcctcaagaaagcagtcttcgttgaagaagacactttctctagagcttctctcgtctccgagcaagcccgaacaatcaaggttcttgagcaaagagtacaaacactagaaagagaactagatgctgccattacagctgctgctcatgctcggtctgagaaacgccaagctgagtcctctcaaaaggctgctgaatcacgtgcccaagatgtcacaaaagagcttgaaaacaccacaaaggttttcaagctgcatatggaagagcttcgaggaatgcaagaacagatatccaaacgcgataacgagatcaaactcttagaagctataatccaaacgctcggcggcaaagagcggttgggaaaaagcgacgtgaatggatgatgatgatgcgttttttcacttgtaaaggtttgtactcctgagtttgtggagatgtatcacttcgaagataaatgtatttttgtctgtc

SEQ ID NO: 98779 - protein, 158 aa, Arabidopsis thaliana; identical to SEQ ID NO: 30138
  peptide (1)..(158): Ceres Seq. ID no. 13601492
  misc_feature (1)..(158): Homolog of NCBI NO: 15237639 NR Description: expressed protein [Arabidopsis thaliana] unknown protein [Arabidopsis thaliana]
  misc_feature (1)..(158): Homolog of NCBI NO: 21553794 NR Description: unknown [Arabidopsis thaliana]

SEQ ID NO: 98780 - protein, 137 aa, Arabidopsis thaliana; identical to SEQ ID NO: 30139
  peptide (1)..(137): Ceres Seq. ID no. 13601493
  misc_feature (1)..(137): Homolog of NCBI NO: 15237639 NR Description: expressed protein [Arabidopsis thaliana] unknown protein [Arabidopsis thaliana]
  misc_feature (1)..(137): Homolog of NCBI NO: 21553794 NR Description: unknown [Arabidopsis thaliana]

SEQ ID NO: 98781 - DNA, 647 bp, Arabidopsis thaliana
  misc_feature (1)..(647): Ceres Seq. ID no. 13601497
  misc_feature: MA Experiment ID: 108434 Result: Up-regulated in Transcription
  misc_feature: MA Experiment 108434 PARAMETER Experiment Name: At_Root_Tips_cDNA_P Parameter: Tissue Value: Root Tips
  misc_feature: MA Experiment ID: 108461 Result: Up-regulated in Transcription
  misc_feature: MA Experiment 108461 PARAMETER Experiment Name: At_Germinating_Seeds_cDNA_P Parameter: Age (day) Value: 1 vs. 0
  misc_feature: MA Experiment 108461 PARAMETER Experiment Name: At_Germinating_Seeds_cDNA_P Parameter: Tissue Value: Germinating Seeds
  misc_feature: MA Experiment ID: 108462 Result: Up-regulated in Transcription
  misc_feature: MA Experiment 108462 PARAMETER Experiment Name: At_Germinating_Seeds_cDNA_P Parameter: Age (day) Value: 2 vs. 0
  misc_feature: MA Experiment 108462 PARAMETER Experiment Name: At_Germinating_Seeds_cDNA_P Parameter: Tissue Value: Germinating Seeds
  misc_feature: MA Experiment ID: 108561 Result: Down-regulated in Transcription
  misc_feature: MA Experiment 108561 PARAMETER Experiment Name: At_100uM_ABA_cDNA_P Parameter: Timepoint (hr) Value: 6
  misc_feature: MA Experiment 108561 PARAMETER Experiment Name: At_100uM_ABA_cDNA_P Parameter: Tissue Value: Aerial
  misc_feature: MA Experiment 108561 PARAMETER Experiment Name: At_100uM_ABA_cDNA_P Parameter: Treatment Value: 100uM ABA vs. No Treatment
  misc_feature: MA Experiment ID: 108573 Result: Down-regulated in Transcription
  misc_feature: MA Experiment 108573 PARAMETER Experiment Name: At_Drought_cDNA_P Parameter: Timepoint (hr) Value: 6
  misc_feature: MA Experiment 108573 PARAMETER Experiment Name: At_Drought_cDNA_P Parameter: Tissue Value: Aerial
  misc_feature: MA Experiment 108573 PARAMETER Experiment Name: At_Drought_cDNA_P Parameter: Treatment Value: Drought vs. No Drought
  misc_feature: MA Experiment ID: 108577 Result: Down-regulated in Transcription
  misc_feature: MA Experiment 108577 PARAMETER Experiment Name: At_42deg_Heat_cDNA_P Parameter: Temperature (deg C) Value: 42 vs. 22
  misc_feature: MA Experiment 108577 PARAMETER Experiment Name: At_42deg_Heat_cDNA_P Parameter: Timepoint (hr) Value: 6
  misc_feature: MA Experiment 108577 PARAMETER Experiment Name: At_42deg_Heat_cDNA_P Parameter: Tissue Value: Aerial
  misc_feature: MA Experiment ID: 108579 Result: Up-regulated in Transcription
  misc_feature: MA Experiment 108579 PARAMETER Experiment Name: At_4deg_Cold_cDNA_P Parameter: Temperature (deg C) Value: 4 vs. 22
  misc_feature: MA Experiment 108579 PARAMETER Experiment Name: At_4deg_Cold_cDNA_P Parameter: Timepoint (hr) Value: 6
  misc_feature: MA Experiment 108579 PARAMETER Experiment Name: At_4deg_Cold_cDNA_P Parameter: Tissue Value: Aerial
  misc_feature: MA Experiment ID: 108585 Result: Down-regulated in Transcription
  misc_feature: MA Experiment 108585 PARAMETER Experiment Name: At_5mM_NaNP_cDNA_P Parameter: Timepoint (hr) Value: 6
  misc_feature: MA Experiment 108585 PARAMETER Experiment Name: At_5mM_NaNP_cDNA_P Parameter: Tissue Value: Aerial
  misc_feature: MA Experiment 108585 PARAMETER Experiment Name: At_5mM_NaNP_cDNA_P Parameter: Treatment Value: null
  misc_feature: MA Experiment ID: 20000069 Result: Down-regulated in Transcription
  misc_feature: MA Experiment 20000069 PARAMETER Experiment Name: At_100uM_ABA_Mutants_cDNA_P Parameter: Plant Line Value: CS23
  misc_feature: MA Experiment 20000069 PARAMETER Experiment Name: At_100uM_ABA_Mutants_cDNA_P Parameter: Timepoint (hr) Value: 6
  misc_feature: MA Experiment 20000069 PARAMETER Experiment Name: At_100uM_ABA_Mutants_cDNA_P Parameter: Tissue Value: Aerial
  misc_feature: MA Experiment 20000069 PARAMETER Experiment Name: At_100uM_ABA_Mutants_cDNA_P Parameter: Treatment Value: 100uM ABA vs. No Treatment
  misc_feature: MA Experiment ID: 20000071 Result: Down-regulated in Transcription
  misc_feature: MA Experiment 20000071 PARAMETER Experiment Name: At_100uM_ABA_Mutants_cDNA_P Parameter: Plant Line Value: CS8104
  misc_feature: MA Experiment 20000071 PARAMETER Experiment Name: At_100uM_ABA_Mutants_cDNA_P Parameter: Timepoint (hr) Value: 6
  misc_feature: MA Experiment 20000071 PARAMETER Experiment Name: At_100uM_ABA_Mutants_cDNA_P Parameter: Tissue Value: Aerial
  misc_feature: MA Experiment 20000071 PARAMETER Experiment Name: At_100uM_ABA_Mutants_cDNA_P Parameter: Treatment Value: 100uM ABA vs. No Treatment
  misc_feature: MA Experiment ID: 20000093 Result: Down-regulated in Transcription
  misc_feature: MA Experiment 20000093 PARAMETER Experiment Name: At_42deg_Heat_cDNA_P Parameter: Temperature (deg C) Value: 42 vs. 22
  misc_feature: MA Experiment 20000093 PARAMETER Experiment Name: At_42deg_Heat_cDNA_P Parameter: Timepoint (hr) Value: 0.5
  misc_feature: MA Experiment 20000093 PARAMETER Experiment Name: At_42deg_Heat_cDNA_P Parameter: Tissue Value: Aerial
  misc_feature: MA Experiment ID: 20000111 Result: Down-regulated in Transcription
  misc_feature: MA Experiment 20000111 PARAMETER Experiment Name: At_42deg_Heat_cDNA_P Parameter: Temperature (deg C) Value: 42 vs. 22
  misc_feature: MA Experiment 20000111 PARAMETER Experiment Name: At_42deg_Heat_cDNA_P Parameter: Timepoint (hr) Value: 6
  misc_feature: MA Experiment 20000111 PARAMETER Experiment Name: At_42deg_Heat_cDNA_P Parameter: Tissue Value: Aerial
  misc_feature: MA Experiment ID: 20000112 Result: Down-regulated in Transcription
  misc_feature: MA Experiment 20000112 PARAMETER Experiment Name: At_42deg_Heat_cDNA_P Parameter: Temperature (deg C) Value: 42 vs. 22
  misc_feature: MA Experiment 20000112 PARAMETER Experiment Name: At_42deg_Heat_cDNA_P Parameter: Timepoint (hr) Value: 2
  misc_feature: MA Experiment 20000112 PARAMETER Experiment Name: At_42deg_Heat_cDNA_P Parameter: Tissue Value: Aerial
  misc_feature: MA Experiment ID: 20000113 Result: Down-regulated in Transcription
  misc_feature: MA Experiment 20000113 PARAMETER Experiment Name: At_42deg_Heat_cDNA_P Parameter: Temperature (deg C) Value: 42 vs. 22
  misc_feature: MA Experiment 20000113 PARAMETER Experiment Name: At_42deg_Heat_cDNA_P Parameter: Timepoint (hr) Value: 8
  misc_feature: MA Experiment 20000113 PARAMETER Experiment Name: At_42deg_Heat_cDNA_P Parameter: Tissue Value: Aerial
  misc_feature: MA Experiment ID: 20000117 Result: Down-regulated in Transcription
  misc_feature: MA Experiment 20000117 PARAMETER Experiment Name: At_100uM_ABA_Mutants_cDNA_P Parameter: Plant Line Value: Columbia
  misc_feature: MA Experiment 20000117 PARAMETER Experiment Name: At_100uM_ABA_Mutants_cDNA_P Parameter: Timepoint (hr) Value: 6
  misc_feature: MA Experiment 20000117 PARAMETER Experiment Name: At_100uM_ABA_Mutants_cDNA_P Parameter: Tissue Value: Aerial
  misc_feature: MA Experiment 20000117 PARAMETER Experiment Name: At_100uM_ABA_Mutants_cDNA_P Parameter: Treatment Value: 100uM ABA vs. No Treatment
  misc_feature: MA Experiment ID: 20000144 Result: Down-regulated in Transcription
  misc_feature: MA Experiment 20000144 PARAMETER Experiment Name: At_42deg_Heat_cDNA_P Parameter: Temperature (deg C) Value: 42 vs. 22
  misc_feature: MA Experiment 20000144 PARAMETER Experiment Name: At_42deg_Heat_cDNA_P Parameter: Timepoint (hr) Value: 1
  misc_feature: MA Experiment 20000144 PARAMETER Experiment Name: At_42deg_Heat_cDNA_P Parameter: Tissue Value: Aerial
  misc_feature: MA Experiment ID: 20000179 Result: Up-regulated in Transcription
  misc_feature: MA Experiment 20000179 PARAMETER Experiment Name: At_Germinating_Seeds_P Parameter: Age (hr) Value: 6 vs. 0
  misc_feature: MA Experiment 20000179 PARAMETER Experiment Name: At_Germinating_Seeds_P Parameter: Tissue Value: Germinating Seeds
  misc_feature: MA Experiment ID: 20000180 Result: Up-regulated in Transcription
  misc_feature: MA Experiment 20000180 PARAMETER Experiment Name: At_Germinating_Seeds_P Parameter: Age (hr) Value: 24 vs. 0
  misc_feature: MA Experiment 20000180 PARAMETER Experiment Name: At_Germinating_Seeds_P Parameter: Tissue Value: Germinating Seeds
  misc_feature: MA Experiment ID: 20000185 Result: Up-regulated in Transcription
  misc_feature: MA Experiment 20000185 PARAMETER Experiment Name: At_Roots__P Parameter: Age (day) Value: 7 vs. 21
  misc_feature: MA Experiment 20000185 PARAMETER Experiment Name: At_Roots__P Parameter: Organism Value: A. thaliana
  misc_feature: MA Experiment 20000185 PARAMETER Experiment Name: At_Roots__P Parameter: Tissue Value: Roots vs. Whole Plant
  misc_feature: MA Experiment ID: 20000234 Result: Up-regulated in Transcription
  misc_feature: MA Experiment 20000234 PARAMETER Experiment Name: At_Siliques_P Parameter: Age (day) Value: 21
  misc_feature: MA Experiment 20000234 PARAMETER Experiment Name: At_Siliques_P Parameter: Organism Value: A. thaliana
  misc_feature: MA Experiment 20000234 PARAMETER Experiment Name: At_Siliques_P Parameter: Plant Line Value: WS
  misc_feature: MA Experiment 20000234 PARAMETER Experiment Name: At_Siliques_P Parameter: Tissue Value: Less Than 5mm Siliques vs. Whole Plant
  misc_feature: MA Experiment ID: 20000264 Result: Up-regulated in Transcription
  misc_feature: MA Experiment 20000264 PARAMETER Experiment Name: At_Open_Flower_P Parameter: Age (day) Value: 21
  misc_feature: MA Experiment 20000264 PARAMETER Experiment Name: At_Open_Flower_P Parameter: Plant Line Value: WS
  misc_feature: MA Experiment 20000264 PARAMETER Experiment Name: At_Open_Flower_P Parameter: Tissue Value: Open Flower vs. Whole Plant
  misc_feature: MA Experiment ID: 20000265 Result: Up-regulated in Transcription
  misc_feature: MA Experiment 20000265 PARAMETER Experiment Name: At_Open_Flower_P Parameter: Age (day) Value: 21
  misc_feature: MA Experiment 20000265 PARAMETER Experiment Name: At_Open_Flower_P Parameter: Plant Line Value: WS
  misc_feature: MA Experiment 20000265 PARAMETER Experiment Name: At_Open_Flower_P Parameter: Tissue Value: Closed Flower vs. Whole Plant
  misc_feature: MA Experiment ID: 20000437 Result: Down-regulated in Transcription
  misc_feature: MA Experiment 20000437 PARAMETER Experiment Name: At_Drought_P Parameter: Age (day) Value: 8
  misc_feature: MA Experiment 20000437 PARAMETER Experiment Name: At_Drought_P Parameter: Organism Value: A. thaliana
  misc_feature: MA Experiment 20000437 PARAMETER Experiment Name: At_Drought_P Parameter: Plant Line Value: WS
  misc_feature: MA Experiment 20000437 PARAMETER Experiment Name: At_Drought_P Parameter: Timepoint (hr) Value: 24
  misc_feature: MA Experiment 20000437 PARAMETER Experiment Name: At_Drought_P Parameter: Tissue Value: Whole Plant
  misc_feature: MA Experiment 20000437 PARAMETER Experiment Name: At_Drought_P Parameter: Treatment Value: Drought vs. No Drought
  misc_feature: MA Experiment ID: 20001248 Result: Down-regulated in Transcription
  misc_feature: MA Experiment 20001248 PARAMETER Experiment Name: At_Far-red-induction_P Parameter: Age (day) Value: 7
  misc_feature: MA Experiment 20001248 PARAMETER Experiment Name: At_Far-red-induction_P Parameter: Light Value: Far-red vs. White
  misc_feature: MA Experiment 20001248 PARAMETER Experiment Name: At_Far-red-induction_P Parameter: Organism Value: A. thaliana
  misc_feature: MA Experiment 20001248 PARAMETER Experiment Name: At_Far-red-induction_P Parameter: Plant Line Value: Columbia
  misc_feature: MA Experiment 20001248 PARAMETER Experiment Name: At_Far-red-induction_P Parameter: Timepoint (hr) Value: 4
  misc_feature: MA Experiment 20001248 PARAMETER Experiment Name: At_Far-red-induction_P Parameter: Tissue Value: Whole Plant
  misc_feature: MA Experiment ID: 20001451 Result: Down-regulated in Transcription
  misc_feature: MA Experiment 20001451 PARAMETER Experiment Name: At_Far-red-induction_P Parameter: Age (day) Value: 7
  misc_feature: MA Experiment 20001451 PARAMETER Experiment Name: At_Far-red-induction_P Parameter: Light Value: Far-red vs. White
  misc_feature: MA Experiment 20001451 PARAMETER Experiment Name: At_Far-red-induction_P Parameter: Organism Value: A. thaliana
  misc_feature: MA Experiment 20001451 PARAMETER Experiment Name: At_Far-red-induction_P Parameter: Plant Line Value: Columbia
  misc_feature: MA Experiment 20001451 PARAMETER Experiment Name: At_Far-red-induction_P Parameter: Timepoint (hr) Value: 24
  misc_feature: MA Experiment 20001451 PARAMETER Experiment Name: At_Far-red-induction_P Parameter: Tissue Value: Whole Plant
  misc_feature: MA Experiment ID: 20001555 Result: Down-regulated in Transcription
  misc_feature: MA Experiment 20001555 PARAMETER Experiment Name: At_Drought_Soil_Dry_P Parameter: Age (day) Value: 24
  misc_feature: MA Experiment 20001555 PARAMETER Experiment Name: At_Drought_Soil_Dry_P Parameter: Organism Value: A. thaliana
  misc_feature: MA Experiment 20001555 PARAMETER Experiment Name: At_Drought_Soil_Dry_P Parameter: Plant Line Value: WS
  misc_feature: MA Experiment 20001555 PARAMETER Experiment Name: At_Drought_Soil_Dry_P Parameter: Post Timepoint (hr) Value: None
  misc_feature: MA Experiment 20001555 PARAMETER Experiment Name: At_Drought_Soil_Dry_P Parameter: Post-Treatment Value: None
  misc_feature: MA Experiment 20001555 PARAMETER Experiment Name: At_Drought_Soil_Dry_P Parameter: Timepoint (day) Value: 10
  misc_feature: MA Experiment 20001555 PARAMETER Experiment Name: At_Drought_Soil_Dry_P Parameter: Treatment Value: Drought vs. No Drought
  misc_feature: MA Experiment ID: 20001556 Result: Down-regulated in Transcription
  misc_feature: MA Experiment 20001556 PARAMETER Experiment Name: At_Drought_Soil_Dry_P Parameter: Age (day) Value: 26
  misc_feature: MA Experiment 20001556 PARAMETER Experiment Name: At_Drought_Soil_Dry_P Parameter: Organism Value: A. thaliana
  misc_feature: MA Experiment 20001556 PARAMETER Experiment Name: At_Drought_Soil_Dry_P Parameter: Plant Line Value: WS
  misc_feature: MA Experiment 20001556 PARAMETER Experiment Name: At_Drought_Soil_Dry_P Parameter: Post Timepoint (hr) Value: None
  misc_feature: MA Experiment 20001556 PARAMETER Experiment Name: At_Drought_Soil_Dry_P Parameter: Post-Treatment Value: None
  misc_feature: MA Experiment 20001556 PARAMETER Experiment Name: At_Drought_Soil_Dry_P Parameter: Timepoint (day) Value: 12
  misc_feature: MA Experiment 20001556 PARAMETER Experiment Name: At_Drought_Soil_Dry_P Parameter: Treatment Value: Drought vs. No Drought
  misc_feature: MA Experiment ID: 20001557 Result: Down-regulated in Transcription
  misc_feature: MA Experiment 20001557 PARAMETER Experiment Name: At_Drought_Soil_Dry_P Parameter: Age (day) Value: 27
  misc_feature: MA Experiment 20001557 PARAMETER Experiment Name: At_Drought_Soil_Dry_P Parameter: Organism Value: A. thaliana
  misc_feature: MA Experiment 20001557 PARAMETER Experiment Name: At_Drought_Soil_Dry_P Parameter: Plant Line Value: WS
  misc_feature: MA Experiment 20001557 PARAMETER Experiment Name: At_Drought_Soil_Dry_P Parameter: Post Timepoint (hr) Value: 3
  misc_feature: MA Experiment 20001557 PARAMETER Experiment Name: At_Drought_Soil_Dry_P Parameter: Post-Treatment Value: Re-Water vs. No Drought
  misc_feature: MA Experiment 20001557 PARAMETER Experiment Name: At_Drought_Soil_Dry_P Parameter: Timepoint (day) Value: 13
  misc_feature: MA Experiment 20001557 PARAMETER Experiment Name: At_Drought_Soil_Dry_P Parameter: Treatment Value: Drought vs. No Drought
  misc_feature: MA Experiment ID: 20001559 Result: Down-regulated in Transcription
  misc_feature: MA Experiment 20001559 PARAMETER Experiment Name: At_Drought_Soil_Dry_P Parameter: Age (day) Value: 28
  misc_feature: MA Experiment 20001559 PARAMETER Experiment Name: At_Drought_Soil_Dry_P Parameter: Organism Value: A. thaliana
  misc_feature: MA Experiment 20001559 PARAMETER Experiment Name: At_Drought_Soil_Dry_P Parameter: Plant Line Value: WS
  misc_feature: MA Experiment 20001559 PARAMETER Experiment Name: At_Drought_Soil_Dry_P Parameter: Post Timepoint (hr) Value: 29
  misc_feature: MA Experiment 20001559 PARAMETER Experiment Name: At_Drought_Soil_Dry_P Parameter: Post-Treatment Value: Re-Water vs. No Drought
  misc_feature: MA Experiment 20001559 PARAMETER Experiment Name: At_Drought_Soil_Dry_P Parameter: Timepoint (day) Value: 14
  misc_feature: MA Experiment 20001559 PARAMETER Experiment Name: At_Drought_Soil_Dry_P Parameter: Treatment Value: Drought vs. No Drought
  misc_feature: MA Experiment ID: 20001905 Result: Down-regulated in Transcription
  misc_feature: MA Experiment 20001905 PARAMETER Experiment Name: At_Drought_Reproduction_P Parameter: Age (day) Value: 40
  misc_feature: MA Experiment 20001905 PARAMETER Experiment Name: At_Drought_Reproduction_P Parameter: Organism Value: A. thaliana
  misc_feature: MA Experiment 20001905 PARAMETER Experiment Name: At_Drought_Reproduction_P Parameter: Plant Line Value: WS
  misc_feature: MA Experiment 20001905 PARAMETER Experiment Name: At_Drought_Reproduction_P Parameter: Timepoint (day) Value: 10
  misc_feature: MA Experiment 20001905 PARAMETER Experiment Name: At_Drought_Reproduction_P Parameter: Tissue Value: Rosettes
  misc_feature: MA Experiment 20001905 PARAMETER Experiment Name: At_Drought_Reproduction_P Parameter: Treatment Value: Drought vs. No Drought
aaatcacaaatcttcaacttccgatactttcaatctctctaaactctcaatttcagtaatcgataaccgtagcaatggaatccaccggaaaagtgaagaaagctttcggaggaagaaaaccacctggtgccccaaaaaccaaatcggtttcgaaatcgatgaaagccggtcttcaattcccagtgggaagaatcactcgtttcctgaagaaaggacgatacgctcagagacttggtggtggtgctccggtttacatggccgccgttcttgaatacctcgccgcagaagttctggagcttgctggtaacgctgcgagagataacaagaaatcaaggataattccgaggcatcttcttctcgcgataaggaacgatgaagaattggggaaacttctgagtggtgtcacaatcgctcacggtggtgttttgcctaacatcaactctgttctattgcctaagaagtctgccactaaaccagctgaagaaaaggctaccaaatcaccagtcaagtctccaaagaaagcttaatctgctagagttttcgttgctagtttgtgtttgagctctggtgaatgtagaaatttgaagcttttggatcttagtttctatgtatttggtgatttagaatgttgttcaaaatccttttcc

SEQ ID NO: 98782 - protein, 150 aa, Arabidopsis thaliana; identical to SEQ ID NO: 31039
  peptide (1)..(150): Ceres Seq. ID no. 13601498
  misc_feature (6)..(129): Pfam Name: Core histone H2A/H2B/H3/H4 Pfam Description: Core histone H2A/H2B/H3/H4
  misc_feature (1)..(150): Homolog of NCBI NO: 15238549 NR Description: histone H2A, putative [Arabidopsis thaliana]
  misc_feature (1)..(150): Homolog of NCBI NO: 122007 NR Description: Histone H2A >gi|100161|pir||S11498 histone H2A -
  misc_feature (1)..(150): Homolog of NCBI NO: 27529852 NR Description: H2A histone [Nicotiana tabacum]
  misc_feature (1)..(150): Homolog of NCBI NO: 122003 NR Description: HISTONE H2A >gi|82089|pir||JQ1182 histone H2A.1 -
  misc_feature (5)..(150): Homolog of NCBI NO: 34914498 NR Description: putative histone H2A [Oryza sativa (japonica group)] >gi|13873032|dbj|BAB44136.1| putative histone H2A [Oryza
  misc_feature (1)..(150): Homolog of NCBI NO: 7649159 NR Description: histone H2A [Euphorbia esula]
  misc_feature (5)..(150): Homolog of NCBI NO: 729671 NR Description: Histone H2A >gi|7439704|pir||T02076 histone H2A -
  misc_feature (1)..(150): Homolog of NCBI NO: 15241857 NR Description: histone H2A, putative [Arabidopsis thaliana]
  misc_feature (6)..(150): Homolog of NCBI NO: 121982 NR Description: HISTONE H2A.2.2
  misc_feature (1)..(150): Homolog of NCBI NO: 122006 NR Description: HISTONE H2A >gi|81906|pir||JQ1183 histone H2A -

SEQ ID NO: 98783 - protein, 122 aa, Arabidopsis thaliana; identical to SEQ ID NO: 31040
  peptide (1)..(122): Ceres Seq. ID no. 13601499
  misc_feature (1)..(101): Pfam Name: Core histone H2A/H2B/H3/H4 Pfam Description: Core histone H2A/H2B/H3/H4
  misc_feature (1)..(122): Homolog of NCBI NO: 15238549 NR Description: histone H2A, putative [Arabidopsis thaliana]
  misc_feature (1)..(122): Homolog of NCBI NO: 122007 NR Description: Histone H2A >gi|100161|pir||S11498 histone H2A -
  misc_feature (1)..(122): Homolog of NCBI NO: 27529852 NR Description: H2A histone [Nicotiana tabacum]
  misc_feature (1)..(122): Homolog of NCBI NO: 122003 NR Description: HISTONE H2A >gi|82089|pir||JQ1182 histone H2A.1 -
  misc_feature (1)..(122): Homolog of NCBI NO: 34914498 NR Description: putative histone H2A [Oryza sativa (japonica group)] >gi|13873032|dbj|BAB44136.1| putative histone H2A [Oryza
  misc_feature (1)..(122): Homolog of NCBI NO: 7649159 NR Description: histone H2A [Euphorbia esula]
  misc_feature (1)..(122): Homolog of NCBI NO: 729671 NR Description: Histone H2A >gi|7439704|pir||T02076 histone H2A -
  misc_feature (1)..(122): Homolog of NCBI NO: 15241857 NR Description: histone H2A, putative [Arabidopsis thaliana]
  misc_feature (1)..(122): Homolog of NCBI NO: 121982 NR Description: HISTONE H2A.2.2
  misc_feature (1)..(122): Homolog of NCBI NO: 122006 NR Description: HISTONE H2A >gi|81906|pir||JQ1183 histone H2A -

SEQ ID NO: 98784 - protein, 90 aa, Arabidopsis thaliana; identical to SEQ ID NO: 31041
  peptide (1)..(90): Ceres Seq. ID no. 13601500
  misc_feature (1)..(69): Pfam Name: Core histone H2A/H2B/H3/H4 Pfam Description: Core histone H2A/H2B/H3/H4
  misc_feature (1)..(90): Homolog of NCBI NO: 15238549 NR Description: histone H2A, putative [Arabidopsis thaliana]
  misc_feature (1)..(90): Homolog of NCBI NO: 122007 NR Description: Histone H2A >gi|100161|pir||S11498 histone H2A -
  misc_feature (1)..(90): Homolog of NCBI NO: 27529852 NR Description: H2A histone [Nicotiana tabacum]
  misc_feature (1)..(90): Homolog of NCBI NO: 122003 NR Description: HISTONE H2A >gi|82089|pir||JQ1182 histone H2A.1 -
  misc_feature (1)..(90): Homolog of NCBI NO: 34914498 NR Description: putative histone H2A [Oryza sativa (japonica group)] >gi|13873032|dbj|BAB44136.1| putative histone H2A [Oryza
  misc_feature (1)..(90): Homolog of NCBI NO: 7649159 NR Description: histone H2A [Euphorbia esula]
  misc_feature (1)..(90): Homolog of NCBI NO: 729671 NR Description: Histone H2A >gi|7439704|pir||T02076 histone H2A -
  misc_feature (1)..(90): Homolog of NCBI NO: 15241857 NR Description: histone H2A, putative [Arabidopsis thaliana]
  misc_feature (1)..(90): Homolog of NCBI NO: 121982 NR Description: HISTONE H2A.2.2
  misc_feature (1)..(90): Homolog of NCBI NO: 122006 NR Description: HISTONE H2A >gi|81906|pir||JQ1183 histone H2A -

SEQ ID NO: 98785 - DNA, 1119 bp, Arabidopsis thaliana
  misc_feature (1)..(1119): Ceres Seq. ID no. 13601501
  misc_feature: MA Experiment ID: 108461 Result: Down-regulated in Transcription
  misc_feature: MA Experiment 108461 PARAMETER Experiment Name: At_Germinating_Seeds_cDNA_P Parameter: Age (day) Value: 1 vs. 0
  misc_feature: MA Experiment 108461 PARAMETER Experiment Name: At_Germinating_Seeds_cDNA_P Parameter: Tissue Value: Germinating Seeds
  misc_feature: MA Experiment ID: 20000071 Result: Up-regulated in Transcription
  misc_feature: MA Experiment 20000071 PARAMETER Experiment Name: At_100uM_ABA_Mutants_cDNA_P Parameter: Plant Line Value: CS8104
  misc_feature: MA Experiment 20000071 PARAMETER Experiment Name: At_100uM_ABA_Mutants_cDNA_P Parameter: Timepoint (hr) Value: 6
  misc_feature: MA Experiment 20000071 PARAMETER Experiment Name: At_100uM_ABA_Mutants_cDNA_P Parameter: Tissue Value: Aerial
  misc_feature: MA Experiment 20000071 PARAMETER Experiment Name: At_100uM_ABA_Mutants_cDNA_P Parameter: Treatment Value: 100uM ABA vs. No Treatment
  misc_feature: MA Experiment ID: 20000179 Result: Down-regulated in Transcription
  misc_feature: MA Experiment 20000179 PARAMETER Experiment Name: At_Germinating_Seeds_P Parameter: Age (hr) Value: 6 vs. 0
  misc_feature: MA Experiment 20000179 PARAMETER Experiment Name: At_Germinating_Seeds_P Parameter: Tissue Value: Germinating Seeds
  misc_feature: MA Experiment ID: 20000180 Result: Down-regulated in Transcription
  misc_feature: MA Experiment 20000180 PARAMETER Experiment Name: At_Germinating_Seeds_P Parameter: Age (hr) Value: 24 vs. 0
  misc_feature: MA Experiment 20000180 PARAMETER Experiment Name: At_Germinating_Seeds_P Parameter: Tissue Value: Germinating Seeds
  misc_feature: MA Experiment ID: 20000224 Result: Down-regulated in Transcription
  misc_feature: MA Experiment ID: 20000437 Result: Up-regulated in Transcription
  misc_feature: MA Experiment 20000437 PARAMETER Experiment Name: At_Drought_P Parameter: Age (day) Value: 8
  misc_feature: MA Experiment 20000437 PARAMETER Experiment Name: At_Drought_P Parameter: Organism Value: A. thaliana
  misc_feature: MA Experiment 20000437 PARAMETER Experiment Name: At_Drought_P Parameter: Plant Line Value: WS
  misc_feature: MA Experiment 20000437 PARAMETER Experiment Name: At_Drought_P Parameter: Timepoint (hr) Value: 24
  misc_feature: MA Experiment 20000437 PARAMETER Experiment Name: At_Drought_P Parameter: Tissue Value: Whole Plant
  misc_feature: MA Experiment 20000437 PARAMETER Experiment Name: At_Drought_P Parameter: Treatment Value: Drought vs. No Drought
  misc_feature: MA Experiment ID: 20001450 Result: Up-regulated in Transcription
  misc_feature: MA Experiment 20001450 PARAMETER Experiment Name: At_Far-red-induction_P Parameter: Age (day) Value: 7
  misc_feature: MA Experiment 20001450 PARAMETER Experiment Name: At_Far-red-induction_P Parameter: Light Value: Far-red vs. White
  misc_feature: MA Experiment 20001450 PARAMETER Experiment Name: At_Far-red-induction_P Parameter: Organism Value: A. thaliana
  misc_feature: MA Experiment 20001450 PARAMETER Experiment Name: At_Far-red-induction_P Parameter: Plant Line Value: Columbia
  misc_feature: MA Experiment 20001450 PARAMETER Experiment Name: At_Far-red-induction_P Parameter: Timepoint (hr) Value: 8
  misc_feature: MA Experiment 20001450 PARAMETER Experiment Name: At_Far-red-induction_P Parameter: Tissue Value: Whole Plant
  misc_feature: MA Experiment ID: 20001451 Result: Up-regulated in Transcription
  misc_feature: MA Experiment 20001451 PARAMETER Experiment Name: At_Far-red-induction_P Parameter: Age (day) Value: 7
  misc_feature: MA Experiment 20001451 PARAMETER Experiment Name: At_Far-red-induction_P Parameter: Light Value: Far-red vs. White
  misc_feature: MA Experiment 20001451 PARAMETER Experiment Name: At_Far-red-induction_P Parameter: Organism Value: A. thaliana
  misc_feature: MA Experiment 20001451 PARAMETER Experiment Name: At_Far-red-induction_P Parameter: Plant Line Value: Columbia
  misc_feature: MA Experiment 20001451 PARAMETER Experiment Name: At_Far-red-induction_P Parameter: Timepoint (hr) Value: 24
  misc_feature: MA Experiment 20001451 PARAMETER Experiment Name: At_Far-red-induction_P Parameter: Tissue Value: Whole Plant
attgtaacttgtaaccagtgtcggctaatttcgacttttgtagatctttttctgctctttctctctctctctctctctctctctctctctctctctctcttgtattatttctatctcccccgccgtcgaaagagaaacgtcgatcggagaacctttgaaatgtcgactggattagatatgtctctcgacgacatgatcgccaagaaccgtaagtctcgtggtggagccggccccgctcgtggaaccggatccggatccggaccgggtccgactcgccgcaacaaccctaatcggaaatcaacccgatctgctccataccaatcagccaaggcgccggagtccacctggggtcacgacatgttctccgatagatctgaagatcaccgatcgggacgttcctccgccggaatcgaaactggaaccaagctctacatttccaatttggattacggtgtcatgaacgaagacatcaaggaactgtttgctgaagttggagaacttaaacgctacacagttcattttgatagaagtggaagatcaaagggaactgctgaagtagtgtattctcggcgtggcgatgcactcgcagctgtgaagaagtataatgatgttcagctggatggaaaacccatgaagatagagattgtgggcactaatcttcaaactgctgcagccccgtctggtagacctgcgaatggaaactccaatggtgctccatggagaggaggacaagggagaggaggtcaacaacgaggtggtggacgaggaggcggtggccgaggtggtggtggtcgtggtaggcgtcctggtaagggccctgcagagaagatttctgcggaagatcttgatgcggatcttgataagtaccattctggagatatggagacaaactaaggaacgtgactgatcttctcaaaccggtaggggttttaggaggaagagaatcgagaaaatgtttgccagaggctttaccacttagcgcctttttggctgtgttgttcatttgtttcattagaatgactttacagaattgagaatatgtgttatttaaagttgttgtctatcttaataccctcaagtgaaaggcagaggaaggaataccaatttcgtttacagatc

SEQ ID NO: 98786 - protein, 297 aa, Arabidopsis thaliana
  peptide (1)..(297): Ceres Seq. ID no. 13601502
  misc_feature (143)..(213): Pfam Name: RNA recognition motif. (a.k.a. RRM, RBD, or RNP domain) Pfam Description: RNA recognition motif. (a.k.a. RRM, RBD, or RNP
  misc_feature (54)..(297): Homolog of NCBI NO: 30697310 NR Description: RNA and export factor binding protein, putative
  misc_feature (54)..(297): Homolog of NCBI NO: 30697313 NR Description: RNA and export factor binding protein, putative
  misc_feature (54)..(297): Homolog of NCBI NO: 21555029 NR Description: transcriptional coactivator-like protein
  misc_feature (54)..(297): Homolog of NCBI NO: 9757916 NR Description: RNA and export factor binding protein 2-I-like
  misc_feature (67)..(297): Homolog of NCBI NO: 6755763 NR Description: RNA and export factor binding protein 1; Tcra binding factor interacting protein 1 [Mus musculus]
  misc_feature (54)..(89): Homolog of NCBI NO: 6755763 NR Description: RNA and export factor binding protein 1; Tcra binding factor interacting protein 1 [Mus musculus]
  misc_feature (71)..(297): Homolog of NCBI NO: 30411083 NR Description: Similar to THO complex 4 [Homo sapiens]
  misc_feature (54)..(89): Homolog of NCBI NO: 30411083 NR Description: Similar to THO complex 4 [Homo sapiens]
  misc_feature (71)..(272): Homolog of NCBI NO: 11358209 NR Description: hypothetical protein T22P11.120 - Arabidopsis >gi|7413642|emb|CAB85990.1| putative protein [Arabidopsis
  misc_feature (71)..(272): Homolog of NCBI NO: 30679669 NR Description: RNA and export factor binding protein, putative thaliana] >gi|22655123|gb|AAM98152.1| putative protein thaliana] >gi|30023796|gb|AAP13431.1| At5g02530 [Arabidopsis
IVTCNQCRLISTFVDLFLLFLSLSLSLSLSLSLLYYFYLPRRRKRNVDRRTFEMSTGLDMSLDDMIAKNRKSRGGAGPARGTGSGSGPGPTRRNNPNRKSTRSAPYQSAKAPESTWGHDMFSDRSEDHRSGRSSAGIETGTKLYISNLDYGVMNEDIKELFAEVGELKRYTVHFDRSGRSKGTAEVVYSRRGDALAAVKKYNDVQLDGKPMKIEIVGTNLQTAAAPSGRPANGNSNGAPWRGGQGRGGQQRGGGRGGGGRGGGGRGRRPGKGPAEKISAEDLDADLDKYHSGDMETN

SEQ ID NO: 98787 - protein, 244 aa, Arabidopsis thaliana; identical to SEQ ID NO: 20888
  peptide (1)..(244): Ceres Seq. ID no. 13601503
  misc_feature (90)..(160): Pfam Name: RNA recognition motif. (a.k.a. RRM, RBD, or RNP domain) Pfam Description: RNA recognition motif. (a.k.a. RRM, RBD, or RNP
  misc_feature (1)..(244): Homolog of NCBI NO: 30697310 NR Description: RNA and export factor binding protein, putative
  misc_feature (1)..(244): Homolog of NCBI NO: 30697313 NR Description: RNA and export factor binding protein, putative
  misc_feature (1)..(244): Homolog of NCBI NO: 21555029 NR Description: transcriptional coactivator-like protein
  misc_feature (1)..(244): Homolog of NCBI NO: 9757916 NR Description: RNA and export factor binding protein 2-I-like
  misc_feature (14)..(244): Homolog of NCBI NO: 6755763 NR Description: RNA and export factor binding protein 1; Tcra binding factor interacting protein 1 [Mus musculus]
  misc_feature (1)..(36): Homolog of NCBI NO: 6755763 NR Description: RNA and export factor binding protein 1; Tcra binding factor interacting protein 1 [Mus musculus]
  misc_feature (18)..(244): Homolog of NCBI NO: 30411083 NR Description: Similar to THO complex 4 [Homo sapiens]
  misc_feature (1)..(36): Homolog of NCBI NO: 30411083 NR Description: Similar to THO complex 4 [Homo sapiens]
  misc_feature (18)..(219): Homolog of NCBI NO: 11358209 NR Description: hypothetical protein T22P11.120 - Arabidopsis >gi|7413642|emb|CAB85990.1| putative protein [Arabidopsis
  misc_feature (18)..(219): Homolog of NCBI NO: 30679669 NR Description: RNA and export factor binding protein, putative thaliana] >gi|22655123|gb|AAM98152.1| putative protein thaliana] >gi|30023796|gb|AAP13431.1| At5g02530 [Arabidopsis

SEQ ID NO: 98788 - protein, 238 aa, Arabidopsis thaliana; identical to SEQ ID NO: 20889
  peptide (1)..(238): Ceres Seq. ID no. 13601504
  misc_feature (84)..(154): Pfam Name: RNA recognition motif. (a.k.a. RRM, RBD, or RNP domain) Pfam Description: RNA recognition motif. (a.k.a. RRM, RBD, or RNP
  misc_feature (1)..(238): Homolog of NCBI NO: 30697310 NR Description: RNA and export factor binding protein, putative
  misc_feature (1)..(238): Homolog of NCBI NO: 30697313 NR Description: RNA and export factor binding protein, putative
  misc_feature (1)..(238): Homolog of NCBI NO: 21555029 NR Description: transcriptional coactivator-like protein
  misc_feature (1)..(238): Homolog of NCBI NO: 9757916 NR Description: RNA and export factor binding protein 2-I-like
  misc_feature (8)..(238): Homolog of NCBI NO: 6755763 NR Description: RNA and export factor binding protein 1; Tcra binding factor interacting protein 1 [Mus musculus]
  misc_feature (1)..(30): Homolog of NCBI NO: 6755763 NR Description: RNA and export factor binding protein 1; Tcra binding factor interacting protein 1 [Mus musculus]
  misc_feature (12)..(238): Homolog of NCBI NO: 30411083 NR Description: Similar to THO complex 4 [Homo sapiens]
  misc_feature (1)..(30): Homolog of NCBI NO: 30411083 NR Description: Similar to THO complex 4 [Homo sapiens]
  misc_feature (12)..(213): Homolog of NCBI NO: 11358209 NR Description: hypothetical protein T22P11.120 - Arabidopsis >gi|7413642|emb|CAB85990.1| putative protein [Arabidopsis
  misc_feature (12)..(213): Homolog of NCBI NO: 30679669 NR Description: RNA and export factor binding protein, putative thaliana] >gi|22655123|gb|AAM98152.1| putative protein thaliana] >gi|30023796|gb|AAP13431.1| At5g02530 [Arabidopsis

SEQ ID NO: 98789 - DNA, 976 bp, Arabidopsis thaliana
  misc_feature (1)..(976): Ceres Seq. ID no. 13601511
  misc_feature: MA Experiment ID: 108473 Result: Down-regulated in Transcription
  misc_feature: MA Experiment 108473 PARAMETER Experiment Name: At_Drought_Flowers_cDNA_P Parameter: Timepoint (hr) Value: 7 d
  misc_feature: MA Experiment 108473 PARAMETER Experiment Name: At_Drought_Flowers_cDNA_P Parameter: Tissue Value: Flower
  misc_feature: MA Experiment 108473 PARAMETER Experiment Name: At_Drought_Flowers_cDNA_P Parameter: Treatment Value: Drought vs. No Drought
  misc_feature: MA Experiment ID: 108595 Result: Up-regulated in Transcription
  misc_feature: MA Experiment 108595 PARAMETER Experiment Name: At_Ler-pi_Ovule_cDNA_P Parameter: Plant Line Value: null
  misc_feature: MA Experiment ID: 108668 Result: Down-regulated in Transcription
  misc_feature: MA Experiment 108668 PARAMETER Experiment Name: At_2mM_SA_cDNA_P Parameter: Plant Line Value: WS
  misc_feature: MA Experiment 108668 PARAMETER Experiment Name: At_2mM_SA_cDNA_P Parameter: Timepoint (hr) Value: 6
  misc_feature: MA Experiment 108668 PARAMETER Experiment Name: At_2mM_SA_cDNA_P Parameter: Treatment Value: 2mM SA vs. No Treatment
  misc_feature: MA Experiment ID: 20000069 Result: Down-regulated in Transcription
  misc_feature: MA Experiment 20000069 PARAMETER Experiment Name: At_100uM_ABA_Mutants_cDNA_P Parameter: Plant Line Value: CS23
  misc_feature: MA Experiment 20000069 PARAMETER Experiment Name: At_100uM_ABA_Mutants_cDNA_P Parameter: Timepoint (hr) Value: 6
  misc_feature: MA Experiment 20000069 PARAMETER Experiment Name: At_100uM_ABA_Mutants_cDNA_P Parameter: Tissue Value: Aerial
  misc_feature: MA Experiment 20000069 PARAMETER Experiment Name: At_100uM_ABA_Mutants_cDNA_P Parameter: Treatment Value: 100uM ABA vs. No Treatment
  misc_feature: MA Experiment ID: 20000072 Result: Down-regulated in Transcription
  misc_feature: MA Experiment 20000072 PARAMETER Experiment Name: At_100uM_ABA_Mutants_cDNA_P Parameter: Plant Line Value: CS8105
  misc_feature: MA Experiment 20000072 PARAMETER Experiment Name: At_100uM_ABA_Mutants_cDNA_P Parameter: Timepoint (hr) Value: 6
  misc_feature: MA Experiment 20000072 PARAMETER Experiment Name: At_100uM_ABA_Mutants_cDNA_P Parameter: Tissue Value: Aerial
  misc_feature: MA Experiment 20000072 PARAMETER Experiment Name: At_100uM_ABA_Mutants_cDNA_P Parameter: Treatment Value: 100uM ABA vs. No Treatment
  misc_feature: MA Experiment ID: 20000113 Result: Down-regulated in Transcription
  misc_feature: MA Experiment 20000113 PARAMETER Experiment Name: At_42deg_Heat_cDNA_P Parameter: Temperature (deg C) Value: 42 vs. 22
  misc_feature: MA Experiment 20000113 PARAMETER Experiment Name: At_42deg_Heat_cDNA_P Parameter: Timepoint (hr) Value: 8
  misc_feature: MA Experiment 20000113 PARAMETER Experiment Name: At_42deg_Heat_cDNA_P Parameter: Tissue Value: Aerial
  misc_feature: MA Experiment ID: 20000117 Result: Down-regulated in Transcription
  misc_feature: MA Experiment 20000117 PARAMETER Experiment Name: At_100uM_ABA_Mutants_cDNA_P Parameter: Plant Line Value: Columbia
  misc_feature: MA Experiment 20000117 PARAMETER Experiment Name: At_100uM_ABA_Mutants_cDNA_P Parameter: Timepoint (hr) Value: 6
  misc_feature: MA Experiment 20000117 PARAMETER Experiment Name: At_100uM_ABA_Mutants_cDNA_P Parameter: Tissue Value: Aerial
  misc_feature: MA Experiment 20000117 PARAMETER Experiment Name: At_100uM_ABA_Mutants_cDNA_P Parameter: Treatment Value: 100uM ABA vs. No Treatment
  misc_feature: MA Experiment ID: 20000180 Result: Up-regulated in Transcription
  misc_feature: MA Experiment 20000180 PARAMETER Experiment Name: At_Germinating_Seeds_P Parameter: Age (hr) Value: 24 vs. 0
  misc_feature: MA Experiment 20000180 PARAMETER Experiment Name: At_Germinating_Seeds_P Parameter: Tissue Value: Germinating Seeds
  misc_feature: MA Experiment ID: 20000184 Result: Down-regulated in Transcription
  misc_feature: MA Experiment 20000184 PARAMETER Experiment Name: At_Shoots__P Parameter: Age (day) Value: 7
  misc_feature: MA Experiment 20000184 PARAMETER Experiment Name: At_Shoots__P Parameter: Tissue Value: Shoots vs. Whole Plant
  misc_feature: MA Experiment ID: 20000185 Result: Down-regulated in Transcription
  misc_feature: MA Experiment 20000185 PARAMETER Experiment Name: At_Roots__P Parameter: Age (day) Value: 7 vs. 21
  misc_feature: MA Experiment 20000185 PARAMETER Experiment Name: At_Roots__P Parameter: Organism Value: A. thaliana
  misc_feature: MA Experiment 20000185 PARAMETER Experiment Name: At_Roots__P Parameter: Tissue Value: Roots vs. Whole Plant
  misc_feature: MA Experiment ID: 20000264 Result: Down-regulated in Transcription
  misc_feature: MA Experiment 20000264 PARAMETER Experiment Name: At_Open_Flower_P Parameter: Age (day) Value: 21
  misc_feature: MA Experiment 20000264 PARAMETER Experiment Name: At_Open_Flower_P Parameter: Plant Line Value: WS
  misc_feature: MA Experiment 20000264 PARAMETER Experiment Name: At_Open_Flower_P Parameter: Tissue Value: Open Flower vs. Whole Plant
  misc_feature: MA Experiment ID: 20000265 Result: Down-regulated in Transcription
  misc_feature: MA Experiment 20000265 PARAMETER Experiment Name: At_Open_Flower_P Parameter: Age (day) Value: 21
  misc_feature: MA Experiment 20000265 PARAMETER Experiment Name: At_Open_Flower_P Parameter: Plant Line Value: WS
  misc_feature: MA Experiment 20000265 PARAMETER Experiment Name: At_Open_Flower_P Parameter: Tissue Value: Closed Flower vs. Whole Plant
  misc_feature: MA Experiment ID: 20000286 Result: Down-regulated in Transcription
  misc_feature: MA Experiment 20000286 PARAMETER Experiment Name: At_Open_Flower_P Parameter: Age (day) Value: 21
  misc_feature: MA Experiment 20000286 PARAMETER Experiment Name: At_Open_Flower_P Parameter: Plant Line Value: WS
  misc_feature: MA Experiment 20000286 PARAMETER Experiment Name: At_Open_Flower_P Parameter: Tissue Value: Half Open vs. Whole Plant
  misc_feature: MA Experiment ID: 20000438 Result: Down-regulated in Transcription
  misc_feature: MA Experiment 20000438 PARAMETER Experiment Name: At_Shoots__P Parameter: Age (day) Value: 14
  misc_feature: MA Experiment 20000438 PARAMETER Experiment Name: At_Shoots__P Parameter: Tissue Value: Shoots vs. Whole Plant
  misc_feature: MA Experiment ID: 20000439 Result: Down-regulated in Transcription
  misc_feature: MA Experiment 20000439 PARAMETER Experiment Name: At_Roots__P Parameter: Age (day) Value: 14 vs. 21
  misc_feature: MA Experiment 20000439 PARAMETER Experiment Name: At_Roots__P Parameter: Organism Value: A. thaliana
  misc_feature: MA Experiment 20000439 PARAMETER Experiment Name: At_Roots__P Parameter: Tissue Value: Roots vs. Whole Plant
  misc_feature: MA Experiment ID: 20000495 Result: Up-regulated in Transcription
  misc_feature: MA Experiment 20000495 PARAMETER Experiment Name: At_Guard_Cells_P Parameter: Harvest Date Value: 8/2/2002
  misc_feature: MA Experiment 20000495 PARAMETER Experiment Name: At_Guard_Cells_P Parameter: Organism Value: A. thaliana
  misc_feature: MA Experiment 20000495 PARAMETER Experiment Name: At_Guard_Cells_P Parameter: Tissue Value: Guard Cells vs. Leaves
  misc_feature: MA Experiment ID: 20000527 Result: Down-regulated in Transcription
  misc_feature: MA Experiment 20000527 PARAMETER Experiment Name: At_10percent_PEG_P Parameter: Age (day) Value: 20
  misc_feature: MA Experiment 20000527 PARAMETER Experiment Name: At_10percent_PEG_P Parameter: Organism Value: A. thaliana
  misc_feature: MA Experiment 20000527 PARAMETER Experiment Name: At_10percent_PEG_P Parameter: Plant Line Value: WS
  misc_feature: MA Experiment 20000527 PARAMETER Experiment Name: At_10percent_PEG_P Parameter: Timepoint (day) Value: 20
  misc_feature: MA Experiment 20000527 PARAMETER Experiment Name: At_10percent_PEG_P Parameter: Tissue Value: Whole Plant
  misc_feature: MA Experiment 20000527 PARAMETER Experiment Name: At_10percent_PEG_P Parameter: Treatment Value: 10percent PEG vs. No Treatment
  misc_feature: MA Experiment ID: 20000794 Result: Down-regulated in Transcription
  misc_feature: MA Experiment 20000794 PARAMETER Experiment Name: At_Petals_P Parameter: Age (day) Value: 23-25 days
  misc_feature: MA Experiment 20000794 PARAMETER Experiment Name: At_Petals_P Parameter: Plant Line Value: WS
  misc_feature: MA Experiment 20000794 PARAMETER Experiment Name: At_Petals_P Parameter: Tissue Value: Petals vs. Whole plant
  misc_feature: MA Experiment ID: 20001555 Result: Down-regulated in Transcription
  misc_feature: MA Experiment 20001555 PARAMETER Experiment Name: At_Drought_Soil_Dry_P Parameter: Age (day) Value: 24
  misc_feature: MA Experiment 20001555 PARAMETER Experiment Name: At_Drought_Soil_Dry_P Parameter: Organism Value: A. thaliana
  misc_feature: MA Experiment 20001555 PARAMETER Experiment Name: At_Drought_Soil_Dry_P Parameter: Plant Line Value: WS
  misc_feature: MA Experiment 20001555 PARAMETER Experiment Name: At_Drought_Soil_Dry_P Parameter: Post Timepoint (hr) Value: None
  misc_feature: MA Experiment 20001555 PARAMETER Experiment Name: At_Drought_Soil_Dry_P Parameter: Post-Treatment Value: None
  misc_feature: MA Experiment 20001555 PARAMETER Experiment Name: At_Drought_Soil_Dry_P Parameter: Timepoint (day) Value: 10
  misc_feature: MA Experiment 20001555 PARAMETER Experiment Name: At_Drought_Soil_Dry_P Parameter: Treatment Value: Drought vs. No Drought
  misc_feature: MA Experiment ID: 20001556 Result: Down-regulated in Transcription
  misc_feature: MA Experiment 20001556 PARAMETER Experiment Name: At_Drought_Soil_Dry_P Parameter: Age (day) Value: 26
  misc_feature: MA Experiment 20001556 PARAMETER Experiment Name: At_Drought_Soil_Dry_P Parameter: Organism Value: A. thaliana
  misc_feature: MA Experiment 20001556 PARAMETER Experiment Name: At_Drought_Soil_Dry_P Parameter: Plant Line Value: WS
  misc_feature: MA Experiment 20001556 PARAMETER Experiment Name: At_Drought_Soil_Dry_P Parameter: Post Timepoint (hr) Value: None
  misc_feature: MA Experiment 20001556 PARAMETER Experiment Name: At_Drought_Soil_Dry_P Parameter: Post-Treatment Value: None
  misc_feature: MA Experiment 20001556 PARAMETER Experiment Name: At_Drought_Soil_Dry_P Parameter: Timepoint (day) Value: 12
  misc_feature: MA Experiment 20001556 PARAMETER Experiment Name: At_Drought_Soil_Dry_P Parameter: Treatment Value: Drought vs. No Drought
  misc_feature: MA Experiment ID: 20001558 Result: Down-regulated in Transcription
  misc_feature: MA Experiment 20001558 PARAMETER Experiment Name: At_Drought_Soil_Dry_P Parameter: Age (day) Value: 27
  misc_feature: MA Experiment 20001558 PARAMETER Experiment Name: At_Drought_Soil_Dry_P Parameter: Organism Value: A. thaliana
  misc_feature: MA Experiment 20001558 PARAMETER Experiment Name: At_Drought_Soil_Dry_P Parameter: Plant Line Value: WS
  misc_feature: MA Experiment 20001558 PARAMETER Experiment Name: At_Drought_Soil_Dry_P Parameter: Post Timepoint (hr) Value: 6
  misc_feature: MA Experiment 20001558 PARAMETER Experiment Name: At_Drought_Soil_Dry_P Parameter: Post-Treatment Value: Re-Water vs. No Drought
  misc_feature: MA Experiment 20001558 PARAMETER Experiment Name: At_Drought_Soil_Dry_P Parameter: Timepoint (day) Value: 13
  misc_feature: MA Experiment 20001558 PARAMETER Experiment Name: At_Drought_Soil_Dry_P Parameter: Treatment Value: Drought vs. No Drought
  misc_feature: MA Experiment ID: 20001559 Result: Down-regulated in Transcription
  misc_feature: MA Experiment 20001559 PARAMETER Experiment Name: At_Drought_Soil_Dry_P Parameter: Age (day) Value: 28
  misc_feature: MA Experiment 20001559 PARAMETER Experiment Name: At_Drought_Soil_Dry_P Parameter: Organism Value: A. thaliana
  misc_feature: MA Experiment 20001559 PARAMETER Experiment Name: At_Drought_Soil_Dry_P Parameter: Plant Line Value: WS
  misc_feature: MA Experiment 20001559 PARAMETER Experiment Name: At_Drought_Soil_Dry_P Parameter: Post Timepoint (hr) Value: 29
  misc_feature: MA Experiment 20001559 PARAMETER Experiment Name: At_Drought_Soil_Dry_P Parameter: Post-Treatment Value: Re-Water vs. No Drought
  misc_feature: MA Experiment 20001559 PARAMETER Experiment Name: At_Drought_Soil_Dry_P Parameter: Timepoint (day) Value: 14
  misc_feature: MA Experiment 20001559 PARAMETER Experiment Name: At_Drought_Soil_Dry_P Parameter: Treatment Value: Drought vs. No Drought
  misc_feature: MA Experiment ID: 20001768 Result: Up-regulated in Transcription
  misc_feature: MA Experiment 20001768 PARAMETER Experiment Name: At_Far-red-enriched-adult_P Parameter: Age (day) Value: 28
  misc_feature: MA Experiment 20001768 PARAMETER Experiment Name: At_Far-red-enriched-adult_P Parameter: Light Value: Far-red enriched vs. White
  misc_feature: MA Experiment 20001768 PARAMETER Experiment Name: At_Far-red-enriched-adult_P Parameter: Organism Value: A. thaliana
  misc_feature: MA Experiment 20001768 PARAMETER Experiment Name: At_Far-red-enriched-adult_P Parameter: Plant Line Value: Columbia
  misc_feature: MA Experiment 20001768 PARAMETER Experiment Name: At_Far-red-enriched-adult_P Parameter: Timepoint (hr) Value: 1
  misc_feature: MA Experiment 20001768 PARAMETER Experiment Name: At_Far-red-enriched-adult_P Parameter: Tissue Value: Aerial
  misc_feature: MA Experiment ID: 20001771 Result: Up-regulated in Transcription
  misc_feature: MA Experiment 20001771 PARAMETER Experiment Name: At_Far-red-enriched-adult_P Parameter: Age (day) Value: 28
  misc_feature: MA Experiment 20001771 PARAMETER Experiment Name: At_Far-red-enriched-adult_P Parameter: Light Value: Far-red enriched vs. White
  misc_feature: MA Experiment 20001771 PARAMETER Experiment Name: At_Far-red-enriched-adult_P Parameter: Organism Value: A. thaliana
  misc_feature: MA Experiment 20001771 PARAMETER Experiment Name: At_Far-red-enriched-adult_P Parameter: Plant Line Value: Columbia
  misc_feature: MA Experiment 20001771 PARAMETER Experiment Name: At_Far-red-enriched-adult_P Parameter: Timepoint (hr) Value: 16
  misc_feature: MA Experiment 20001771 PARAMETER Experiment Name: At_Far-red-enriched-adult_P Parameter: Tissue Value: Aerial
  misc_feature: MA Experiment ID: 20001773 Result: Up-regulated in Transcription
  misc_feature: MA Experiment 20001773 PARAMETER Experiment Name: At_Far-red-enriched-adult_P Parameter: Age (day) Value: 30
  misc_feature: MA Experiment 20001773 PARAMETER Experiment Name: At_Far-red-enriched-adult_P Parameter: Light Value: Far-red enriched vs. White
  misc_feature: MA Experiment 20001773 PARAMETER Experiment Name: At_Far-red-enriched-adult_P Parameter: Organism Value: A. thaliana
  misc_feature: MA Experiment 20001773 PARAMETER Experiment Name: At_Far-red-enriched-adult_P Parameter: Plant Line Value: Columbia
  misc_feature: MA Experiment 20001773 PARAMETER Experiment Name: At_Far-red-enriched-adult_P Parameter: Timepoint (hr) Value: 48
  misc_feature: MA Experiment 20001773 PARAMETER Experiment Name: At_Far-red-enriched-adult_P Parameter: Tissue Value: Aerial
  misc_feature: MA Experiment ID: 20001906 Result: Down-regulated in Transcription
  misc_feature: MA Experiment 20001906 PARAMETER Experiment Name: At_Drought_Reproduction_P Parameter: Age (day) Value: 35
  misc_feature: MA Experiment 20001906 PARAMETER Experiment Name: At_Drought_Reproduction_P Parameter: Organism Value: A. thaliana
  misc_feature: MA Experiment 20001906 PARAMETER Experiment Name: At_Drought_Reproduction_P Parameter: Plant Line Value: WS
  misc_feature: MA Experiment 20001906 PARAMETER Experiment Name: At_Drought_Reproduction_P Parameter: Timepoint (day) Value: 5
  misc_feature: MA Experiment 20001906 PARAMETER Experiment Name: At_Drought_Reproduction_P Parameter: Tissue Value: Siliques
  misc_feature: MA Experiment 20001906 PARAMETER Experiment Name: At_Drought_Reproduction_P Parameter: Treatment Value: Drought vs. No Drought
acacaaacaaaatatcaacactcttgaaaacagagccatggaacattctctcatcatcctcctcttcaccgtcctcctcctcctcaccaccactcccggaatcctatctcagccctctccagccgtcgctccggccccaccaggacccacaaacgttaccaaaatcctagagaaagctggtcaattcaccgtcttcatccgactcctcaaatccactggagtcgctaaccaactctacggccaactaaacaactccgacaatggaatcactatattcgcaccgagtgattcctcgttcaccggtctcaaagccgggaccctaaattcgttaaccgatgagcaacaagtagagcttattcagtttcatgtcataccaagttacgtctcttcctcaaacttccaaacaataagtaaccctctccggactcaggccggtgactccgccgatggacattttcctctcaacgttaccaccagtggcaataccgtaaatatcacgtccggcgtaaccaacaccaccgtctccggcaatgtctacagcgatggacagctcgctgtttatcaggtcgataaggttttgcttccacaacaagttttcgatcctcgtcctcctgctccggctccggctccgtctgtatcgaaatcaaagaagaagaaggatgacagtgatagttccagtgatgattctccggcggatgcttcgtttgctttgcgtaatgttggttctgtgtgtgatgcggtgtcgttttgcgtcatgagtgtaatgctcgcatggttttatttgtgatgaaaagctttttttttttttgtgctgataaattgttattttttattactcatgattttctgccatgtgggtgattttggggatatatttgtgtcttggttttcatacgattttgtgttaatcaatccatttgttttttatattttcgtttatttttattaatacaaatcatattttccgttttcgtgc

SEQ ID NO: 98790 - protein, 261 aa, Arabidopsis thaliana
  peptide (1)..(261): Ceres Seq. ID no. 13601512
  misc_feature (49)..(195): Pfam Name: Fasciclin domain Pfam Description: Fasciclin domain
  misc_feature (13)..(261): Homolog of NCBI NO: 15239344 NR Description: fasciclin-like arabinogalactan-protein (FLA12) thaliana] >gi|9757751|dbj|BAB08232.1| contains similarity to
  misc_feature (13)..(261): Homolog of NCBI NO: 21553590 NR Description: arabinogalactan protein-like [Arabidopsis
  misc_feature (13)..(257): Homolog of NCBI NO: 15294288 NR Description: AT5g60490/muf9_140 [Arabidopsis thaliana]
  misc_feature (13)..(241): Homolog of NCBI NO: 30841338 NR Description: arabinogalactan protein [Gossypium hirsutum]
  misc_feature (24)..(237): Homolog of NCBI NO: 5919185 NR Description: arabinogalactan protein Pop14A9 [Populus x
  misc_feature (21)..(232): Homolog of NCBI NO: 21553523 NR Description: arabinogalactan protein-like [Arabidopsis
  misc_feature (21)..(232): Homolog of NCBI NO: 15242651 NR Description: fasciclin-like arabinogalactan-protein (FLA11)
  misc_feature (31)..(234): Homolog of NCBI NO: 34896012 NR Description: EST D25138(R3286) corresponds to a region of the
  misc_feature (28)..(243): Homolog of NCBI NO: 2129473 NR Description: arabinogalactan-like protein - loblolly pine
  misc_feature (24)..(256): Homolog of NCBI NO: 34910950 NR Description: putative arabinogalactan-like protein [Oryza
HKQNINTLENRAMEHSLIILLFTVLLLLTTTPGILSQPSPAVAPAPPGPTNVTKILEKAGQFTVFIRLLKSTGVANQLYGQLNNSDNGITIFAPSDSSFTGLKAGTLNSLTDEQQVELIQFHVIPSYVSSSNFQTISNPLRTQAGDSADGHFPLNVTTSGNTVNITSGVTNTTVSGNVYSDGQLAVYQVDKVLLPQQVFDPRPPAPAPAPSVSKSKKKKDDSDSSSDDSPADASFALRNVGSVCDAVSFCVMSVMLAWFYL

SEQ ID NO: 98791 - protein, 249 aa, Arabidopsis thaliana
  peptide (1)..(249): Ceres Seq. ID no. 13601513
  misc_feature (37)..(183): Pfam Name: Fasciclin domain Pfam Description: Fasciclin domain
  misc_feature (1)..(249): Homolog of NCBI NO: 15239344 NR Description: fasciclin-like arabinogalactan-protein (FLA12) thaliana] >gi|9757751|dbj|BAB08232.1| contains similarity to
  misc_feature (1)..(249): Homolog of NCBI NO: 21553590 NR Description: arabinogalactan protein-like [Arabidopsis
  misc_feature (1)..(245): Homolog of NCBI NO: 15294288 NR Description: AT5g60490/muf9_140 [Arabidopsis thaliana]
  misc_feature (1)..(229): Homolog of NCBI NO: 30841338 NR Description: arabinogalactan protein [Gossypium hirsutum]
  misc_feature (12)..(225): Homolog of NCBI NO: 5919185 NR Description: arabinogalactan protein Pop14A9 [Populus x
  misc_feature (9)..(220): Homolog of NCBI NO: 21553523 NR Description: arabinogalactan protein-like [Arabidopsis
  misc_feature (9)..(220): Homolog of NCBI NO: 15242651 NR Description: fasciclin-like arabinogalactan-protein (FLA11)
  misc_feature (19)..(222): Homolog of NCBI NO: 34896012 NR Description: EST D25138(R3286) corresponds to a region of the
  misc_feature (16)..(231): Homolog of NCBI NO: 2129473 NR Description: arabinogalactan-like protein - loblolly pine
  misc_feature (12)..(244): Homolog of NCBI NO: 34910950 NR Description: putative arabinogalactan-like protein [Oryza
MEHSLIILLFTVLLLLTTTPGILSQPSPAVAPAPPGPTNVTKILEKAGQFTVFIRLLKSTGVANQLYGQLNNSDNGITIFAPSDSSFTGLKAGTLNSLTDEQQVELIQFHVIPSYVSSSNFQTISNPLRTQAGDSADGHFPLNVTTSGNTVNITSGVTNTTVSGNVYSDGQLAVYQVDKVLLPQQVFDPRPPAPAPAPSVSKSKKKKDDSDSSSDDSPADASFALRNVGSVCDAVSFCVMSVMLAWFYL

SEQ ID NO: 98792 - DNA, 1100 bp, Arabidopsis thaliana
  misc_feature (1)..(1100): Ceres Seq. ID no. 13601514
  misc_feature: MA Experiment ID: 108473 Result: Down-regulated in Transcription
  misc_feature: MA Experiment 108473 PARAMETER Experiment Name: At_Drought_Flowers_cDNA_P Parameter: Timepoint (hr) Value: 7 d
  misc_feature: MA Experiment 108473 PARAMETER Experiment Name: At_Drought_Flowers_cDNA_P Parameter: Tissue Value: Flower
  misc_feature: MA Experiment 108473 PARAMETER Experiment Name: At_Drought_Flowers_cDNA_P Parameter: Treatment Value: Drought vs. No Drought
  misc_feature: MA Experiment ID: 108501 Result: Down-regulated in Transcription
  misc_feature: MA Experiment 108501 PARAMETER Experiment Name: At_ap2_floral_buds_cDNA_P Parameter: Plant Line Value: ap2 (Ler.)
  misc_feature: MA Experiment 108501 PARAMETER Experiment Name: At_ap2_floral_buds_cDNA_P Parameter: Tissue Value: Closed Flower
  misc_feature: MA Experiment ID: 20000265 Result: Up-regulated in Transcription
  misc_feature: MA Experiment 20000265 PARAMETER Experiment Name: At_Open_Flower_P Parameter: Age (day) Value: 21
  misc_feature: MA Experiment 20000265 PARAMETER Experiment Name: At_Open_Flower_P Parameter: Plant Line Value: WS
  misc_feature: MA Experiment 20000265 PARAMETER Experiment Name: At_Open_Flower_P Parameter: Tissue Value: Closed Flower vs. Whole Plant
  misc_feature: MA Experiment ID: 20000286 Result: Up-regulated in Transcription
  misc_feature: MA Experiment 20000286 PARAMETER Experiment Name: At_Open_Flower_P Parameter: Age (day) Value: 21
  misc_feature: MA Experiment 20000286 PARAMETER Experiment Name: At_Open_Flower_P Parameter: Plant Line Value: WS
  misc_feature: MA Experiment 20000286 PARAMETER Experiment Name: At_Open_Flower_P Parameter: Tissue Value: Half Open vs. Whole Plant
  misc_feature: MA Experiment ID: 20001910 Result: Down-regulated in Transcription
  misc_feature: MA Experiment 20001910 PARAMETER Experiment Name: At_Drought_Reproduction_P Parameter: Age (day) Value: 37
  misc_feature: MA Experiment 20001910 PARAMETER Experiment Name: At_Drought_Reproduction_P Parameter: Organism Value: A. thaliana
  misc_feature: MA Experiment 20001910 PARAMETER Experiment Name: At_Drought_Reproduction_P Parameter: Plant Line Value: WS
  misc_feature: MA Experiment 20001910 PARAMETER Experiment Name: At_Drought_Reproduction_P Parameter: Timepoint (day) Value: 7
  misc_feature: MA Experiment 20001910 PARAMETER Experiment Name: At_Drought_Reproduction_P Parameter: Tissue Value: Flowers
  misc_feature: MA Experiment 20001910 PARAMETER Experiment Name: At_Drought_Reproduction_P Parameter: Treatment Value: Drought vs. No Drought
aaaaaccccaaacttcttgattctcccctccgataaccaaaaaatccctattttccgagatgaataatacacgagaagaagtaggggaattcactcaaatcttcaacgctttaatgagtcttatgaggaaatttatattcaaagttctacgcgtcggtccaatccctactaacatttctttcatcatggatggaaaccgtaggttcgccaagaaacgcaatcttgaaggcctagacgcaggacacagagctggtttcatatccgtcaaatatattcttcaatactgcaaagagattggtgtaccgtatgtcacactctacgcatttggtatggacaatttcaagagaggacctgaagaagtcaagtgtgtgatggatctaatgcttgagaaagtcgagctcacgatcgatcaagctgtatcagggaatatgaacggcgtgagaataatctttgccggcgatttgaattcgttaaacgagcgttttagagctgcgacaaagaaactgatggagcttacggaggagaacagagatctgattgttgtggtttgcgttgcttatagcacaagtgtcgagattgttcacgctgttcgagattcttgtgttagaaagagtaaaactggagatggttcttcagctttggagttgagtgatattgaagagtgtatgtatacatcggttgtgccggttccggatcttgtggtaagaaccggaggaggagatcggctgagtaacttcatgacgtggcaaacttctagggcacttcttcatagaacggaggctctttggccggagttagggctatggcatttggtttgggccattctgaaattccagagaatgcaagattacttgcagaagaagaagaagctccactaaatagtttctaagttaaaccctagaatgaacttaaacccttatgtttgattacatgtttcttgtggtgtaagaaacaacgaaccgaaactgagaaaccacaagaaaatcctttttattatgtatgggatacaaaataacaaaaacagacataaaacatcgataattattcaatttaacgatgctaaaacactacaattagaggcttaattaaaagacagtttg

SEQ ID NO: 98793 - protein, 272 aa, Arabidopsis thaliana
  peptide (1)..(272): Ceres Seq. ID no. 13601515
  misc_feature (42)..(267): Pfam Name: Putative undecaprenyl diphosphate synthase Pfam Description: Putative undecaprenyl diphosphate synthase
  misc_feature (1)..(272): Homolog of NCBI NO: 15239358 NR Description: undecaprenyl pyrophosphate synthetase (UPP
  misc_feature (1)..(272): Homolog of NCBI NO: 21593244 NR Description: undecaprenyl diphosphate synthase [Arabidopsis
  misc_feature (22)..(272): Homolog of NCBI NO: 9757753 NR Description: undecaprenyl pyrophosphate synthetase-like
  misc_feature (3)..(271): Homolog of NCBI NO: 15239357 NR Description: undecaprenyl pyrophosphate synthetase (UPP family [Arabidopsis thaliana] >gi|21553621|gb|AAM62714.1|
  misc_feature (22)..(271): Homolog of NCBI NO: 9757752 NR Description: undecaprenyl pyrophosphate synthetase-like
  misc_feature (6)..(213): Homolog of NCBI NO: 23491567 NR Description: cis-prenyltransferase [Periploca sepium]
  misc_feature (190)..(270): Homolog of NCBI NO: 23491567 NR Description: cis-prenyltransferase [Periploca sepium]
  misc_feature (9)..(270): Homolog of NCBI NO: 16751461 NR Description: cis-prenyltransferase [Hevea brasiliensis]
  misc_feature (9)..(270): Homolog of NCBI NO: 18148934 NR Description: cis-prenyltransferase [Hevea brasiliensis]
  misc_feature (1)..(271): Homolog of NCBI NO: 34898408 NR Description: ESTs C72761(E2193),AU056875(S20945), correspond to a region of the predicted gene.~Similar to Thermus gene for homocitrate synthase, homoaconitate hydratase, and
MNNTREEVGEFTQIFNALMSLMRKFIFKVLRVGPIPTNISFIMDGNRRFAKKRNLEGLDAGHRAGFISVKYILQYCKEIGVPYVTLYAFGMDNFKRGPEEVKCVMDLMLEKVELTIDQAVSGNMNGVRIIFAGDLNSLNERFRAATKKLMELTEENRDLIVVVCVAYSTSVEIVHAVRDSCVRKSKTGDGSSALELSDIEECMYTSVVPVPDLVVRTGGGDRLSNFMTWQTSRALLHRTEALWPELGLWHLVWAILKFQRMQDYLQKKKKLH

SEQ ID NO: 98794 - protein, 254 aa, Arabidopsis thaliana
  peptide (1)..(254): Ceres Seq. ID no. 13601516
  misc_feature (24)..(249): Pfam Name: Putative undecaprenyl diphosphate synthase Pfam Description: Putative undecaprenyl diphosphate synthase
  misc_feature (1)..(254): Homolog of NCBI NO: 15239358 NR Description: undecaprenyl pyrophosphate synthetase (UPP
  misc_feature (1)..(254): Homolog of NCBI NO: 21593244 NR Description: undecaprenyl diphosphate synthase [Arabidopsis
  misc_feature (4)..(254): Homolog of NCBI NO: 9757753 NR Description: undecaprenyl pyrophosphate synthetase-like
  misc_feature (1)..(253): Homolog of NCBI NO: 15239357 NR Description: undecaprenyl pyrophosphate synthetase (UPP family [Arabidopsis thaliana] >gi|21553621|gb|AAM62714.1|
  misc_feature (4)..(253): Homolog of NCBI NO: 9757752 NR Description: undecaprenyl pyrophosphate synthetase-like
  misc_feature (1)..(195): Homolog of NCBI NO: 23491567 NR Description: cis-prenyltransferase [Periploca sepium]
  misc_feature (172)..(252): Homolog of NCBI NO: 23491567 NR Description: cis-prenyltransferase [Periploca sepium]
  misc_feature (1)..(252): Homolog of NCBI NO: 16751461 NR Description: cis-prenyltransferase [Hevea brasiliensis]
  misc_feature (1)..(252): Homolog of NCBI NO: 18148934 NR Description: cis-prenyltransferase [Hevea brasiliensis]
  misc_feature (1)..(253): Homolog of NCBI NO: 34898408 NR Description: ESTs C72761(E2193),AU056875(S20945), correspond to a region of the predicted gene.~Similar to Thermus gene for homocitrate synthase, homoaconitate hydratase, and
MSLMRKFIFKVLRVGPIPTNISFIMDGNRRFAKKRNLEGLDAGHRAGFISVKYILQYCKEIGVPYVTLYAFGMDNFKRGPEEVKCVMDLMLEKVELTIDQAVSGNMNGVRIIFAGDLNSLNERFRAATKKLMELTEENRDLIVVVCVAYSTSVEIVHAVRDSCVRKSKTGDGSSALELSDIEECMYTSVVPVPDLVVRTGGGDRLSNFMTWQTSRALLHRTEALWPELGLWHLVWAILKFQRMQDYLQKKKKLH

SEQ ID NO: 98795 - protein, 251 aa, Arabidopsis thaliana
  peptide (1)..(251): Ceres Seq. ID no. 13601517
  misc_feature (21)..(246): Pfam Name: Putative undecaprenyl diphosphate synthase Pfam Description: Putative undecaprenyl diphosphate synthase
  misc_feature (1)..(251): Homolog of NCBI NO: 15239358 NR Description: undecaprenyl pyrophosphate synthetase (UPP
  misc_feature (1)..(251): Homolog of NCBI NO: 21593244 NR Description: undecaprenyl diphosphate synthase [Arabidopsis
  misc_feature (1)..(251): Homolog of NCBI NO: 9757753 NR Description: undecaprenyl pyrophosphate synthetase-like
  misc_feature (1)..(250): Homolog of NCBI NO: 15239357 NR Description: undecaprenyl pyrophosphate synthetase (UPP family [Arabidopsis thaliana] >gi|21553621|gb|AAM62714.1|
  misc_feature (1)..(250): Homolog of NCBI NO: 9757752 NR Description: undecaprenyl pyrophosphate synthetase-like
  misc_feature (1)..(192): Homolog of NCBI NO: 23491567 NR Description: cis-prenyltransferase [Periploca sepium]
  misc_feature (169)..(249): Homolog of NCBI NO: 23491567 NR Description: cis-prenyltransferase [Periploca sepium]
  misc_feature (1)..(249): Homolog of NCBI NO: 16751461 NR Description: cis-prenyltransferase [Hevea brasiliensis]
  misc_feature (1)..(249): Homolog of NCBI NO: 18148934 NR Description: cis-prenyltransferase [Hevea brasiliensis]
  misc_feature (1)..(250): Homolog of NCBI NO: 34898408 NR Description: ESTs C72761(E2193),AU056875(S20945), correspond to a region of the predicted gene.~Similar to Thermus gene for homocitrate synthase, homoaconitate hydratase, and
MRKFIFKVLRVGPIPTNISFIMDGNRRFAKKRNLEGLDAGHRAGFISVKYILQYCKEIGVPYVTLYAFGMDNFKRGPEEVKCVMDLMLEKVELTIDQAVSGNMNGVRIIFAGDLNSLNERFRAATKKLMELTEENRDLIVVVCVAYSTSVEIVHAVRDSCVRKSKTGDGSSALELSDIEECMYTSVVPVPDLVVRTGGGDRLSNFMTWQTSRALLHRTEALWPELGLWHLVWAILKFQRMQDYLQKKKKLH

SEQ ID NO: 98796 - DNA, 1943 bp, Arabidopsis thaliana
  misc_feature (1)..(1943): Ceres Seq. ID no. 13601524
  misc_feature: MA Experiment ID: 108434 Result: Up-regulated in Transcription
  misc_feature: MA Experiment 108434 PARAMETER Experiment Name: At_Root_Tips_cDNA_P Parameter: Tissue Value: Root Tips
  misc_feature: MA Experiment ID: 108461 Result: Up-regulated in Transcription
  misc_feature: MA Experiment 108461 PARAMETER Experiment Name: At_Germinating_Seeds_cDNA_P Parameter: Age (day) Value: 1 vs. 0
  misc_feature: MA Experiment 108461 PARAMETER Experiment Name: At_Germinating_Seeds_cDNA_P Parameter: Tissue Value: Germinating Seeds
  misc_feature: MA Experiment ID: 20000111 Result: Down-regulated in Transcription
  misc_feature: MA Experiment 20000111 PARAMETER Experiment Name: At_42deg_Heat_cDNA_P Parameter: Temperature (deg C) Value: 42 vs. 22
  misc_feature: MA Experiment 20000111 PARAMETER Experiment Name: At_42deg_Heat_cDNA_P Parameter: Timepoint (hr) Value: 6
  misc_feature: MA Experiment 20000111 PARAMETER Experiment Name: At_42deg_Heat_cDNA_P Parameter: Tissue Value: Aerial
  misc_feature: MA Experiment ID: 20000113 Result: Down-regulated in Transcription
  misc_feature: MA Experiment 20000113 PARAMETER Experiment Name: At_42deg_Heat_cDNA_P Parameter: Temperature (deg C) Value: 42 vs. 22
  misc_feature: MA Experiment 20000113 PARAMETER Experiment Name: At_42deg_Heat_cDNA_P Parameter: Timepoint (hr) Value: 8
  misc_feature: MA Experiment 20000113 PARAMETER Experiment Name: At_42deg_Heat_cDNA_P Parameter: Tissue Value: Aerial
  misc_feature: MA Experiment ID: 20000173 Result: Down-regulated in Transcription
  misc_feature: MA Experiment 20000173 PARAMETER Experiment Name: At_42deg_Heat_P Parameter: Age (day) Value: 14
  misc_feature: MA Experiment 20000173 PARAMETER Experiment Name: At_42deg_Heat_P Parameter: Organism Value: A. thaliana
  misc_feature: MA Experiment 20000173 PARAMETER Experiment Name: At_42deg_Heat_P Parameter: Plant Line Value: WS
  misc_feature: MA Experiment 20000173 PARAMETER Experiment Name: At_42deg_Heat_P Parameter: Temperature (deg C) Value: 42 vs. 22
  misc_feature: MA Experiment 20000173 PARAMETER Experiment Name: At_42deg_Heat_P Parameter: Timepoint (hr) Value: 6
  misc_feature: MA Experiment 20000173 PARAMETER Experiment Name: At_42deg_Heat_P Parameter: Tissue Value: Aerial
  misc_feature: MA Experiment ID: 20000184 Result: Down-regulated in Transcription
  misc_feature: MA Experiment 20000184 PARAMETER Experiment Name: At_Shoots__P Parameter: Age (day) Value: 7
  misc_feature: MA Experiment 20000184 PARAMETER Experiment Name: At_Shoots__P Parameter: Tissue Value: Shoots vs. Whole Plant
  misc_feature: MA Experiment ID: 20000224 Result: Up-regulated in Transcription
  misc_feature: MA Experiment ID: 20000794 Result: Down-regulated in Transcription
  misc_feature: MA Experiment 20000794 PARAMETER Experiment Name: At_Petals_P Parameter: Age (day) Value: 23-25 days
  misc_feature: MA Experiment 20000794 PARAMETER Experiment Name: At_Petals_P Parameter: Plant Line Value: WS
  misc_feature: MA Experiment 20000794 PARAMETER Experiment Name: At_Petals_P Parameter: Tissue Value: Petals vs. Whole plant
  misc_feature: MA Experiment ID: 20001451 Result: Down-regulated in Transcription
  misc_feature: MA Experiment 20001451 PARAMETER Experiment Name: At_Far-red-induction_P Parameter: Age (day) Value: 7
  misc_feature: MA Experiment 20001451 PARAMETER Experiment Name: At_Far-red-induction_P Parameter: Light Value: Far-red vs. White
  misc_feature: MA Experiment 20001451 PARAMETER Experiment Name: At_Far-red-induction_P Parameter: Organism Value: A. thaliana
  misc_feature: MA Experiment 20001451 PARAMETER Experiment Name: At_Far-red-induction_P Parameter: Plant Line Value: Columbia
  misc_feature: MA Experiment 20001451 PARAMETER Experiment Name: At_Far-red-induction_P Parameter: Timepoint (hr) Value: 24
  misc_feature: MA Experiment 20001451 PARAMETER Experiment Name: At_Far-red-induction_P Parameter: Tissue Value: Whole Plant
gtcgcacacactaaaatggcgttccgcgttttgctcctcttctcactcaccgcacttctcatcttctccgccgtttctccttctttcgccgcttcttcctccgacgacgttgacgatgaggatctcagcttcctcgaagatctcaaagaagacgacgttcccggcgctgactcactctcttcctcaactggatttgacgaattcgaaggaggagaagaagaagatcccgatatgtacaacgacgatgacgatgaagaaggagatttttccgatctaggtaatccggattccgatccgttaccgacgccggagattgatgagaaagacgttgtggttatcaaggagcgtaacttcactgatgtgattgagaataatcaatacgttttggttgagttttatgctccgtggtgtggtcattgtcagtctcttgctcctgagtatgctgctgctgccacggagcttaaggaagatggtgttgttttggctaagattgatgcgacggaggagaatgagttagctcaggagtatcgtgttcagggctttccgacgcttcttttcttcgttgatggtgagcacaagccttacactggaggaaggactaaagaaacaattgtgacatgggtgaagaagaagattggtcctggtgtgtataatctaactacattagatgatgctgagaaagtgttgacttctgggaacaaagttgttttgggatacttgaactccttggtgggtgttgagcacgatcagcttaatgctgcttccaaagctgaagacgatgtgaacttttatcaaacagtgaatcctgatgttgcaaagatgtttcaccttgatccggagtctaaaaggcctgctcttgtcctagttaagaaggaagaggagaaaattagccattttgatggagaatttgttaagtctgctctagttagttttgtgtctgccaacaagcttgctttggtctctgttttcaccagagagactgctccggaaatttttgagagtgcaatcaagaaacagttgttgttgtttgtaaccaaaaatgaatctgaaaaggttcttacggaatttcaagaagcagcgaaatcattcaaaggaaagctcatctttgtatctgtggatctggataatgaggattatgggaagccagtcgctgaatactttggtgtgtctggaaatggtcctaaacttattggctacacagggaatgaagaccctaaaaaatactttttcgatggcgagatccagtcagataaaattaagatatttggggaggatttcctgaacgacaagttaaagcctttctataagtcagaccccattcctgaaaagaacgatgaagatgtgaaaatagtggttggagataactttgatgaaattgttctggacgattctaaagatgtgcttctcgaggtctacgcaccatggtgtggccattgccaagcccttgagccaatgtataacaaacttgccaagcatttacgaagtattgattctctcgtcataaccaagatggatggaacaaccaatgaacatcccaaggcaaaggctgaggggttccctaccattctcttcttccctgcgggcaacaagacttcagagccgattactgtagatacagaccgcactgtggttgcattttacaagttcttaaggaaacacgcaacgatcccattcaaactggagaaacctgcatcaaccgaatcacctaaaactgcagagtccacaccaaaagtagaaactaccgagaccaaagaatcacccgatagcacgacaaagagtagccaaagtgactcgaaggacgaattgtgatcagaaaagggtataatatatattacatgtctccttaagttgttatatgtatgatcagaattgtcacatcatgagtttggactagataaagatgggaattaaagtaattttagttttgagaaagacaatttctt

SEQ ID NO: 98797 - protein, 602 aa, Arabidopsis thaliana
  peptide (1)..(602): Ceres Seq. ID no. 13601525
  misc_feature (6)..(536): Homolog of NCBI NO: 30697408 NR Description: protein disulfide isomerase family [Arabidopsis
  misc_feature (1)..(585): Homolog of NCBI NO: 22331799 NR Description: protein disulfide isomerase family [Arabidopsis
  misc_feature (146)..(575): Homolog of NCBI NO: 28140231 NR Description: protein disulphide isomerase [Elaeis guineensis]
  misc_feature (1)..(585): Homolog of NCBI NO: 7437396 NR Description: protein disulfide-isomerase homolog F28P10.60 -
  misc_feature (97)..(602): Homolog of NCBI NO: 20805285 NR Description: protein disulfide isomerase-like PDI-H
  misc_feature (104)..(602): Homolog of NCBI NO: 20805287 NR Description: protein disulfide isomerase-like PDI-M
  misc_feature (90)..(579): Homolog of NCBI NO: 5902592 NR Description: protein disulfide isomerase precursor [Volvox
  misc_feature (96)..(577): Homolog of NCBI NO: 7437394 NR Description: protein disulfide-isomerase (EC 5.3.4.1) RB60 - reinhardtii >gi|2708314|gb|AAC49896.1| protein disulfide RB60 [Chlamydomonas reinhardtii] >gi|4104541|gb|AAD02069.1|
  misc_feature (100)..(550): Homolog of NCBI NO: 31239469 NR Description: ENSANGP00000011666 [Anopheles gambiae]
  misc_feature (121)..(530): Homolog of NCBI NO: 15218191 NR Description: protein disulfide isomerase family [Arabidopsis
VAHTKMAFRVLLLFSLTALLIFSAVSPSFAASSSDDVDDEDLSFLEDLKEDDVPGADSLSSSTGFDEFEGGEEEDPDMYNDDDDEEGDFSDLGNPDSDPLPTPEIDEKDVVVIKERNFTDVIENNQYVLVEFYAPWCGHCQSLAPEYAAAATELKEDGVVLAKIDATEENELAQEYRVQGFPTLLFFVDGEHKPYTGGRTKETIVTWVKKKIGPGVYNLTTLDDAEKVLTSGNKVVLGYLNSLVGVEHDQLNAASKAEDDVNFYQTVNPDVAKMFHLDPESKRPALVLVKKEEEKISHFDGEFVKSALVSFVSANKLALVSVFTRETAPEIFESAIKKQLLLFVTKNESEKVLTEFQEAAKSFKGKLIFVSVDLDNEDYGKPVAEYFGVSGNGPKLIGYTGNEDPKKYFFDGEIQSDKIKIFGEDFLNDKLKPFYKSDPIPEKNDEDVKIVVGDNFDEIVLDDSKDVLLEVYAPWCGHCQALEPMYNKLAKHLRSIDSLVITKMDGTTNEHPKAKAEGFPTILFFPAGNKTSEPITVDTDRTVVAFYKFLRKHATIPFKLEKPASTESPKTAESTPKVETTETKESPDSTTKSSQSDSKDEL

SEQ ID NO: 98798 - protein, 597 aa, Arabidopsis thaliana; identical to SEQ ID NO: 40245
  peptide (1)..(597): Ceres Seq. ID no. 13601526
  misc_feature (1)..(531): Homolog of NCBI NO: 30697408 NR Description: protein disulfide isomerase family [Arabidopsis
  misc_feature (1)..(580): Homolog of NCBI NO: 22331799 NR Description: protein disulfide isomerase family [Arabidopsis
  misc_feature (141)..(570): Homolog of NCBI NO: 28140231 NR Description: protein disulphide isomerase [Elaeis guineensis]
  misc_feature (1)..(580): Homolog of NCBI NO: 7437396 NR Description: protein disulfide-isomerase homolog F28P10.60 -
  misc_feature (92)..(597): Homolog of NCBI NO: 20805285 NR Description: protein disulfide isomerase-like PDI-H
  misc_feature (99)..(597): Homolog of NCBI NO: 20805287 NR Description: protein disulfide isomerase-like PDI-M
  misc_feature (85)..(574): Homolog of NCBI NO: 5902592 NR Description: protein disulfide isomerase precursor [Volvox
  misc_feature (91)..(572): Homolog of NCBI NO: 7437394 NR Description: protein disulfide-isomerase (EC 5.3.4.1) RB60 - reinhardtii >gi|2708314|gb|AAC49896.1| protein disulfide RB60 [Chlamydomonas reinhardtii] >gi|4104541|gb|AAD02069.1|
  misc_feature (95)..(545): Homolog of NCBI NO: 31239469 NR Description: ENSANGP00000011666 [Anopheles gambiae]
  misc_feature (116)..(525): Homolog of NCBI NO: 15218191 NR Description: protein disulfide isomerase family [Arabidopsis

SEQ ID NO: 98799 - protein, 525 aa, Arabidopsis thaliana; identical to SEQ ID NO: 40246
  peptide (1)..(525): Ceres Seq. ID no. 13601527
  misc_feature (1)..(459): Homolog of NCBI NO: 30697408 NR Description: protein disulfide isomerase family [Arabidopsis
  misc_feature (1)..(508): Homolog of NCBI NO: 22331799 NR Description: protein disulfide isomerase family [Arabidopsis
  misc_feature (69)..(498): Homolog of NCBI NO: 28140231 NR Description: protein disulphide isomerase [Elaeis guineensis]
  misc_feature (1)..(508): Homolog of NCBI NO: 7437396 NR Description: protein disulfide-isomerase homolog F28P10.60 -
  misc_feature (20)..(525): Homolog of NCBI NO: 20805285 NR Description: protein disulfide isomerase-like PDI-H
  misc_feature (27)..(525): Homolog of NCBI NO: 20805287 NR Description: protein disulfide isomerase-like PDI-M
  misc_feature (13)..(502): Homolog of NCBI NO: 5902592 NR Description: protein disulfide isomerase precursor [Volvox
  misc_feature (19)..(500): Homolog of NCBI NO: 7437394 NR Description: protein disulfide-isomerase (EC 5.3.4.1) RB60 - reinhardtii >gi|2708314|gb|AAC49896.1| protein disulfide RB60 [Chlamydomonas reinhardtii] >gi|4104541|gb|AAD02069.1|
  misc_feature (23)..(473): Homolog of NCBI NO: 31239469 NR Description: ENSANGP00000011666 [Anopheles gambiae]
  misc_feature (44)..(453): Homolog of NCBI NO: 15218191 NR Description: protein disulfide isomerase family [Arabidopsis

SEQ ID NO: 98800 - DNA, 2337 bp, Arabidopsis thaliana
  misc_feature (1)..(2337): Ceres Seq. ID no. 13601528
  misc_feature: MA Experiment ID: 108434 Result: Up-regulated in Transcription
  misc_feature: MA Experiment 108434 PARAMETER Experiment Name: At_Root_Tips_cDNA_P Parameter: Tissue Value: Root Tips
  misc_feature: MA Experiment ID: 108461 Result: Down-regulated in Transcription
  misc_feature: MA Experiment 108461 PARAMETER Experiment Name: At_Germinating_Seeds_cDNA_P Parameter: Age (day) Value: 1 vs. 0
  misc_feature: MA Experiment 108461 PARAMETER Experiment Name: At_Germinating_Seeds_cDNA_P Parameter: Tissue Value: Germinating Seeds
  misc_feature: MA Experiment ID: 108462 Result: Down-regulated in Transcription
  misc_feature: MA Experiment 108462 PARAMETER Experiment Name: At_Germinating_Seeds_cDNA_P Parameter: Age (day) Value: 2 vs. 0
  misc_feature: MA Experiment 108462 PARAMETER Experiment Name: At_Germinating_Seeds_cDNA_P Parameter: Tissue Value: Germinating Seeds
  misc_feature: MA Experiment ID: 108463 Result: Down-regulated in Transcription
  misc_feature: MA Experiment 108463 PARAMETER Experiment Name: At_Germinating_Seeds_cDNA_P Parameter: Age (day) Value: 3 vs. 0
  misc_feature: MA Experiment 108463 PARAMETER Experiment Name: At_Germinating_Seeds_cDNA_P Parameter: Tissue Value: Germinating Seeds
  misc_feature: MA Experiment ID: 108464 Result: Down-regulated in Transcription
  misc_feature: MA Experiment 108464 PARAMETER Experiment Name: At_Germinating_Seeds_cDNA_P Parameter: Age (day) Value: 4 vs. 0
  misc_feature: MA Experiment 108464 PARAMETER Experiment Name: At_Germinating_Seeds_cDNA_P Parameter: Tissue Value: Germinating Seeds
  misc_feature: MA Experiment ID: 108572 Result: Up-regulated in Transcription
  misc_feature: MA Experiment 108572 PARAMETER Experiment Name: At_Drought_cDNA_P Parameter: Timepoint (hr) Value: 1
  misc_feature: MA Experiment 108572 PARAMETER Experiment Name: At_Drought_cDNA_P Parameter: Tissue Value: Aerial
  misc_feature: MA Experiment 108572 PARAMETER Experiment Name: At_Drought_cDNA_P Parameter: Treatment Value: Drought vs. No Drought
  misc_feature: MA Experiment ID: 108573 Result: Up-regulated in Transcription
  misc_feature: MA Experiment 108573 PARAMETER Experiment Name: At_Drought_cDNA_P Parameter: Timepoint (hr) Value: 6
  misc_feature: MA Experiment 108573 PARAMETER Experiment Name: At_Drought_cDNA_P Parameter: Tissue Value: Aerial
  misc_feature: MA Experiment 108573 PARAMETER Experiment Name: At_Drought_cDNA_P Parameter: Treatment Value: Drought vs. No Drought
  misc_feature: MA Experiment ID: 108574 Result: Up-regulated in Transcription
  misc_feature: MA Experiment 108574 PARAMETER Experiment Name: At_Wounding__cDNA_P Parameter: Timepoint (hr) Value: 1
  misc_feature: MA Experiment 108574 PARAMETER Experiment Name: At_Wounding__cDNA_P Parameter: Tissue Value: Aerial
  misc_feature: MA Experiment 108574 PARAMETER Experiment Name: At_Wounding__cDNA_P Parameter: Treatment Value: Wounding vs. No Wounding
  misc_feature: MA Experiment ID: 108576 Result: Down-regulated in Transcription
  misc_feature: MA Experiment 108576 PARAMETER Experiment Name: At_42deg_Heat_cDNA_P Parameter: Temperature (deg C) Value: 42 vs. 22
  misc_feature: MA Experiment 108576 PARAMETER Experiment Name: At_42deg_Heat_cDNA_P Parameter: Timepoint (hr) Value: 1
  misc_feature: MA Experiment 108576 PARAMETER Experiment Name: At_42deg_Heat_cDNA_P Parameter: Tissue Value: Aerial
  misc_feature: MA Experiment ID: 108585 Result: Up-regulated in Transcription
  misc_feature: MA Experiment 108585 PARAMETER Experiment Name: At_5mM_NaNP_cDNA_P Parameter: Timepoint (hr) Value: 6
  misc_feature: MA Experiment 108585 PARAMETER Experiment Name: At_5mM_NaNP_cDNA_P Parameter: Tissue Value: Aerial
  misc_feature: MA Experiment 108585 PARAMETER Experiment Name: At_5mM_NaNP_cDNA_P Parameter: Treatment Value: null
  misc_feature: MA Experiment ID: 108608 Result: Up-regulated in Transcription
  misc_feature: MA Experiment 108608 PARAMETER Experiment Name: At_100uM_ABA_cDNA_P Parameter: Timepoint (hr) Value: 1
  misc_feature: MA Experiment 108608 PARAMETER Experiment Name: At_100uM_ABA_cDNA_P Parameter: Tissue Value: Aerial
  misc_feature: MA Experiment 108608 PARAMETER Experiment Name: At_100uM_ABA_cDNA_P Parameter: Treatment Value: 100uM ABA vs. No Treatment
  misc_feature: MA Experiment ID: 108668 Result: Up-regulated in Transcription
  misc_feature: MA Experiment 108668 PARAMETER Experiment Name: At_2mM_SA_cDNA_P Parameter: Plant Line Value: WS
  misc_feature: MA Experiment 108668 PARAMETER Experiment Name: At_2mM_SA_cDNA_P Parameter: Timepoint (hr) Value: 6
  misc_feature: MA Experiment 108668 PARAMETER Experiment Name: At_2mM_SA_cDNA_P Parameter: Treatment Value: 2mM SA vs. No Treatment
  misc_feature: MA Experiment ID: 20000069 Result: Up-regulated in Transcription
  misc_feature: MA Experiment 20000069 PARAMETER Experiment Name: At_100uM_ABA_Mutants_cDNA_P Parameter: Plant Line Value: CS23
  misc_feature: MA Experiment 20000069 PARAMETER Experiment Name: At_100uM_ABA_Mutants_cDNA_P Parameter: Timepoint (hr) Value: 6
  misc_feature: MA Experiment 20000069 PARAMETER Experiment Name: At_100uM_ABA_Mutants_cDNA_P Parameter: Tissue Value: Aerial
  misc_feature: MA Experiment 20000069 PARAMETER Experiment Name: At_100uM_ABA_Mutants_cDNA_P Parameter: Treatment Value: 100uM ABA vs. No Treatment
  misc_feature: MA Experiment ID: 20000070 Result: Up-regulated in Transcription
  misc_feature: MA Experiment 20000070 PARAMETER Experiment Name: At_100uM_ABA_Mutants_cDNA_P Parameter: Plant Line Value: CS24
  misc_feature: MA Experiment 20000070 PARAMETER Experiment Name: At_100uM_ABA_Mutants_cDNA_P Parameter: Timepoint (hr) Value: 6
  misc_feature: MA Experiment 20000070 PARAMETER Experiment Name: At_100uM_ABA_Mutants_cDNA_P Parameter: Tissue Value: Aerial
  misc_feature: MA Experiment 20000070 PARAMETER Experiment Name: At_100uM_ABA_Mutants_cDNA_P Parameter: Treatment Value: 100uM ABA vs. No Treatment
  misc_feature: MA Experiment ID: 20000088 Result: Up-regulated in Transcription
  misc_feature: MA Experiment 20000088 PARAMETER Experiment Name: At_100uM_ABA_Mutants_cDNA_P Parameter: Plant Line Value: Landsberg
  misc_feature: MA Experiment 20000088 PARAMETER Experiment Name: At_100uM_ABA_Mutants_cDNA_P Parameter: Timepoint (hr) Value: 6
  misc_feature: MA Experiment 20000088 PARAMETER Experiment Name: At_100uM_ABA_Mutants_cDNA_P Parameter: Tissue Value: Aerial
  misc_feature: MA Experiment 20000088 PARAMETER Experiment Name: At_100uM_ABA_Mutants_cDNA_P Parameter: Treatment Value: 100uM ABA vs. No Treatment
  misc_feature: MA Experiment ID: 20000166 Result: Up-regulated in Transcription
  misc_feature: MA Experiment 20000166 PARAMETER Experiment Name: At_100uM_ABA_P Parameter: Age (day) Value: 14
  misc_feature: MA Experiment 20000166 PARAMETER Experiment Name: At_100uM_ABA_P Parameter: Organism Value: A. thaliana
  misc_feature: MA Experiment 20000166 PARAMETER Experiment Name: At_100uM_ABA_P Parameter: Plant Line Value: WS
  misc_feature: MA Experiment 20000166 PARAMETER Experiment Name: At_100uM_ABA_P Parameter: Timepoint (hr) Value: 1
  misc_feature: MA Experiment 20000166 PARAMETER Experiment Name: At_100uM_ABA_P Parameter: Tissue Value: Aerial
  misc_feature: MA Experiment 20000166 PARAMETER Experiment Name: At_100uM_ABA_P Parameter: Treatment Value: 100uM ABA vs. No Treatment
  misc_feature: MA Experiment ID: 20000182 Result: Up-regulated in Transcription
  misc_feature: MA Experiment 20000182 PARAMETER Experiment Name: At_2mM_SA_P Parameter: Age (day) Value: 14
  misc_feature: MA Experiment 20000182 PARAMETER Experiment Name: At_2mM_SA_P Parameter: Organism Value: A. thaliana
  misc_feature: MA Experiment 20000182 PARAMETER Experiment Name: At_2mM_SA_P Parameter: Plant Line Value: WS
  misc_feature: MA Experiment 20000182 PARAMETER Experiment Name: At_2mM_SA_P Parameter: Timepoint (hr) Value: 6
  misc_feature: MA Experiment 20000182 PARAMETER Experiment Name: At_2mM_SA_P Parameter: Tissue Value: Aerial
  misc_feature: MA Experiment 20000182 PARAMETER Experiment Name: At_2mM_SA_P Parameter: Treatment Value: 2mM SA vs. No Treatment
  misc_feature: MA Experiment ID: 20000436 Result: Up-regulated in Transcription
  misc_feature: MA Experiment 20000436 PARAMETER Experiment Name: At_Drought_P Parameter: Age (day) Value: 7
  misc_feature: MA Experiment 20000436 PARAMETER Experiment Name: At_Drought_P Parameter: Organism Value: A. thaliana
  misc_feature: MA Experiment 20000436 PARAMETER Experiment Name: At_Drought_P Parameter: Plant Line Value: WS
  misc_feature: MA Experiment 20000436 PARAMETER Experiment Name: At_Drought_P Parameter: Timepoint (hr) Value: 12
  misc_feature: MA Experiment 20000436 PARAMETER Experiment Name: At_Drought_P Parameter: Tissue Value: Whole Plant
  misc_feature: MA Experiment 20000436 PARAMETER Experiment Name: At_Drought_P Parameter: Treatment Value: Drought vs. No Drought
  misc_feature: MA Experiment ID: 20000437 Result: Up-regulated in Transcription
  misc_feature: MA Experiment 20000437 PARAMETER Experiment Name: At_Drought_P Parameter: Age (day) Value: 8
  misc_feature: MA Experiment 20000437 PARAMETER Experiment Name: At_Drought_P Parameter: Organism Value: A. thaliana
  misc_feature: MA Experiment 20000437 PARAMETER Experiment Name: At_Drought_P Parameter: Plant Line Value: WS
  misc_feature: MA Experiment 20000437 PARAMETER Experiment Name: At_Drought_P Parameter: Timepoint (hr) Value: 24
  misc_feature: MA Experiment 20000437 PARAMETER Experiment Name: At_Drought_P Parameter: Tissue Value: Whole Plant
  misc_feature: MA Experiment 20000437 PARAMETER Experiment Name: At_Drought_P Parameter: Treatment Value: Drought vs. No Drought
  misc_feature: MA Experiment ID: 20001557 Result: Up-regulated in Transcription
  misc_feature: MA Experiment 20001557 PARAMETER Experiment Name: At_Drought_Soil_Dry_P Parameter: Age (day) Value: 27
  misc_feature: MA Experiment 20001557 PARAMETER Experiment Name: At_Drought_Soil_Dry_P Parameter: Organism Value: A. thaliana
  misc_feature: MA Experiment 20001557 PARAMETER Experiment Name: At_Drought_Soil_Dry_P Parameter: Plant Line Value: WS
  misc_feature: MA Experiment 20001557 PARAMETER Experiment Name: At_Drought_Soil_Dry_P Parameter: Post Timepoint (hr) Value: 3
  misc_feature: MA Experiment 20001557 PARAMETER Experiment Name: At_Drought_Soil_Dry_P Parameter: Post-Treatment Value: Re-Water vs. No Drought
  misc_feature: MA Experiment 20001557 PARAMETER Experiment Name: At_Drought_Soil_Dry_P Parameter: Timepoint (day) Value: 13
  misc_feature: MA Experiment 20001557 PARAMETER Experiment Name: At_Drought_Soil_Dry_P Parameter: Treatment Value: Drought vs. No Drought
  misc_feature: MA Experiment ID: 20001560 Result: Up-regulated in Transcription
  misc_feature: MA Experiment 20001560 PARAMETER Experiment Name: At_Drought_Soil_Dry_P Parameter: Age (day) Value: 28
  misc_feature: MA Experiment 20001560 PARAMETER Experiment Name: At_Drought_Soil_Dry_P Parameter: Organism Value: A. thaliana
  misc_feature: MA Experiment 20001560 PARAMETER Experiment Name: At_Drought_Soil_Dry_P Parameter: Plant Line Value: WS
  misc_feature: MA Experiment 20001560 PARAMETER Experiment Name: At_Drought_Soil_Dry_P Parameter: Post Timepoint (hr) Value: None
  misc_feature: MA Experiment 20001560 PARAMETER Experiment Name: At_Drought_Soil_Dry_P Parameter: Post-Treatment Value: None
  misc_feature: MA Experiment 20001560 PARAMETER Experiment Name: At_Drought_Soil_Dry_P Parameter: Timepoint (day) Value: 14
  misc_feature: MA Experiment 20001560 PARAMETER Experiment Name: At_Drought_Soil_Dry_P Parameter: Treatment Value: Drought vs. No Drought
  misc_feature: MA Experiment ID: 20001905 Result: Up-regulated in Transcription
  misc_feature: MA Experiment 20001905 PARAMETER Experiment Name: At_Drought_Reproduction_P Parameter: Age (day) Value: 40
  misc_feature: MA Experiment 20001905 PARAMETER Experiment Name: At_Drought_Reproduction_P Parameter: Organism Value: A. thaliana
  misc_feature: MA Experiment 20001905 PARAMETER Experiment Name: At_Drought_Reproduction_P Parameter: Plant Line Value: WS
  misc_feature: MA Experiment 20001905 PARAMETER Experiment Name: At_Drought_Reproduction_P Parameter: Timepoint (day) Value: 10
  misc_feature: MA Experiment 20001905 PARAMETER Experiment Name: At_Drought_Reproduction_P Parameter: Tissue Value: Rosettes
  misc_feature: MA Experiment 20001905 PARAMETER Experiment Name: At_Drought_Reproduction_P Parameter: Treatment Value: Drought vs. No Drought
  misc_feature: MA Experiment ID: 20001911 Result: Up-regulated in Transcription
  misc_feature: MA Experiment 20001911 PARAMETER Experiment Name: At_Drought_Reproduction_P Parameter: Age (day) Value: 40
  misc_feature: MA Experiment 20001911 PARAMETER Experiment Name: At_Drought_Reproduction_P Parameter: Organism Value: A. thaliana
  misc_feature: MA Experiment 20001911 PARAMETER Experiment Name: At_Drought_Reproduction_P Parameter: Plant Line Value: WS
  misc_feature: MA Experiment 20001911 PARAMETER Experiment Name: At_Drought_Reproduction_P Parameter: Timepoint (day) Value: 10
  misc_feature: MA Experiment 20001911 PARAMETER Experiment Name: At_Drought_Reproduction_P Parameter: Tissue Value: Flowers
  misc_feature: MA Experiment 20001911 PARAMETER Experiment Name: At_Drought_Reproduction_P Parameter: Treatment Value: Drought vs. No Drought
agaaaccaccattaaccctaatttttgccgaactcgtcttctgctgaaaaccctagatctacagatctcccgaatctcccagggagataatttgaagatggtgtctgacgctagcaagaagaaggcagctcagaagaaagctgctgccgccgctaaaagaggtggtaaagctgctgctccatccaaatccgccgctacttcttccaacggtgttgatagcttgtcaagcggtgtcgatgctcttcaaatttctgatcggacttgtaccggagttctctgttctcatcctcaatctagagatatccgaatagaatctctgtctgtgacgtttcatggttatgaccttattgttgattcaatgttggagcttaactatggaaggcgttatggtctccttgggttgaatggttgtggaaagtccactcttttaactgcaatcggacgcagagagataccgattccggatcaaatggatatctaccatttgtctcacgagattgaagctactgacatgtcttccctggaggctgttgttagctgtgatgaggagaggttgaggttagagaaagaagttgaaattcttgtacagcaggatgatggaggcggagagcgtcttcaatctatctatgagaggttagacgccatggatgcagaaaccgctgagaaacgtgctgctgaaattctgtttggacttggtttcgacaaggaaatgcaggcgaagaagacaaaagatttctctggtggttggaggatgagaattgcattggcaagagcactcttcattatgccgacaatccttttgcttgatgagccgactaatcatttagatttggaagcttgtgtgtggctagaagagagcctgaagaattttgatcgcatccttgttgtggtatcccactcacaggatttcttgaatggagtgtgtacaaacatcatccacatgcagagcaaacagctcaagtactacactggtaactttgatcagtattgccagactcgttctgaacttgaagagaaccagatgaaacaatacagatgggagcaggagcagatttctcacatgaaggagtacattgctcggtttggtcacggttcagccaaacttgctcgtcaagcacagagtaaggagaaaacattggcaaagatggagagaggtgggctcactgaaaaggttgctagagacagtgttctcgttttccgttttgctgatgttgggaagcttccaccgccagtgcttcagtttgttgaagtgtcttttggttacacaccggactatcttatttacaagaacattgactttggtgtcgacttggactcgagggttgcccttgtgggacctaatggagctggaaagagtacacttttgaagctcatgactggtgaattgcacccaactgaaggaatggtgcgacgtcacaaccacttgaagattgctcagtaccatcagcatctggctgagaagctagacttggaattgcctgcacttctctacatgatgagggagttcccgggtactgaagaggagaaaatgagagctgcgattggtaggtttggtctaactggtaaggctcaagtgatgccaatgaagaatctatctgacggacaaaggagcagagtgatctttgcgtggttagcttataagcagcctaacatgcttcttcttgatgagcctactaaccatttggatatcgagacaatcgactcgcttgctgaggcattgaatgagtgggatggtggtttggttctggttagtcacgacttcaggttgatcaaccaagtggctcatgagatatgggtttgcgagaaacaatgcatcactaaatggaatggtgacattatggacttcaagaggcaccttaaggctaaagccggacttgaagattgaagatagagagtcgagtcttcttctcttgatggaaaatggaaaagactcagattggggtcacatgctaagagagagagagggaaggctttggtttttttgatgggtttgggaatggtttttaacgagttctaaagccacacacttgagagacagagaaaccatactcactaatctctgcatttccttaagaggtcagagattctttctatattagtattatcattatcatgtgcaccttctttttttttcgttattgttgttgaacgtttttttgaaggcgaaacagagagaaaagtaatattttttggtggtattgtaggattttttttttctgtttttttaaagactgagatgttgacgattatggtattatatttaatattaaagtgggaatattctcataattatattcgaatattctcataattatattcgaatattcgttggaaagg

SEQ ID NO: 98801 - protein, 627 aa, Arabidopsis thaliana; identical to SEQ ID NO: 29543
  peptide (1)..(627): Ceres Seq. ID no. 13601529
  misc_feature (126)..(317): Pfam Name: ABC transporter Pfam Description: ABC transporter
  misc_feature (33)..(627): Homolog of NCBI NO: 28071305 NR Description: putative ABC transporter [Oryza sativa (japonica
  misc_feature (33)..(578): Homolog of NCBI NO: 7573600 NR Description: ABC transporter homolog [Populus nigra]
  misc_feature (33)..(624): Homolog of NCBI NO: 28436765 NR Description: Similar to ATP-binding cassette, sub-family F
  misc_feature (33)..(622): Homolog of NCBI NO: 28502799 NR Description: Similar to ATP-binding cassette, sub-family F
  misc_feature (33)..(622): Homolog of NCBI NO: 10179834 NR Description: iron inhibited ABC transporter 2 [Homo sapiens]
  misc_feature (33)..(622): Homolog of NCBI NO: 10947137 NR Description: ATP-binding cassette, sub-family F, member 2 b; ABC- type transport protein; Iron inhibited ABC transporter 2
  misc_feature (33)..(622): Homolog of NCBI NO: 27881506 NR Description: ATP-binding cassette, sub-family F, member 2 a; ABC- type transport protein; Iron inhibited ABC transporter 2
  misc_feature (34)..(627): Homolog of NCBI NO: 18859989 NR Description: CG9281-PB [Drosophila melanogaster]
  misc_feature (37)..(622): Homolog of NCBI NO: 27707592 NR Description: similar to ATP-binding cassette, sub-family F,
  misc_feature (32)..(619): Homolog of NCBI NO: 6320874 NR Description: Hypothetical ORF; Yer036cp [Saccharomyces

SEQ ID NO: 98802 - protein, 595 aa, Arabidopsis thaliana; identical to SEQ ID NO: 29544
  peptide (1)..(595): Ceres Seq. ID no. 13601530
  misc_feature (94)..(285): Pfam Name: ABC transporter Pfam Description: ABC transporter
  misc_feature (1)..(595): Homolog of NCBI NO: 28071305 NR Description: putative ABC transporter [Oryza sativa (japonica
  misc_feature (1)..(546): Homolog of NCBI NO: 7573600 NR Description: ABC transporter homolog [Populus nigra]
  misc_feature (1)..(592): Homolog of NCBI NO: 28436765 NR Description: Similar to ATP-binding cassette, sub-family F
  misc_feature (1)..(590): Homolog of NCBI NO: 28502799 NR Description: Similar to ATP-binding cassette, sub-family F
  misc_feature (1)..(590): Homolog of NCBI NO: 10179834 NR Description: iron inhibited ABC transporter 2 [Homo sapiens]
  misc_feature (1)..(590): Homolog of NCBI NO: 10947137 NR Description: ATP-binding cassette, sub-family F, member 2 b; ABC- type transport protein; Iron inhibited ABC transporter 2
  misc_feature (1)..(590): Homolog of NCBI NO: 27881506 NR Description: ATP-binding cassette, sub-family F, member 2 a; ABC- type transport protein; Iron inhibited ABC transporter 2
  misc_feature (2)..(595): Homolog of NCBI NO: 18859989 NR Description: CG9281-PB [Drosophila melanogaster]
  misc_feature (5)..(590): Homolog of NCBI NO: 27707592 NR Description: similar to ATP-binding cassette, sub-family F,
  misc_feature (1)..(587): Homolog of NCBI NO: 6320874 NR Description: Hypothetical ORF; Yer036cp [Saccharomyces

SEQ ID NO: 98803 - protein, 508 aa, Arabidopsis thaliana; identical to SEQ ID NO: 29545
  peptide (1)..(508): Ceres Seq. ID no. 13601531
  misc_feature (7)..(198): Pfam Name: ABC transporter Pfam Description: ABC transporter
  misc_feature (1)..(508): Homolog of NCBI NO: 28071305 NR Description: putative ABC transporter [Oryza sativa (japonica
  misc_feature (1)..(459): Homolog of NCBI NO: 7573600 NR Description: ABC transporter homolog [Populus nigra]
  misc_feature (1)..(505): Homolog of NCBI NO: 28436765 NR Description: Similar to ATP-binding cassette, sub-family F
  misc_feature (1)..(503): Homolog of NCBI NO: 28502799 NR Description: Similar to ATP-binding cassette, sub-family F
  misc_feature (1)..(503): Homolog of NCBI NO: 10179834 NR Description: iron inhibited ABC transporter 2 [Homo sapiens]
  misc_feature (1)..(503): Homolog of NCBI NO: 10947137 NR Description: ATP-binding cassette, sub-family F, member 2 b; ABC- type transport protein; Iron inhibited ABC transporter 2
  misc_feature (1)..(503): Homolog of NCBI NO: 27881506 NR Description: ATP-binding cassette, sub-family F, member 2 a; ABC- type transport protein; Iron inhibited ABC transporter 2
  misc_feature (1)..(508): Homolog of NCBI NO: 18859989 NR Description: CG9281-PB [Drosophila melanogaster]
  misc_feature (1)..(503): Homolog of NCBI NO: 27707592 NR Description: similar to ATP-binding cassette, sub-family F,
  misc_feature (1)..(500): Homolog of NCBI NO: 6320874 NR Description: Hypothetical ORF; Yer036cp [Saccharomyces

SEQ ID NO: 98804 - DNA, 1175 bp, Arabidopsis thaliana
  misc_feature (1)..(1175): Ceres Seq. ID no. 13601532
  misc_feature: MA Experiment ID: 20000184 Result: Down-regulated in Transcription
  misc_feature: MA Experiment 20000184 PARAMETER Experiment Name: At_Shoots__P Parameter: Age (day) Value: 7
  misc_feature: MA Experiment 20000184 PARAMETER Experiment Name: At_Shoots__P Parameter: Tissue Value: Shoots vs. Whole Plant
  misc_feature: MA Experiment ID: 20000235 Result: Up-regulated in Transcription
  misc_feature: MA Experiment 20000235 PARAMETER Experiment Name: At_Siliques_P Parameter: Age (day) Value: 21
  misc_feature: MA Experiment 20000235 PARAMETER Experiment Name: At_Siliques_P Parameter: Organism Value: A. thaliana
  misc_feature: MA Experiment 20000235 PARAMETER Experiment Name: At_Siliques_P Parameter: Plant Line Value: WS
  misc_feature: MA Experiment 20000235 PARAMETER Experiment Name: At_Siliques_P Parameter: Tissue Value: 5-10mm Siliques vs. Whole Plant
  misc_feature: MA Experiment ID: 20000437 Result: Up-regulated in Transcription
  misc_feature: MA Experiment 20000437 PARAMETER Experiment Name: At_Drought_P Parameter: Age (day) Value: 8
  misc_feature: MA Experiment 20000437 PARAMETER Experiment Name: At_Drought_P Parameter: Organism Value: A. thaliana
  misc_feature: MA Experiment 20000437 PARAMETER Experiment Name: At_Drought_P Parameter: Plant Line Value: WS
  misc_feature: MA Experiment 20000437 PARAMETER Experiment Name: At_Drought_P Parameter: Timepoint (hr) Value: 24
  misc_feature: MA Experiment 20000437 PARAMETER Experiment Name: At_Drought_P Parameter: Tissue Value: Whole Plant
  misc_feature: MA Experiment 20000437 PARAMETER Experiment Name: At_Drought_P Parameter: Treatment Value: Drought vs. No Drought
  misc_feature: MA Experiment ID: 20000438 Result: Down-regulated in Transcription
  misc_feature: MA Experiment 20000438 PARAMETER Experiment Name: At_Shoots__P Parameter: Age (day) Value: 14
  misc_feature: MA Experiment 20000438 PARAMETER Experiment Name: At_Shoots__P Parameter: Tissue Value: Shoots vs. Whole Plant
  misc_feature: MA Experiment ID: 20000453 Result: Up-regulated in Transcription
  misc_feature: MA Experiment 20000453 PARAMETER Experiment Name: At_100uM_ABA_P Parameter: Age (day) Value: 15
  misc_feature: MA Experiment 20000453 PARAMETER Experiment Name: At_100uM_ABA_P Parameter: Organism Value: A. thaliana
  misc_feature: MA Experiment 20000453 PARAMETER Experiment Name: At_100uM_ABA_P Parameter: Plant Line Value: WS
  misc_feature: MA Experiment 20000453 PARAMETER Experiment Name: At_100uM_ABA_P Parameter: Timepoint (hr) Value: 24
  misc_feature: MA Experiment 20000453 PARAMETER Experiment Name: At_100uM_ABA_P Parameter: Tissue Value: Aerial
  misc_feature: MA Experiment 20000453 PARAMETER Experiment Name: At_100uM_ABA_P Parameter: Treatment Value: 100uM ABA vs. No Treatment
  misc_feature: MA Experiment ID: 20000460 Result: Down-regulated in Transcription
  misc_feature: MA Experiment 20000460 PARAMETER Experiment Name: At_10percent_PEG_P Parameter: Age (day) Value: 12
  misc_feature: MA Experiment 20000460 PARAMETER Experiment Name: At_10percent_PEG_P Parameter: Organism Value: A. thaliana
  misc_feature: MA Experiment 20000460 PARAMETER Experiment Name: At_10percent_PEG_P Parameter: Plant Line Value: WS
  misc_feature: MA Experiment 20000460 PARAMETER Experiment Name: At_10percent_PEG_P Parameter: Timepoint (day) Value: 12
  misc_feature: MA Experiment 20000460 PARAMETER Experiment Name: At_10percent_PEG_P Parameter: Tissue Value: Whole Plant
  misc_feature: MA Experiment 20000460 PARAMETER Experiment Name: At_10percent_PEG_P Parameter: Treatment Value: 10percent PEG vs. No Treatment
  misc_feature: MA Experiment ID: 20000495 Result: Up-regulated in Transcription
  misc_feature: MA Experiment 20000495 PARAMETER Experiment Name: At_Guard_Cells_P Parameter: Harvest Date Value: 8/2/2002
  misc_feature: MA Experiment 20000495 PARAMETER Experiment Name: At_Guard_Cells_P Parameter: Organism Value: A. thaliana
  misc_feature: MA Experiment 20000495 PARAMETER Experiment Name: At_Guard_Cells_P Parameter: Tissue Value: Guard Cells vs. Leaves
  misc_feature: MA Experiment ID: 20000794 Result: Down-regulated in Transcription
  misc_feature: MA Experiment 20000794 PARAMETER Experiment Name: At_Petals_P Parameter: Age (day) Value: 23-25 days
  misc_feature: MA Experiment 20000794 PARAMETER Experiment Name: At_Petals_P Parameter: Plant Line Value: WS
  misc_feature: MA Experiment 20000794 PARAMETER Experiment Name: At_Petals_P Parameter: Tissue Value: Petals vs. Whole plant
  misc_feature: MA Experiment ID: 20001504 Result: Up-regulated in Transcription
  misc_feature: MA Experiment 20001504 PARAMETER Experiment Name: At_Far-red-enriched_P Parameter: Age (day) Value: 10
  misc_feature: MA Experiment 20001504 PARAMETER Experiment Name: At_Far-red-enriched_P Parameter: Light Value: Far-red enriched vs. White
  misc_feature: MA Experiment 20001504 PARAMETER Experiment Name: At_Far-red-enriched_P Parameter: Organism Value: A. thaliana
  misc_feature: MA Experiment 20001504 PARAMETER Experiment Name: At_Far-red-enriched_P Parameter: Plant Line Value: Columbia
  misc_feature: MA Experiment 20001504 PARAMETER Experiment Name: At_Far-red-enriched_P Parameter: Timepoint (day) Value: 6
  misc_feature: MA Experiment 20001504 PARAMETER Experiment Name: At_Far-red-enriched_P Parameter: Tissue Value: Whole Plant
  misc_feature: MA Experiment ID: 20001559 Result: Up-regulated in Transcription
  misc_feature: MA Experiment 20001559 PARAMETER Experiment Name: At_Drought_Soil_Dry_P Parameter: Age (day) Value: 28
  misc_feature: MA Experiment 20001559 PARAMETER Experiment Name: At_Drought_Soil_Dry_P Parameter: Organism Value: A. thaliana
  misc_feature: MA Experiment 20001559 PARAMETER Experiment Name: At_Drought_Soil_Dry_P Parameter: Plant Line Value: WS
  misc_feature: MA Experiment 20001559 PARAMETER Experiment Name: At_Drought_Soil_Dry_P Parameter: Post Timepoint (hr) Value: 29
  misc_feature: MA Experiment 20001559 PARAMETER Experiment Name: At_Drought_Soil_Dry_P Parameter: Post-Treatment Value: Re-Water vs. No Drought
  misc_feature: MA Experiment 20001559 PARAMETER Experiment Name: At_Drought_Soil_Dry_P Parameter: Timepoint (day) Value: 14
  misc_feature: MA Experiment 20001559 PARAMETER Experiment Name: At_Drought_Soil_Dry_P Parameter: Treatment Value: Drought vs. No Drought
  misc_feature: MA Experiment ID: 20001911 Result: Up-regulated in Transcription
  misc_feature: MA Experiment 20001911 PARAMETER Experiment Name: At_Drought_Reproduction_P Parameter: Age (day) Value: 40
  misc_feature: MA Experiment 20001911 PARAMETER Experiment Name: At_Drought_Reproduction_P Parameter: Organism Value: A. thaliana
  misc_feature: MA Experiment 20001911 PARAMETER Experiment Name: At_Drought_Reproduction_P Parameter: Plant Line Value: WS
  misc_feature: MA Experiment 20001911 PARAMETER Experiment Name: At_Drought_Reproduction_P Parameter: Timepoint (day) Value: 10
  misc_feature: MA Experiment 20001911 PARAMETER Experiment Name: At_Drought_Reproduction_P Parameter: Tissue Value: Flowers
  misc_feature: MA Experiment 20001911 PARAMETER Experiment Name: At_Drought_Reproduction_P Parameter: Treatment Value: Drought vs. No Drought
acattcatcaacacaaaagatacccagagagacataagaaagaaagagagagagagatactttggtcatttcagggttgtcgtttctctctcttgttcttgagattttgaagagagagagatatgggaagaggtagggttcagctgaagaggatagagaacaagatcaataggcaagttactttctcaaagagaaggtctggtttgctcaagaaagctcatgagatctctgttctctgcgatgctgaggttgctctcatcgtcttctcttccaaaggcaaactcttcgaatattccaccgactcttgcatggagaggatacttgaacgctatgatcgctatttatattcagacaaacaacttgttggccgagacgtttcacaaagtgaaaattgggttctagaacatgctaagctcaaggcaagagttgaggtacttgagaagaacaaaaggaattttatgggggaagatcttgattcgttgagcttgaaggagctccaaagcttggagcatcagctcgatgcagctatcaagagcattaggtcaagaaagaaccaagctatgttcgaatccatatctgcgctccagaagaaggataaagccttgcaagatcacaacaattcgcttctcaaaaagattaaggagagggagaagaaaacgggtcagcaagaaggacaattagtccaatgctccaactcttcttcagttcttctgcctcaatactgcgtaacctcctccagagatggctttgtggagagagttgggggagagaacggtggtgcatcgtcgttgacggaaccaaactctctgcttccggcttggatgttacgtcctaccactacgaacgagtagaactatctcactctttataatataatgataatataattaatgtttaatattttcataacattcagcatttttttggtgacttatactcattattaataccgatatgttttagctagtcatattatatgtatgatggaactccgttgtcgagacgtatgtacgtaagctatcattagattcactgcgtcttaagaacaaagattcatatcttggtaatgatttctcatgaataattaatgtaacttttactttttaaactgtggtgaacgcaatatatcaatattctatcatttgtaaatgcgatcactatgttttttatgactg

SEQ ID NO: 98805 - protein, 242 aa, Arabidopsis thaliana; identical to SEQ ID NO: 35943
  peptide (1)..(242): Ceres Seq. ID no. 13601533
  misc_feature (75)..(174): Pfam Name: K-box region Pfam Description: K-box region
  misc_feature (1)..(242): Homolog of NCBI NO: 18424410 NR Description: MADS-box protein [Arabidopsis thaliana]
  misc_feature (1)..(239): Homolog of NCBI NO: 23304678 NR Description: MADS-box protein FUL-d [Brassica oleracea var.
  misc_feature (1)..(242): Homolog of NCBI NO: 23304676 NR Description: MADS-box protein FUL-c [Brassica oleracea var.
  misc_feature (3)..(242): Homolog of NCBI NO: 23304672 NR Description: MADS-box protein FUL-a [Brassica oleracea var.
  misc_feature (1)..(242): Homolog of NCBI NO: 3913000 NR Description: Agamous-like MADS box protein AGL8 homolog (MADS
  misc_feature (1)..(239): Homolog of NCBI NO: 23304674 NR Description: MADS-box protein FUL-b [Brassica oleracea var.
  misc_feature (1)..(236): Homolog of NCBI NO: 1483232 NR Description: MADS5 protein [Betula pendula]
  misc_feature (1)..(236): Homolog of NCBI NO: 5070142 NR Description: MADS-box protein MADS1 [Nicotiana sylvestris]
  misc_feature (1)..(236): Homolog of NCBI NO: 27373049 NR Description: MADS11 [Nicotiana tabacum]
  misc_feature (1)..(236): Homolog of NCBI NO: 14518447 NR Description: MADS box protein [Capsicum annuum]

SEQ ID NO: 98806 - protein, 180 aa, Arabidopsis thaliana; identical to SEQ ID NO: 35944
  peptide (1)..(180): Ceres Seq. ID no. 13601534
  misc_feature (13)..(112): Pfam Name: K-box region Pfam Description: K-box region
  misc_feature (1)..(180): Homolog of NCBI NO: 18424410 NR Description: MADS-box protein [Arabidopsis thaliana]
  misc_feature (1)..(177): Homolog of NCBI NO: 23304678 NR Description: MADS-box protein FUL-d [Brassica oleracea var.
  misc_feature (1)..(180): Homolog of NCBI NO: 23304676 NR Description: MADS-box protein FUL-c [Brassica oleracea var.
  misc_feature (1)..(180): Homolog of NCBI NO: 23304672 NR Description: MADS-box protein FUL-a [Brassica oleracea var.
  misc_feature (1)..(180): Homolog of NCBI NO: 3913000 NR Description: Agamous-like MADS box protein AGL8 homolog (MADS
  misc_feature (1)..(177): Homolog of NCBI NO: 23304674 NR Description: MADS-box protein FUL-b [Brassica oleracea var.
  misc_feature (1)..(174): Homolog of NCBI NO: 1483232 NR Description: MADS5 protein [Betula pendula]
  misc_feature (1)..(174): Homolog of NCBI NO: 5070142 NR Description: MADS-box protein MADS1 [Nicotiana sylvestris]
  misc_feature (1)..(174): Homolog of NCBI NO: 27373049 NR Description: MADS11 [Nicotiana tabacum]
  misc_feature (1)..(174): Homolog of NCBI NO: 14518447 NR Description: MADS box protein [Capsicum annuum]

SEQ ID NO: 98807 - protein, 130 aa, Arabidopsis thaliana; identical to SEQ ID NO: 35945
  peptide (1)..(130): Ceres Seq. ID no. 13601535
  misc_feature (1)..(62): Pfam Name: K-box region Pfam Description: K-box region
  misc_feature (1)..(130): Homolog of NCBI NO: 18424410 NR Description: MADS-box protein [Arabidopsis thaliana]
  misc_feature (1)..(127): Homolog of NCBI NO: 23304678 NR Description: MADS-box protein FUL-d [Brassica oleracea var.
  misc_feature (1)..(130): Homolog of NCBI NO: 23304676 NR Description: MADS-box protein FUL-c [Brassica oleracea var.
  misc_feature (1)..(130): Homolog of NCBI NO: 23304672 NR Description: MADS-box protein FUL-a [Brassica oleracea var.
  misc_feature (1)..(130): Homolog of NCBI NO: 3913000 NR Description: Agamous-like MADS box protein AGL8 homolog (MADS
  misc_feature (1)..(127): Homolog of NCBI NO: 23304674 NR Description: MADS-box protein FUL-b [Brassica oleracea var.
  misc_feature (1)..(124): Homolog of NCBI NO: 1483232 NR Description: MADS5 protein [Betula pendula]
  misc_feature (1)..(124): Homolog of NCBI NO: 5070142 NR Description: MADS-box protein MADS1 [Nicotiana sylvestris]
  misc_feature (1)..(124): Homolog of NCBI NO: 27373049 NR Description: MADS11 [Nicotiana tabacum]
  misc_feature (1)..(124): Homolog of NCBI NO: 14518447 NR Description: MADS box protein [Capsicum annuum]

SEQ ID NO: 98808 - DNA, 1765 bp, Arabidopsis thaliana
  misc_feature (1)..(1765): Ceres Seq. ID no. 13601536
  misc_feature: MA Experiment ID: 108461 Result: Up-regulated in Transcription
  misc_feature: MA Experiment 108461 PARAMETER Experiment Name: At_Germinating_Seeds_cDNA_P Parameter: Age (day) Value: 1 vs. 0
  misc_feature: MA Experiment 108461 PARAMETER Experiment Name: At_Germinating_Seeds_cDNA_P Parameter: Tissue Value: Germinating Seeds
  misc_feature: MA Experiment ID: 108462 Result: Up-regulated in Transcription
  misc_feature: MA Experiment 108462 PARAMETER Experiment Name: At_Germinating_Seeds_cDNA_P Parameter: Age (day) Value: 2 vs. 0
  misc_feature: MA Experiment 108462 PARAMETER Experiment Name: At_Germinating_Seeds_cDNA_P Parameter: Tissue Value: Germinating Seeds
  misc_feature: MA Experiment ID: 108569 Result: Up-regulated in Transcription
  misc_feature: MA Experiment 108569 PARAMETER Experiment Name: At_0.001%_MeJA__cDNA_P Parameter: Timepoint (hr) Value: 6
  misc_feature: MA Experiment 108569 PARAMETER Experiment Name: At_0.001%_MeJA__cDNA_P Parameter: Tissue Value: Aerial
  misc_feature: MA Experiment 108569 PARAMETER Experiment Name: At_0.001%_MeJA__cDNA_P Parameter: Treatment Value: 0.001% MeJA vs. No Treatment
  misc_feature: MA Experiment ID: 108573 Result: Up-regulated in Transcription
  misc_feature: MA Experiment 108573 PARAMETER Experiment Name: At_Drought_cDNA_P Parameter: Timepoint (hr) Value: 6
  misc_feature: MA Experiment 108573 PARAMETER Experiment Name: At_Drought_cDNA_P Parameter: Tissue Value: Aerial
  misc_feature: MA Experiment 108573 PARAMETER Experiment Name: At_Drought_cDNA_P Parameter: Treatment Value: Drought vs. No Drought
  misc_feature: MA Experiment ID: 108576 Result: Down-regulated in Transcription
  misc_feature: MA Experiment 108576 PARAMETER Experiment Name: At_42deg_Heat_cDNA_P Parameter: Temperature (deg C) Value: 42 vs. 22
  misc_feature: MA Experiment 108576 PARAMETER Experiment Name: At_42deg_Heat_cDNA_P Parameter: Timepoint (hr) Value: 1
  misc_feature: MA Experiment 108576 PARAMETER Experiment Name: At_42deg_Heat_cDNA_P Parameter: Tissue Value: Aerial
  misc_feature: MA Experiment ID: 108577 Result: Down-regulated in Transcription
  misc_feature: MA Experiment 108577 PARAMETER Experiment Name: At_42deg_Heat_cDNA_P Parameter: Temperature (deg C) Value: 42 vs. 22
  misc_feature: MA Experiment 108577 PARAMETER Experiment Name: At_42deg_Heat_cDNA_P Parameter: Timepoint (hr) Value: 6
  misc_feature: MA Experiment 108577 PARAMETER Experiment Name: At_42deg_Heat_cDNA_P Parameter: Tissue Value: Aerial
  misc_feature: MA Experiment ID: 108595 Result: Down-regulated in Transcription
  misc_feature: MA Experiment 108595 PARAMETER Experiment Name: At_Ler-pi_Ovule_cDNA_P Parameter: Plant Line Value: null
  misc_feature: MA Experiment ID: 20000087 Result: Down-regulated in Transcription
  misc_feature: MA Experiment 20000087 PARAMETER Experiment Name: At_100uM_ABA_Mutants_cDNA_P Parameter: Plant Line Value: WS
  misc_feature: MA Experiment 20000087 PARAMETER Experiment Name: At_100uM_ABA_Mutants_cDNA_P Parameter: Timepoint (hr) Value: 6
  misc_feature: MA Experiment 20000087 PARAMETER Experiment Name: At_100uM_ABA_Mutants_cDNA_P Parameter: Tissue Value: Aerial
  misc_feature: MA Experiment 20000087 PARAMETER Experiment Name: At_100uM_ABA_Mutants_cDNA_P Parameter: Treatment Value: 100uM ABA vs. No Treatment
  misc_feature: MA Experiment ID: 20000112 Result: Down-regulated in Transcription
  misc_feature: MA Experiment 20000112 PARAMETER Experiment Name: At_42deg_Heat_cDNA_P Parameter: Temperature (deg C) Value: 42 vs. 22
  misc_feature: MA Experiment 20000112 PARAMETER Experiment Name: At_42deg_Heat_cDNA_P Parameter: Timepoint (hr) Value: 2
  misc_feature: MA Experiment 20000112 PARAMETER Experiment Name: At_42deg_Heat_cDNA_P Parameter: Tissue Value: Aerial
  misc_feature: MA Experiment ID: 20000144 Result: Down-regulated in Transcription
  misc_feature: MA Experiment 20000144 PARAMETER Experiment Name: At_42deg_Heat_cDNA_P Parameter: Temperature (deg C) Value: 42 vs. 22
  misc_feature: MA Experiment 20000144 PARAMETER Experiment Name: At_42deg_Heat_cDNA_P Parameter: Timepoint (hr) Value: 1
  misc_feature: MA Experiment 20000144 PARAMETER Experiment Name: At_42deg_Heat_cDNA_P Parameter: Tissue Value: Aerial
  misc_feature: MA Experiment ID: 20000180 Result: Up-regulated in Transcription
  misc_feature: MA Experiment 20000180 PARAMETER Experiment Name: At_Germinating_Seeds_P Parameter: Age (hr) Value: 24 vs. 0
  misc_feature: MA Experiment 20000180 PARAMETER Experiment Name: At_Germinating_Seeds_P Parameter: Tissue Value: Germinating Seeds
  misc_feature: MA Experiment ID: 20001908 Result: Down-regulated in Transcription
  misc_feature: MA Experiment 20001908 PARAMETER Experiment Name: At_Drought_Reproduction_P Parameter: Age (day) Value: 40
  misc_feature: MA Experiment 20001908 PARAMETER Experiment Name: At_Drought_Reproduction_P Parameter: Organism Value: A. thaliana
  misc_feature: MA Experiment 20001908 PARAMETER Experiment Name: At_Drought_Reproduction_P Parameter: Plant Line Value: WS
  misc_feature: MA Experiment 20001908 PARAMETER Experiment Name: At_Drought_Reproduction_P Parameter: Timepoint (day) Value: 10
  misc_feature: MA Experiment 20001908 PARAMETER Experiment Name: At_Drought_Reproduction_P Parameter: Tissue Value: Siliques
  misc_feature: MA Experiment 20001908 PARAMETER Experiment Name: At_Drought_Reproduction_P Parameter: Treatment Value: Drought vs. No Drought
  misc_feature: MA Experiment ID: 20001911 Result: Down-regulated in Transcription
  misc_feature: MA Experiment 20001911 PARAMETER Experiment Name: At_Drought_Reproduction_P Parameter: Age (day) Value: 40
  misc_feature: MA Experiment 20001911 PARAMETER Experiment Name: At_Drought_Reproduction_P Parameter: Organism Value: A. thaliana
  misc_feature: MA Experiment 20001911 PARAMETER Experiment Name: At_Drought_Reproduction_P Parameter: Plant Line Value: WS
  misc_feature: MA Experiment 20001911 PARAMETER Experiment Name: At_Drought_Reproduction_P Parameter: Timepoint (day) Value: 10
  misc_feature: MA Experiment 20001911 PARAMETER Experiment Name: At_Drought_Reproduction_P Parameter: Tissue Value: Flowers
  misc_feature: MA Experiment 20001911 PARAMETER Experiment Name: At_Drought_Reproduction_P Parameter: Treatment Value: Drought vs. No Drought
aaaaatgtctcattgcttctctcgttctaaaaaaaatcttgctgctatctctctataagtccactcctccttcaagcaaagcaccttcctcttctttttgctcctctgagattggtttaagattaaaccagacccatctaagggatctggaacaagcttcgtctctggttccactctgatcatcagagtattaaaaatggagtctttcttctccagatccacctccatcgtctccaaattgagtttcttggccttatggatcgtcttcttgatttcttcatcttcttttacttcgacagaagcatatgatgcgcttgatccagaaggcaacattacaatgaaatgggatgttatgagctggactcctgatggctatgttgccgtggttacgatgttcaacttccagaaatacagacacattcaatctccaggatggacattaggttggaaatgggcaaagaaggaagttatatggagtatggttggagcacaaacaactgaacaaggtgattgttcaaagtacaaaggaaacataccacattgttgtaagaaggatccaacagttgtagacttgcttccagggactccttataatcagcagattgctaattgctgcaagggtggtgttatgaactcatgggttcaagaccctgccactgcggctagctccttccagattagtgttggtgctgctggaaccacaaacaaaaccgttagggtcccaagaaacttcactctcatgggacctggtccaggttacacttgtggtccagcaaagattgtcagaccaacaaaatttgtcacgactgacacacgcagaaccactcaagctatgatgacatggaacattacgtgcacatactcgcagttccttgctcaaagaactccaacttgctgtgtttctttatcttctttctacaatgaaaccattgttggatgtccaacttgtgcttgcggatgtcaaaacaacagaacagaatccggtgcctgcctcgacccggacacaccacacttagcctcggttgtgtcaccaccaacaaagaaaggaacggttttaccaccattagtgcaatgcacgagacacatgtgcccgatcagagtgcattggcatgtaaagcagaactacaaagagtattggcgtgtgaagatcacaatcacaaacttcaactatcgcttgaactacacacaatggaaccttgttgctcaacatccaaatctcgacaacatcactcaaatcttcagcttcaactacaaatctcttactccttacgctggactaaacgatacggcgatgttatggggagtgaagttctacaacgatttcttatcagaagcaggtcctcttgggaatgttcaatcagagattttgttccgtaaagaccaatcaaccttcacattcgagaaaggttgggcttttccacgaaggatttactttaatggagacaattgcgtcatgcctcctccagactcttacccttttcttcccaacggtggttcccggtcacaattctcattcgtcgccgccgtgctcctccctcttcttgtctttttcttcttctctgcctaatctcggatttacggttttgccactggtttgcttagggttacggcggagtggtataaacgtttatttatgattcttttgtgtcccacaaaaattataatcttttgatactttttaaaaatataaatagttttcaacttccttgtttttaaaagaaatttatatccttgtgttctgttggtccgtcgttgtagaatatcg

SEQ ID NO: 98809 - protein, 456 aa, Arabidopsis thaliana; identical to SEQ ID NO: 30278
  peptide (1)..(456): Ceres Seq. ID no. 13601537
  misc_feature (1)..(456): Homolog of NCBI NO: 18424412 NR Description: phytochelatin synthetase - like protein
  misc_feature (1)..(456): Homolog of NCBI NO: 21553837 NR Description: phytochelatin synthetase-like protein
  misc_feature (95)..(456): Homolog of NCBI NO: 25456127 NR Description: probable phytochelatin synthetase [imported] - thaliana >gi|3559805|emb|CAA07251.1| putative phytochelatin [Arabidopsis thaliana] >gi|10177315|dbj|BAB10641.1| phytochelatin
  misc_feature (1)..(451): Homolog of NCBI NO: 15232863 NR Description: predicted GPI-anchored protein [Arabidopsis >gi|6041808|gb|AAF02128.1|AC009755_21 unknown protein
  misc_feature (11)..(450): Homolog of NCBI NO: 13477083 NR Description: phytochelatin synthetase-like protein
  misc_feature (1)..(450): Homolog of NCBI NO: 21618129 NR Description: phytochelatin synthetase-like protein
  misc_feature (11)..(450): Homolog of NCBI NO: 18406342 NR Description: phytochelatin synthetase-related protein
  misc_feature (29)..(452): Homolog of NCBI NO: 30090026 NR Description: phytochelatin synthetase-like protein 2 [Sorghum
  misc_feature (19)..(452): Homolog of NCBI NO: 30090032 NR Description: phytochelatin synthetase [Triticum monococcum]
  misc_feature (19)..(452): Homolog of NCBI NO: 38230578 NR Description: phytochelatin synthetase [Triticum aestivum]

SEQ ID NO: 98810 - protein, 409 aa, Arabidopsis thaliana; identical to SEQ ID NO: 30279
  peptide (1)..(409): Ceres Seq. ID no. 13601538
  misc_feature (1)..(409): Homolog of NCBI NO: 18424412 NR Description: phytochelatin synthetase - like protein
  misc_feature (1)..(409): Homolog of NCBI NO: 21553837 NR Description: phytochelatin synthetase-like protein
  misc_feature (48)..(409): Homolog of NCBI NO: 25456127 NR Description: probable phytochelatin synthetase [imported] - thaliana >gi|3559805|emb|CAA07251.1| putative phytochelatin [Arabidopsis thaliana] >gi|10177315|dbj|BAB10641.1| phytochelatin
  misc_feature (1)..(404): Homolog of NCBI NO: 15232863 NR Description: predicted GPI-anchored protein [Arabidopsis >gi|6041808|gb|AAF02128.1|AC009755_21 unknown protein
  misc_feature (1)..(403): Homolog of NCBI NO: 13477083 NR Description: phytochelatin synthetase-like protein
  misc_feature (1)..(403): Homolog of NCBI NO: 21618129 NR Description: phytochelatin synthetase-like protein
  misc_feature (1)..(403): Homolog of NCBI NO: 18406342 NR Description: phytochelatin synthetase-related protein
  misc_feature (1)..(405): Homolog of NCBI NO: 30090026 NR Description: phytochelatin synthetase-like protein 2 [Sorghum
  misc_feature (1)..(405): Homolog of NCBI NO: 30090032 NR Description: phytochelatin synthetase [Triticum monococcum]
  misc_feature (1)..(405): Homolog of NCBI NO: 38230578 NR Description: phytochelatin synthetase [Triticum aestivum]

SEQ ID NO: 98811 - protein, 404 aa, Arabidopsis thaliana; identical to SEQ ID NO: 30280
  peptide (1)..(404): Ceres Seq. ID no. 13601539
  misc_feature (1)..(404): Homolog of NCBI NO: 18424412 NR Description: phytochelatin synthetase - like protein
  misc_feature (1)..(404): Homolog of NCBI NO: 21553837 NR Description: phytochelatin synthetase-like protein
  misc_feature (43)..(404): Homolog of NCBI NO: 25456127 NR Description: probable phytochelatin synthetase [imported] - thaliana >gi|3559805|emb|CAA07251.1| putative phytochelatin [Arabidopsis thaliana] >gi|10177315|dbj|BAB10641.1| phytochelatin
  misc_feature (1)..(399): Homolog of NCBI NO: 15232863 NR Description: predicted GPI-anchored protein [Arabidopsis >gi|6041808|gb|AAF02128.1|AC009755_21 unknown protein
  misc_feature (1)..(398): Homolog of NCBI NO: 13477083 NR Description: phytochelatin synthetase-like protein
  misc_feature (1)..(398): Homolog of NCBI NO: 21618129 NR Description: phytochelatin synthetase-like protein
  misc_feature (1)..(398): Homolog of NCBI NO: 18406342 NR Description: phytochelatin synthetase-related protein
  misc_feature (1)..(400): Homolog of NCBI NO: 30090026 NR Description: phytochelatin synthetase-like protein 2 [Sorghum
  misc_feature (1)..(400): Homolog of NCBI NO: 30090032 NR Description: phytochelatin synthetase [Triticum monococcum]
  misc_feature (1)..(400): Homolog of NCBI NO: 38230578 NR Description: phytochelatin synthetase [Triticum aestivum]

SEQ ID NO: 98812 - DNA, 1560 bp, Arabidopsis thaliana
  misc_feature (1)..(1560): Ceres Seq. ID no. 13601540
  misc_feature: MA Experiment ID: 108433 Result: Down-regulated in Transcription
  misc_feature: MA Experiment 108433 PARAMETER Experiment Name: At_rhl_Mutant2_cDNA_P Parameter: Age (day) Value: 7
  misc_feature: MA Experiment 108433 PARAMETER Experiment Name: At_rhl_Mutant2_cDNA_P Parameter: Organism Value: A. thaliana
  misc_feature: MA Experiment 108433 PARAMETER Experiment Name: At_rhl_Mutant2_cDNA_P Parameter: Plant Line Value: rhl Mutant vs. wt landsburg
  misc_feature: MA Experiment 108433 PARAMETER Experiment Name: At_rhl_Mutant2_cDNA_P Parameter: Tissue Value: Roots
  misc_feature: MA Experiment ID: 108434 Result: Up-regulated in Transcription
  misc_feature: MA Experiment 108434 PARAMETER Experiment Name: At_Root_Tips_cDNA_P Parameter: Tissue Value: Root Tips
  misc_feature: MA Experiment ID: 108462 Result: Down-regulated in Transcription
  misc_feature: MA Experiment 108462 PARAMETER Experiment Name: At_Germinating_Seeds_cDNA_P Parameter: Age (day) Value: 2 vs. 0
  misc_feature: MA Experiment 108462 PARAMETER Experiment Name: At_Germinating_Seeds_cDNA_P Parameter: Tissue Value: Germinating Seeds
  misc_feature: MA Experiment ID: 108463 Result: Down-regulated in Transcription
  misc_feature: MA Experiment 108463 PARAMETER Experiment Name: At_Germinating_Seeds_cDNA_P Parameter: Age (day) Value: 3 vs. 0
  misc_feature: MA Experiment 108463 PARAMETER Experiment Name: At_Germinating_Seeds_cDNA_P Parameter: Tissue Value: Germinating Seeds
  misc_feature: MA Experiment ID: 108464 Result: Down-regulated in Transcription
  misc_feature: MA Experiment 108464 PARAMETER Experiment Name: At_Germinating_Seeds_cDNA_P Parameter: Age (day) Value: 4 vs. 0
  misc_feature: MA Experiment 108464 PARAMETER Experiment Name: At_Germinating_Seeds_cDNA_P Parameter: Tissue Value: Germinating Seeds
  misc_feature: MA Experiment ID: 20000113 Result: Down-regulated in Transcription
  misc_feature: MA Experiment 20000113 PARAMETER Experiment Name: At_42deg_Heat_cDNA_P Parameter: Temperature (deg C) Value: 42 vs. 22
  misc_feature: MA Experiment 20000113 PARAMETER Experiment Name: At_42deg_Heat_cDNA_P Parameter: Timepoint (hr) Value: 8
  misc_feature: MA Experiment 20000113 PARAMETER Experiment Name: At_42deg_Heat_cDNA_P Parameter: Tissue Value: Aerial
gaggaggaagaagacgatggttgacacttgacagagtaagctcagaaatggcgactctggtttcgaattgaacttgtgaggaaggtttttagggttataaggtgataaagaaaatggggaatagtggagatttggagcaggctctgcaagatgggaatatctttagacagctcaatgctcttattgtagctcatctccgtcatcacaatctctcacaagttgcaagtgcggttgcttcagcaacaatgacaccattgaatattgaggttcctccaaaccgtcttttggagcttgttgcaaagggtcttgcagcggagaacaatgggacattgagaggtgtttcttcatcagtcttgttaccttcttcttatggatcaatcactactcctcgaacagcttctatcgactttagtgttaatcatgcgaagggctcatcaaagactatcccaaagcatgaatcaaagacgctatcagagcacaagagcgttgttaggtgtgcaagatttagtcctgatggaatgttttttgctactggtggtgcagacacatctattaagctctttgaggtgccaaaagttaaacagatgatttcaggagatactcaagctcgaccattaatacggactttttatgatcatgctgaaccgataaacgatcttgatttccaccctcggagcacaatcctaatatctagtgccaaagacaactgtataaagttcttcgacttctccaaaaccacggctaaacgagcattcaaagtttttcaggatacccataacgtgcgctctatatcttttcatccgtcaggagagtttcttcttgcaggaaccgatcatccaattccacatctgtacgatgtaaacacatatcagtgctttcttccttcaaacttccctgacagtggagtaagtggagccattaatcaggtgagatattcttccacgggatccatctacattacagcctcaaaggatggagctattcgactctttgacggggttagcgcaaagtgtgttcgctccattggcaatgcacatggaaaatcagaggtcacaagcgcagtgttcactaaagatcaaaggtttgttctctcatccggtaaggattccacagttaagttatgggaaataggctcaggtcgaatggtaaaggaatatcttggagcaaagcgggtaaaactgcggtctcaggcaatttttaacgacactgaagagtttgtaatctccatagatgaagcaagcaatgaggtcgttacatgggatgctagaaccgcagataaagtggcaaagtggccttctaaccataacggtgcaccacggtggatcgagcactcgccggttgaatcagtctttgttacttgtggaatagatagatcaattcggttctggaaggaatccgtttagatgagaatccaatcaatcaaagtagtgtattttattctcttaaaacataaaccatacatgaaaaaaaaaaaaaatccgttgttcatgttgctttgtagaagacgcaagtaatcttccaggtcactgcaaaagaacgaaatcaaagcaggtgagcttc

SEQ ID NO: 98813 - protein, 429 aa, Arabidopsis thaliana; identical to SEQ ID NO: 40879
  peptide (1)..(429): Ceres Seq. ID no. 13601541
  misc_feature (1)..(429): Homolog of NCBI NO: 15239477 NR Description: transducin / WD-40 repeat protein family thaliana] >gi|21536993|gb|AAM61334.1| cleavage stimulation factor chain [Arabidopsis thaliana]
  misc_feature (1)..(429): Homolog of NCBI NO: 10177317 NR Description: cleavage stimulation factor subunit 1-like
  misc_feature (7)..(429): Homolog of NCBI NO: 12061242 NR Description: 36I5.2 [Oryza sativa (japonica cultivar-group)]
  misc_feature (7)..(429): Homolog of NCBI NO: 21326112 NR Description: putative cleavage stimulation factor subunit 1
  misc_feature (7)..(426): Homolog of NCBI NO: 18496652 NR Description: putative cleavage stimulation factor subunit 1
  misc_feature (7)..(426): Homolog of NCBI NO: 12278523 NR Description: putative cleavage stimulation factor subunit 1
  misc_feature (18)..(425): Homolog of NCBI NO: 4557491 NR Description: cleavage stimulation factor subunit 1; cleavage
  misc_feature (18)..(425): Homolog of NCBI NO: 30585197 NR Description: Homo sapiens cleavage stimulation factor, 3'
  misc_feature (18)..(425): Homolog of NCBI NO: 13195628 NR Description: cleavage stimulation factor, 3' pre-RNA, subunit [Mus musculus] >gi|13097396|gb|AAH03440.1| RIKEN cDNA 1700057K18 musculus] >gi|26341434|dbj|BAC34379.1| unnamed protein product
  misc_feature (18)..(425): Homolog of NCBI NO: 27696890 NR Description: Similar to RIKEN cDNA 1700057K18 gene [Xenopus

SEQ ID NO: 98814 - protein, 385 aa, Arabidopsis thaliana; identical to SEQ ID NO: 40880
  peptide (1)..(385): Ceres Seq. ID no. 13601542
  misc_feature (1)..(385): Homolog of NCBI NO: 15239477 NR Description: transducin / WD-40 repeat protein family thaliana] >gi|21536993|gb|AAM61334.1| cleavage stimulation factor chain [Arabidopsis thaliana]
  misc_feature (1)..(385): Homolog of NCBI NO: 10177317 NR Description: cleavage stimulation factor subunit 1-like
  misc_feature (1)..(385): Homolog of NCBI NO: 12061242 NR Description: 36I5.2 [Oryza sativa (japonica cultivar-group)]
  misc_feature (1)..(385): Homolog of NCBI NO: 21326112 NR Description: putative cleavage stimulation factor subunit 1
  misc_feature (1)..(382): Homolog of NCBI NO: 18496652 NR Description: putative cleavage stimulation factor subunit 1
  misc_feature (1)..(382): Homolog of NCBI NO: 12278523 NR Description: putative cleavage stimulation factor subunit 1
  misc_feature (1)..(381): Homolog of NCBI NO: 4557491 NR Description: cleavage stimulation factor subunit 1; cleavage
  misc_feature (1)..(381): Homolog of NCBI NO: 30585197 NR Description: Homo sapiens cleavage stimulation factor, 3'
  misc_feature (1)..(381): Homolog of NCBI NO: 13195628 NR Description: cleavage stimulation factor, 3' pre-RNA, subunit [Mus musculus] >gi|13097396|gb|AAH03440.1| RIKEN cDNA 1700057K18 musculus] >gi|26341434|dbj|BAC34379.1| unnamed protein product
  misc_feature (1)..(381): Homolog of NCBI NO: 27696890 NR Description: Similar to RIKEN cDNA 1700057K18 gene [Xenopus

SEQ ID NO: 98815 - protein, 294 aa, Arabidopsis thaliana; identical to SEQ ID NO: 40881
  peptide (1)..(294): Ceres Seq. ID no. 13601543
  misc_feature (1)..(294): Homolog of NCBI NO: 15239477 NR Description: transducin / WD-40 repeat protein family thaliana] >gi|21536993|gb|AAM61334.1| cleavage stimulation factor chain [Arabidopsis thaliana]
  misc_feature (1)..(294): Homolog of NCBI NO: 10177317 NR Description: cleavage stimulation factor subunit 1-like
  misc_feature (1)..(294): Homolog of NCBI NO: 12061242 NR Description: 36I5.2 [Oryza sativa (japonica cultivar-group)]
  misc_feature (1)..(294): Homolog of NCBI NO: 21326112 NR Description: putative cleavage stimulation factor subunit 1
  misc_feature (1)..(291): Homolog of NCBI NO: 18496652 NR Description: putative cleavage stimulation factor subunit 1
  misc_feature (1)..(291): Homolog of NCBI NO: 12278523 NR Description: putative cleavage stimulation factor subunit 1
  misc_feature (1)..(290): Homolog of NCBI NO: 4557491 NR Description: cleavage stimulation factor subunit 1; cleavage
  misc_feature (1)..(290): Homolog of NCBI NO: 30585197 NR Description: Homo sapiens cleavage stimulation factor, 3'
  misc_feature (1)..(290): Homolog of NCBI NO: 13195628 NR Description: cleavage stimulation factor, 3' pre-RNA, subunit [Mus musculus] >gi|13097396|gb|AAH03440.1| RIKEN cDNA 1700057K18 musculus] >gi|26341434|dbj|BAC34379.1| unnamed protein product
  misc_feature (1)..(290): Homolog of NCBI NO: 27696890 NR Description: Similar to RIKEN cDNA 1700057K18 gene [Xenopus

SEQ ID NO: 98816 - DNA, 1721 bp, Arabidopsis thaliana
  misc_feature (1)..(1721): Ceres Seq. ID no. 13601544
  misc_feature: MA Experiment ID: 108434 Result: Up-regulated in Transcription
  misc_feature: MA Experiment 108434 PARAMETER Experiment Name: At_Root_Tips_cDNA_P Parameter: Tissue Value: Root Tips
  misc_feature: MA Experiment ID: 108462 Result: Down-regulated in Transcription
  misc_feature: MA Experiment 108462 PARAMETER Experiment Name: At_Germinating_Seeds_cDNA_P Parameter: Age (day) Value: 2 vs. 0
  misc_feature: MA Experiment 108462 PARAMETER Experiment Name: At_Germinating_Seeds_cDNA_P Parameter: Tissue Value: Germinating Seeds
  misc_feature: MA Experiment ID: 108463 Result: Down-regulated in Transcription
  misc_feature: MA Experiment 108463 PARAMETER Experiment Name: At_Germinating_Seeds_cDNA_P Parameter: Age (day) Value: 3 vs. 0
  misc_feature: MA Experiment 108463 PARAMETER Experiment Name: At_Germinating_Seeds_cDNA_P Parameter: Tissue Value: Germinating Seeds
  misc_feature: MA Experiment ID: 108464 Result: Down-regulated in Transcription
  misc_feature: MA Experiment 108464 PARAMETER Experiment Name: At_Germinating_Seeds_cDNA_P Parameter: Age (day) Value: 4 vs. 0
  misc_feature: MA Experiment 108464 PARAMETER Experiment Name: At_Germinating_Seeds_cDNA_P Parameter: Tissue Value: Germinating Seeds
  misc_feature: MA Experiment ID: 108572 Result: Down-regulated in Transcription
  misc_feature: MA Experiment 108572 PARAMETER Experiment Name: At_Drought_cDNA_P Parameter: Timepoint (hr) Value: 1
  misc_feature: MA Experiment 108572 PARAMETER Experiment Name: At_Drought_cDNA_P Parameter: Tissue Value: Aerial
  misc_feature: MA Experiment 108572 PARAMETER Experiment Name: At_Drought_cDNA_P Parameter: Treatment Value: Drought vs. No Drought
  misc_feature: MA Experiment ID: 108573 Result: Down-regulated in Transcription
  misc_feature: MA Experiment 108573 PARAMETER Experiment Name: At_Drought_cDNA_P Parameter: Timepoint (hr) Value: 6
  misc_feature: MA Experiment 108573 PARAMETER Experiment Name: At_Drought_cDNA_P Parameter: Tissue Value: Aerial
  misc_feature: MA Experiment 108573 PARAMETER Experiment Name: At_Drought_cDNA_P Parameter: Treatment Value: Drought vs. No Drought
  misc_feature: MA Experiment ID: 108595 Result: Down-regulated in Transcription
  misc_feature: MA Experiment 108595 PARAMETER Experiment Name: At_Ler-pi_Ovule_cDNA_P Parameter: Plant Line Value: null
  misc_feature: MA Experiment ID: 20000180 Result: Down-regulated in Transcription
  misc_feature: MA Experiment 20000180 PARAMETER Experiment Name: At_Germinating_Seeds_P Parameter: Age (hr) Value: 24 vs. 0
  misc_feature: MA Experiment 20000180 PARAMETER Experiment Name: At_Germinating_Seeds_P Parameter: Tissue Value: Germinating Seeds
  misc_feature: MA Experiment ID: 20000224 Result: Up-regulated in Transcription
  misc_feature: MA Experiment ID: 20000227 Result: Up-regulated in Transcription
  misc_feature: MA Experiment 20000227 PARAMETER Experiment Name: At_Root-Tips-vs-Tops_P Parameter: Tissue Value: Root Tips vs. Root Tops
  misc_feature: MA Experiment ID: 20000234 Result: Up-regulated in Transcription
  misc_feature: MA Experiment 20000234 PARAMETER Experiment Name: At_Siliques_P Parameter: Age (day) Value: 21
  misc_feature: MA Experiment 20000234 PARAMETER Experiment Name: At_Siliques_P Parameter: Organism Value: A. thaliana
  misc_feature: MA Experiment 20000234 PARAMETER Experiment Name: At_Siliques_P Parameter: Plant Line Value: WS
  misc_feature: MA Experiment 20000234 PARAMETER Experiment Name: At_Siliques_P Parameter: Tissue Value: Less Than 5mm Siliques vs. Whole Plant
  misc_feature: MA Experiment ID: 20000264 Result: Up-regulated in Transcription
  misc_feature: MA Experiment 20000264 PARAMETER Experiment Name: At_Open_Flower_P Parameter: Age (day) Value: 21
  misc_feature: MA Experiment 20000264 PARAMETER Experiment Name: At_Open_Flower_P Parameter: Plant Line Value: WS
  misc_feature: MA Experiment 20000264 PARAMETER Experiment Name: At_Open_Flower_P Parameter: Tissue Value: Open Flower vs. Whole Plant
  misc_feature: MA Experiment ID: 20000265 Result: Up-regulated in Transcription
  misc_feature: MA Experiment 20000265 PARAMETER Experiment Name: At_Open_Flower_P Parameter: Age (day) Value: 21
  misc_feature: MA Experiment 20000265 PARAMETER Experiment Name: At_Open_Flower_P Parameter: Plant Line Value: WS
  misc_feature: MA Experiment 20000265 PARAMETER Experiment Name: At_Open_Flower_P Parameter: Tissue Value: Closed Flower vs. Whole Plant
  misc_feature: MA Experiment ID: 20000286 Result: Up-regulated in Transcription
  misc_feature: MA Experiment 20000286 PARAMETER Experiment Name: At_Open_Flower_P Parameter: Age (day) Value: 21
  misc_feature: MA Experiment 20000286 PARAMETER Experiment Name: At_Open_Flower_P Parameter: Plant Line Value: WS
  misc_feature: MA Experiment 20000286 PARAMETER Experiment Name: At_Open_Flower_P Parameter: Tissue Value: Half Open vs. Whole Plant
  misc_feature: MA Experiment ID: 20001557 Result: Up-regulated in Transcription
  misc_feature: MA Experiment 20001557 PARAMETER Experiment Name: At_Drought_Soil_Dry_P Parameter: Age (day) Value: 27
  misc_feature: MA Experiment 20001557 PARAMETER Experiment Name: At_Drought_Soil_Dry_P Parameter: Organism Value: A. thaliana
  misc_feature: MA Experiment 20001557 PARAMETER Experiment Name: At_Drought_Soil_Dry_P Parameter: Plant Line Value: WS
  misc_feature: MA Experiment 20001557 PARAMETER Experiment Name: At_Drought_Soil_Dry_P Parameter: Post Timepoint (hr) Value: 3
  misc_feature: MA Experiment 20001557 PARAMETER Experiment Name: At_Drought_Soil_Dry_P Parameter: Post-Treatment Value: Re-Water vs. No Drought
  misc_feature: MA Experiment 20001557 PARAMETER Experiment Name: At_Drought_Soil_Dry_P Parameter: Timepoint (day) Value: 13
  misc_feature: MA Experiment 20001557 PARAMETER Experiment Name: At_Drought_Soil_Dry_P Parameter: Treatment Value: Drought vs. No Drought
  misc_feature: MA Experiment ID: 20001558 Result: Up-regulated in Transcription
  misc_feature: MA Experiment 20001558 PARAMETER Experiment Name: At_Drought_Soil_Dry_P Parameter: Age (day) Value: 27
  misc_feature: MA Experiment 20001558 PARAMETER Experiment Name: At_Drought_Soil_Dry_P Parameter: Organism Value: A. thaliana
  misc_feature: MA Experiment 20001558 PARAMETER Experiment Name: At_Drought_Soil_Dry_P Parameter: Plant Line Value: WS
  misc_feature: MA Experiment 20001558 PARAMETER Experiment Name: At_Drought_Soil_Dry_P Parameter: Post Timepoint (hr) Value: 6
  misc_feature: MA Experiment 20001558 PARAMETER Experiment Name: At_Drought_Soil_Dry_P Parameter: Post-Treatment Value: Re-Water vs. No Drought
  misc_feature: MA Experiment 20001558 PARAMETER Experiment Name: At_Drought_Soil_Dry_P Parameter: Timepoint (day) Value: 13
  misc_feature: MA Experiment 20001558 PARAMETER Experiment Name: At_Drought_Soil_Dry_P Parameter: Treatment Value: Drought vs. No Drought
  misc_feature: MA Experiment ID: 20001560 Result: Up-regulated in Transcription
  misc_feature: MA Experiment 20001560 PARAMETER Experiment Name: At_Drought_Soil_Dry_P Parameter: Age (day) Value: 28
  misc_feature: MA Experiment 20001560 PARAMETER Experiment Name: At_Drought_Soil_Dry_P Parameter: Organism Value: A. thaliana
  misc_feature: MA Experiment 20001560 PARAMETER Experiment Name: At_Drought_Soil_Dry_P Parameter: Plant Line Value: WS
  misc_feature: MA Experiment 20001560 PARAMETER Experiment Name: At_Drought_Soil_Dry_P Parameter: Post Timepoint (hr) Value: None
  misc_feature: MA Experiment 20001560 PARAMETER Experiment Name: At_Drought_Soil_Dry_P Parameter: Post-Treatment Value: None
  misc_feature: MA Experiment 20001560 PARAMETER Experiment Name: At_Drought_Soil_Dry_P Parameter: Timepoint (day) Value: 14
  misc_feature: MA Experiment 20001560 PARAMETER Experiment Name: At_Drought_Soil_Dry_P Parameter: Treatment Value: Drought vs. No Drought
aattttctctcactaaatcagaaatgccgccgtcgttaccgtctctgcaactccgacggcttctcctccgtagcttcatttcctcctcctccgtcaatactcttcaatctcagccccgtatcatttcttccaagccgttgttttctcctcttcccccttcccgttcctctatattctcaacatttccttctagattcttctcatctgaaacgaatgcggaatcggaatctttggattcgaatgagatcgctctctctttctcgaaggagctcaccgggaatccagacgccgagtctcaaaccatttcgcagagattcaatctcagcttctcccacatcacgcctaatcccgatttgattctccaaactcttaatctctcaccggaagctggtcgcgcggctctaggttttaacgagtggttagattcgaactctaacttctctcacaccgatgaaacagtttcgtttttcgtcgattactttggccgtcggaaagatttcaaaggaatgctagagatcatctcgaaatacaaaggtatcgccggaggtaaaacactagaatcggcgattgataggcttgttagagctggtagacctaagcaggtcactgatttcttcgagaaaatggagaatgattatggtttgaaacgtgataaagaatcacttaccttggttgtgaagaagctttgtgagaaaggacacgcgagtatcgcagagaagatggtgaagaacactgctaatgaaatatttcctgatgagaatatatgtgatttgttgattagtggatggtgtattgctgagaaactcgatgaagcaactaggttagctggtgaaatgtctagaggaggatttgagataggaaccaaagcgtataacatgatgcttgattgtgtttgtaagctttgtaggaagaaagatccttttaagcttcaacctgaagtagagaaggttttgctggagatggagtttcgtggtgtacctagaaacacagagactttcaatgtgttgattaacaatctttgtaaaatcaggagaactgaagaagcaatgacattgtttggtaggatgggtgaatggggttgtcaaccagatgctgagacttatcttgttctgattaggagtttgtatcaagcagcgaggatcggtgaaggggacgaaatgatcgataagatgaaatcagcgggatatggtgagcttttgaataagaaagagtattacgggtttctcaagatattgtgtgggattgagaggcttgagcatgcgatgagtgtgtttaagagcatgaaagctaatggatgcaaacctgggatcaagacttatgatttgttgatggggaaaatgtgtgcgaataaccagctgactagagctaatggtttgtataaagaagcggctaagaaaggaatcgctgttagccctaaggaatacagagtagatccacggtttatgaaaaagaagaccaaggaagtggatagcaatgttaagaagagggagactttgcctgagaaaaccgcgaggaagaagaaacggctcaagcagatcaatatgagttttgttaagaaaccgcacaataagatgagacggagaatgtgatgctgatgaatcttcaacatctgatagaattttctaaagattattgtctttgttctttcctttttaagatattgtcaagagtactcatcattttgcttgatcatgagcaaattgtcccaataatcttttgtt

SEQ ID NO: 98817 - protein, 528 aa, Arabidopsis thaliana
  peptide (1)..(528): Ceres Seq. ID no. 13601545
  misc_feature (330)..(364): Pfam Name: PPR repeat Pfam Description: PPR repeat
  misc_feature (8)..(528): Homolog of NCBI NO: 15239488 NR Description: pentatricopeptide (PPR) repeat-containing protein thaliana] >gi|10177319|dbj|BAB10645.1|
  misc_feature (8)..(528): Homolog of NCBI NO: 21554346 NR Description: unknown [Arabidopsis thaliana]
  misc_feature (105)..(526): Homolog of NCBI NO: 34394565 NR Description: unknown protein [Oryza sativa (japonica
  misc_feature (77)..(525): Homolog of NCBI NO: 15240232 NR Description: pentatricopeptide (PPR) repeat-containing protein thaliana] >gi|9757858|dbj|BAB08492.1| gene_id:MFB13.15~unknown [Arabidopsis thaliana] >gi|17529064|gb|AAL38742.1| unknown
  misc_feature (77)..(525): Homolog of NCBI NO: 21593376 NR Description: unknown [Arabidopsis thaliana]
  misc_feature (50)..(465): Homolog of NCBI NO: 18396782 NR Description: pentatricopeptide (PPR) repeat-containing protein
  misc_feature (50)..(465): Homolog of NCBI NO: 6721172 NR Description: hypothetical protein [Arabidopsis thaliana]
  misc_feature (129)..(492): Homolog of NCBI NO: 37534458 NR Description: putative endopeptidase [Oryza sativa (japonica group)] >gi|31432148|gb|AAP53818.1| putative endopeptidase [Oryza
  misc_feature (34)..(451): Homolog of NCBI NO: 21686921 NR Description: putative reverse transcriptase [Oryza sativa
  misc_feature (42)..(467): Homolog of NCBI NO: 15223927 NR Description: pentatricopeptide (PPR) repeat-containing protein
FSLTKSEMPPSLPSLQLRRLLLRSFISSSSVNTLQSQPRIISSKPLFSPLPPSRSSIFSTFPSRFFSSETNAESESLDSNEIALSFSKELTGNPDAESQTISQRFNLSFSHITPNPDLILQTLNLSPEAGRAALGFNEWLDSNSNFSHTDETVSFFVDYFGRRKDFKGMLEIISKYKGIAGGKTLESAIDRLVRAGRPKQVTDFFEKMENDYGLKRDKESLTLVVKKLCEKGHASIAEKMVKNTANEIFPDENICDLLISGWCIAEKLDEATRLAGEMSRGGFEIGTKAYNMMLDCVCKLCRKKDPFKLQPEVEKVLLEMEFRGVPRNTETFNVLINNLCKIRRTEEAMTLFGRMGEWGCQPDAETYLVLIRSLYQAARIGEGDEMIDKMKSAGYGELLNKKEYYGFLKILCGIERLEHAMSVFKSMKANGCKPGIKTYDLLMGKMCANNQLTRANGLYKEAAKKGIAVSPKEYRVDPRFMKKKTKEVDSNVKKRETLPEKTARKKKRLKQINMSFVKKPHNKMRRRM

SEQ ID NO: 98818 - protein, 521 aa, Arabidopsis thaliana
  peptide (1)..(521): Ceres Seq. ID no. 13601546
  misc_feature (323)..(357): Pfam Name: PPR repeat Pfam Description: PPR repeat
  misc_feature (1)..(521): Homolog of NCBI NO: 15239488 NR Description: pentatricopeptide (PPR) repeat-containing protein thaliana] >gi|10177319|dbj|BAB10645.1|
  misc_feature (1)..(521): Homolog of NCBI NO: 21554346 NR Description: unknown [Arabidopsis thaliana]
  misc_feature (98)..(519): Homolog of NCBI NO: 34394565 NR Description: unknown protein [Oryza sativa (japonica
  misc_feature (70)..(518): Homolog of NCBI NO: 15240232 NR Description: pentatricopeptide (PPR) repeat-containing protein thaliana] >gi|9757858|dbj|BAB08492.1| gene_id:MFB13.15~unknown [Arabidopsis thaliana] >gi|17529064|gb|AAL38742.1| unknown
  misc_feature (70)..(518): Homolog of NCBI NO: 21593376 NR Description: unknown [Arabidopsis thaliana]
  misc_feature (43)..(458): Homolog of NCBI NO: 18396782 NR Description: pentatricopeptide (PPR) repeat-containing protein
  misc_feature (43)..(458): Homolog of NCBI NO: 6721172 NR Description: hypothetical protein [Arabidopsis thaliana]
  misc_feature (122)..(485): Homolog of NCBI NO: 37534458 NR Description: putative endopeptidase [Oryza sativa (japonica group)] >gi|31432148|gb|AAP53818.1| putative endopeptidase [Oryza
  misc_feature (27)..(444): Homolog of NCBI NO: 21686921 NR Description: putative reverse transcriptase [Oryza sativa
  misc_feature (35)..(460): Homolog of NCBI NO: 15223927 NR Description: pentatricopeptide (PPR) repeat-containing protein
MPPSLPSLQLRRLLLRSFISSSSVNTLQSQPRIISSKPLFSPLPPSRSSIFSTFPSRFFSSETNAESESLDSNEIALSFSKELTGNPDAESQTISQRFNLSFSHITPNPDLILQTLNLSPEAGRAALGFNEWLDSNSNFSHTDETVSFFVDYFGRRKDFKGMLEIISKYKGIAGGKTLESAIDRLVRAGRPKQVTDFFEKMENDYGLKRDKESLTLVVKKLCEKGHASIAEKMVKNTANEIFPDENICDLLISGWCIAEKLDEATRLAGEMSRGGFEIGTKAYNMMLDCVCKLCRKKDPFKLQPEVEKVLLEMEFRGVPRNTETFNVLINNLCKIRRTEEAMTLFGRMGEWGCQPDAETYLVLIRSLYQAARIGEGDEMIDKMKSAGYGELLNKKEYYGFLKILCGIERLEHAMSVFKSMKANGCKPGIKTYDLLMGKMCANNQLTRANGLYKEAAKKGIAVSPKEYRVDPRFMKKKTKEVDSNVKKRETLPEKTARKKKRLKQINMSFVKKPHNKMRRRM

SEQ ID NO: 98819 - protein, 360 aa, Arabidopsis thaliana
  peptide (1)..(360): Ceres Seq. ID no. 13601547
  misc_feature (162)..(196): Pfam Name: PPR repeat Pfam Description: PPR repeat
  misc_feature (1)..(360): Homolog of NCBI NO: 15239488 NR Description: pentatricopeptide (PPR) repeat-containing protein thaliana] >gi|10177319|dbj|BAB10645.1|
  misc_feature (1)..(360): Homolog of NCBI NO: 21554346 NR Description: unknown [Arabidopsis thaliana]
  misc_feature (1)..(358): Homolog of NCBI NO: 34394565 NR Description: unknown protein [Oryza sativa (japonica
  misc_feature (1)..(357): Homolog of NCBI NO: 15240232 NR Description: pentatricopeptide (PPR) repeat-containing protein thaliana] >gi|9757858|dbj|BAB08492.1| gene_id:MFB13.15~unknown [Arabidopsis thaliana] >gi|17529064|gb|AAL38742.1| unknown
  misc_feature (1)..(357): Homolog of NCBI NO: 21593376 NR Description: unknown [Arabidopsis thaliana]
  misc_feature (1)..(297): Homolog of NCBI NO: 18396782 NR Description: pentatricopeptide (PPR) repeat-containing protein
  misc_feature (1)..(297): Homolog of NCBI NO: 6721172 NR Description: hypothetical protein [Arabidopsis thaliana]
  misc_feature (1)..(324): Homolog of NCBI NO: 37534458 NR Description: putative endopeptidase [Oryza sativa (japonica group)] >gi|31432148|gb|AAP53818.1| putative endopeptidase [Oryza
  misc_feature (1)..(283): Homolog of NCBI NO: 21686921 NR Description: putative reverse transcriptase [Oryza sativa
  misc_feature (1)..(299): Homolog of NCBI NO: 15223927 NR Description: pentatricopeptide (PPR) repeat-containing protein
MLEIISKYKGIAGGKTLESAIDRLVRAGRPKQVTDFFEKMENDYGLKRDKESLTLVVKKLCEKGHASIAEKMVKNTANEIFPDENICDLLISGWCIAEKLDEATRLAGEMSRGGFEIGTKAYNMMLDCVCKLCRKKDPFKLQPEVEKVLLEMEFRGVPRNTETFNVLINNLCKIRRTEEAMTLFGRMGEWGCQPDAETYLVLIRSLYQAARIGEGDEMIDKMKSAGYGELLNKKEYYGFLKILCGIERLEHAMSVFKSMKANGCKPGIKTYDLLMGKMCANNQLTRANGLYKEAAKKGIAVSPKEYRVDPRFMKKKTKEVDSNVKKRETLPEKTARKKKRLKQINMSFVKKPHNKMRRRM

SEQ ID NO: 98820 - DNA, 1402 bp, Arabidopsis thaliana
  misc_feature (1)..(1402): Ceres Seq. ID no. 13601552
  misc_feature: MA Experiment ID: 108573 Result: Up-regulated in Transcription
  misc_feature: MA Experiment 108573 PARAMETER Experiment Name: At_Drought_cDNA_P Parameter: Timepoint (hr) Value: 6
  misc_feature: MA Experiment 108573 PARAMETER Experiment Name: At_Drought_cDNA_P Parameter: Tissue Value: Aerial
  misc_feature: MA Experiment 108573 PARAMETER Experiment Name: At_Drought_cDNA_P Parameter: Treatment Value: Drought vs. No Drought
  misc_feature: MA Experiment ID: 108595 Result: Down-regulated in Transcription
  misc_feature: MA Experiment 108595 PARAMETER Experiment Name: At_Ler-pi_Ovule_cDNA_P Parameter: Plant Line Value: null
  misc_feature: MA Experiment ID: 20000171 Result: Down-regulated in Transcription
  misc_feature: MA Experiment 20000171 PARAMETER Experiment Name: At_42deg_Heat_P Parameter: Age (day) Value: 14
  misc_feature: MA Experiment 20000171 PARAMETER Experiment Name: At_42deg_Heat_P Parameter: Organism Value: A. thaliana
  misc_feature: MA Experiment 20000171 PARAMETER Experiment Name: At_42deg_Heat_P Parameter: Plant Line Value: WS
  misc_feature: MA Experiment 20000171 PARAMETER Experiment Name: At_42deg_Heat_P Parameter: Temperature (deg C) Value: 42 vs. 22
  misc_feature: MA Experiment 20000171 PARAMETER Experiment Name: At_42deg_Heat_P Parameter: Timepoint (hr) Value: 1
  misc_feature: MA Experiment 20000171 PARAMETER Experiment Name: At_42deg_Heat_P Parameter: Tissue Value: Aerial
  misc_feature: MA Experiment ID: 20000184 Result: Down-regulated in Transcription
  misc_feature: MA Experiment 20000184 PARAMETER Experiment Name: At_Shoots__P Parameter: Age (day) Value: 7
  misc_feature: MA Experiment 20000184 PARAMETER Experiment Name: At_Shoots__P Parameter: Tissue Value: Shoots vs. Whole Plant
  misc_feature: MA Experiment ID: 20001248 Result: Up-regulated in Transcription
  misc_feature: MA Experiment 20001248 PARAMETER Experiment Name: At_Far-red-induction_P Parameter: Age (day) Value: 7
  misc_feature: MA Experiment 20001248 PARAMETER Experiment Name: At_Far-red-induction_P Parameter: Light Value: Far-red vs. White
  misc_feature: MA Experiment 20001248 PARAMETER Experiment Name: At_Far-red-induction_P Parameter: Organism Value: A. thaliana
  misc_feature: MA Experiment 20001248 PARAMETER Experiment Name: At_Far-red-induction_P Parameter: Plant Line Value: Columbia
  misc_feature: MA Experiment 20001248 PARAMETER Experiment Name: At_Far-red-induction_P Parameter: Timepoint (hr) Value: 4
  misc_feature: MA Experiment 20001248 PARAMETER Experiment Name: At_Far-red-induction_P Parameter: Tissue Value: Whole Plant
  misc_feature: MA Experiment ID: 20001450 Result: Up-regulated in Transcription
  misc_feature: MA Experiment 20001450 PARAMETER Experiment Name: At_Far-red-induction_P Parameter: Age (day) Value: 7
  misc_feature: MA Experiment 20001450 PARAMETER Experiment Name: At_Far-red-induction_P Parameter: Light Value: Far-red vs. White
  misc_feature: MA Experiment 20001450 PARAMETER Experiment Name: At_Far-red-induction_P Parameter: Organism Value: A. thaliana
  misc_feature: MA Experiment 20001450 PARAMETER Experiment Name: At_Far-red-induction_P Parameter: Plant Line Value: Columbia
  misc_feature: MA Experiment 20001450 PARAMETER Experiment Name: At_Far-red-induction_P Parameter: Timepoint (hr) Value: 8
  misc_feature: MA Experiment 20001450 PARAMETER Experiment Name: At_Far-red-induction_P Parameter: Tissue Value: Whole Plant
acaaagatatttttctttattctctcgcagttcaattagggtttcaatctctctgctctgcttgtcatcaccaccaccaccaccaccgtcgtcgtctctctgtatctctccggcgggttctctctctacttcccccggaggattaaaagatggaccagtcttttattttgatattccgttagcttgttcagttattgtagaagctgtaccgtcaagacttttaatatctcaaatggatgatggtgggcatcgtgagaatggtcggcataaagcagcagttcagggccagtggttgatgcagcatcagccgtcgatgaaacaagtgatgtcgataatagcagagcgcgatgcagcgattcaggagagaaatctggcgatatcagagaaaaaagcagcagtagctgaaagggacatggcgtttcttcagagggacaccgccattgctgagcgcaacaatgcgataatggagagagacagtgctcttacagcactccaataccgtgagaactctatggttactgctcctgctgccaatatgtcagcatgtccaccaggatgtcaaatatcacgtggtgtaaaacacttgcaccatccgcacatgcatcatcatcatcaacaacatcacatacctcagttgactgaaaatgcatatgaaaccagagagatggagccaaatgatggtctcccaacatcaccacctgccggatccaccttggaatctgccaaaccaaaacgtggtaaaagagtgaacccaaaggcgacaacacaaactgctgctaataagagagggccaaaaaatcagaggaaggttaagaaagagagcgaggacgacttaaacaagataatgtttgtaaagacgacccatgactacacagacgaagattcaagtaagcatatcttaataggatcaaaatctgactggaaaagtcaagaaatggtggggctgaaccaagtggtttacgacgagacaacgatgccaccacctgtatgttcatgtacaggagttctcagacagtgctacaaatggggaaatggaggttggcaatcatcgtgttgcacaactacactatcaatgtatcctttacctgcactgcccaacaaaaggcatgctcgagttggtggacggaaaatgagcggaagcgcgttcaacaagcttctaagccggcttgctgcagaagggcatcatgatctttcaaacccggtcgatctgaaggaccattgggcaaagcacggtacaaaccgctacattacgattaaatgatatgtgcatttaggtgtgagttgttcttacgacattatctgattttaaatcatgtgtactaaattcaaataaactcgagaggaaaagaattgtatgtggagccaatgttatgttgtattatataattcgaaaatttttagt

SEQ ID NO: 98821 - protein, 419 aa, Arabidopsis thaliana
  peptide (1)..(419): Ceres Seq. ID no. 13601553
  misc_feature (78)..(419): Homolog of NCBI NO: 18422219 NR Description: expressed protein [Arabidopsis thaliana]
  misc_feature (142)..(419): Homolog of NCBI NO: 9759488 NR Description: gb|AAF18661.1~gene_id:MDH9.22~similar to unknown
  misc_feature (77)..(171): Homolog of NCBI NO: 15234867 NR Description: hypothetical protein [Arabidopsis thaliana]
  misc_feature (303)..(390): Homolog of NCBI NO: 15234867 NR Description: hypothetical protein [Arabidopsis thaliana]
  misc_feature (249)..(419): Homolog of NCBI NO: 18399638 NR Description: expressed protein [Arabidopsis thaliana]
  misc_feature (78)..(183): Homolog of NCBI NO: 9759488 NR Description: gb|AAF18661.1~gene_id:MDH9.22~similar to unknown
  misc_feature (356)..(419): Homolog of NCBI NO: 6006362 NR Description: Similar to Arabidopsis thaliana chromosome II BAC
  misc_feature (114)..(165): Homolog of NCBI NO: 6006362 NR Description: Similar to Arabidopsis thaliana chromosome II BAC
  misc_feature (194)..(419): Homolog of NCBI NO: 26190436 NR Description: barley B recombinant [Hordeum vulgare]
QRYFSLFSRSSIRVSISLLCLSSPPPPPPSSSLCISPAGSLSTSPGGLKDGPVFYFDIPLACSVIVEAVPSRLLISQMDDGGHRENGRHKAAVQGQWLMQHQPSMKQVMSIIAERDAAIQERNLAISEKKAAVAERDMAFLQRDTAIAERNNAIMERDSALTALQYRENSMVTAPAANMSACPPGCQISRGVKHLHHPHMHHHHQQHHIPQLTENAYETREMEPNDGLPTSPPAGSTLESAKPKRGKRVNPKATTQTAANKRGPKNQRKVKKESEDDLNKIMFVKTTHDYTDEDSSKHILIGSKSDWKSQEMVGLNQVVYDETTMPPPVCSCTGVLRQCYKWGNGGWQSSCCTTTLSMYPLPALPNKRHARVGGRKMSGSAFNKLLSRLAAEGHHDLSNPVDLKDHWAKHGTNRYITIK

SEQ ID NO: 98822 - protein, 342 aa, Arabidopsis thaliana; identical to SEQ ID NO: 27920
  peptide (1)..(342): Ceres Seq. ID no. 13601554
  misc_feature (1)..(342): Homolog of NCBI NO: 18422219 NR Description: expressed protein [Arabidopsis thaliana]
  misc_feature (65)..(342): Homolog of NCBI NO: 9759488 NR Description: gb|AAF18661.1~gene_id:MDH9.22~similar to unknown
  misc_feature (1)..(94): Homolog of NCBI NO: 15234867 NR Description: hypothetical protein [Arabidopsis thaliana]
  misc_feature (226)..(313): Homolog of NCBI NO: 15234867 NR Description: hypothetical protein [Arabidopsis thaliana]
  misc_feature (172)..(342): Homolog of NCBI NO: 18399638 NR Description: expressed protein [Arabidopsis thaliana]
  misc_feature (1)..(106): Homolog of NCBI NO: 9759488 NR Description: gb|AAF18661.1~gene_id:MDH9.22~similar to unknown
  misc_feature (279)..(342): Homolog of NCBI NO: 6006362 NR Description: Similar to Arabidopsis thaliana chromosome II BAC
  misc_feature (37)..(88): Homolog of NCBI NO: 6006362 NR Description: Similar to Arabidopsis thaliana chromosome II BAC
  misc_feature (117)..(342): Homolog of NCBI NO: 26190436 NR Description: barley B recombinant [Hordeum vulgare]

SEQ ID NO: 98823 - protein, 321 aa, Arabidopsis thaliana; identical to SEQ ID NO: 27921
  peptide (1)..(321): Ceres Seq. ID no. 13601555
  misc_feature (1)..(321): Homolog of NCBI NO: 18422219 NR Description: expressed protein [Arabidopsis thaliana]
  misc_feature (44)..(321): Homolog of NCBI NO: 9759488 NR Description: gb|AAF18661.1~gene_id:MDH9.22~similar to unknown
  misc_feature (1)..(73): Homolog of NCBI NO: 15234867 NR Description: hypothetical protein [Arabidopsis thaliana]
  misc_feature (205)..(292): Homolog of NCBI NO: 15234867 NR Description: hypothetical protein [Arabidopsis thaliana]
  misc_feature (151)..(321): Homolog of NCBI NO: 18399638 NR Description: expressed protein [Arabidopsis thaliana]
  misc_feature (1)..(85): Homolog of NCBI NO: 9759488 NR Description: gb|AAF18661.1~gene_id:MDH9.22~similar to unknown
  misc_feature (258)..(321): Homolog of NCBI NO: 6006362 NR Description: Similar to Arabidopsis thaliana chromosome II BAC
  misc_feature (16)..(67): Homolog of NCBI NO: 6006362 NR Description: Similar to Arabidopsis thaliana chromosome II BAC
  misc_feature (96)..(321): Homolog of NCBI NO: 26190436 NR Description: barley B recombinant [Hordeum vulgare]

SEQ ID NO: 98824 - DNA, 1364 bp, Arabidopsis thaliana
  misc_feature (1)..(1364): Ceres Seq. ID no. 13601560
  misc_feature: MA Experiment ID: 108573 Result: Up-regulated in Transcription
  misc_feature: MA Experiment 108573 PARAMETER Experiment Name: At_Drought_cDNA_P Parameter: Timepoint (hr) Value: 6
  misc_feature: MA Experiment 108573 PARAMETER Experiment Name: At_Drought_cDNA_P Parameter: Tissue Value: Aerial
  misc_feature: MA Experiment 108573 PARAMETER Experiment Name: At_Drought_cDNA_P Parameter: Treatment Value: Drought vs. No Drought
  misc_feature: MA Experiment ID: 20000235 Result: Down-regulated in Transcription
  misc_feature: MA Experiment 20000235 PARAMETER Experiment Name: At_Siliques_P Parameter: Age (day) Value: 21
  misc_feature: MA Experiment 20000235 PARAMETER Experiment Name: At_Siliques_P Parameter: Organism Value: A. thaliana
  misc_feature: MA Experiment 20000235 PARAMETER Experiment Name: At_Siliques_P Parameter: Plant Line Value: WS
  misc_feature: MA Experiment 20000235 PARAMETER Experiment Name: At_Siliques_P Parameter: Tissue Value: 5-10mm Siliques vs. Whole Plant
  misc_feature: MA Experiment ID: 20000495 Result: Up-regulated in Transcription
  misc_feature: MA Experiment 20000495 PARAMETER Experiment Name: At_Guard_Cells_P Parameter: Harvest Date Value: 8/2/2002
  misc_feature: MA Experiment 20000495 PARAMETER Experiment Name: At_Guard_Cells_P Parameter: Organism Value: A. thaliana
  misc_feature: MA Experiment 20000495 PARAMETER Experiment Name: At_Guard_Cells_P Parameter: Tissue Value: Guard Cells vs. Leaves
  misc_feature: MA Experiment ID: 20000496 Result: Up-regulated in Transcription
  misc_feature: MA Experiment 20000496 PARAMETER Experiment Name: At_Guard_Cells_P Parameter: Harvest Date Value: 7/19/2002
  misc_feature: MA Experiment 20000496 PARAMETER Experiment Name: At_Guard_Cells_P Parameter: Organism Value: Canola
  misc_feature: MA Experiment 20000496 PARAMETER Experiment Name: At_Guard_Cells_P Parameter: Tissue Value: Guard Cells vs. Leaves
  misc_feature: MA Experiment ID: 20001451 Result: Up-regulated in Transcription
  misc_feature: MA Experiment 20001451 PARAMETER Experiment Name: At_Far-red-induction_P Parameter: Age (day) Value: 7
  misc_feature: MA Experiment 20001451 PARAMETER Experiment Name: At_Far-red-induction_P Parameter: Light Value: Far-red vs. White
  misc_feature: MA Experiment 20001451 PARAMETER Experiment Name: At_Far-red-induction_P Parameter: Organism Value: A. thaliana
  misc_feature: MA Experiment 20001451 PARAMETER Experiment Name: At_Far-red-induction_P Parameter: Plant Line Value: Columbia
  misc_feature: MA Experiment 20001451 PARAMETER Experiment Name: At_Far-red-induction_P Parameter: Timepoint (hr) Value: 24
  misc_feature: MA Experiment 20001451 PARAMETER Experiment Name: At_Far-red-induction_P Parameter: Tissue Value: Whole Plant
ataattttctaagaggcgtgactttaaaaatctgtaaaaaagcaaatccgaagaaagagagagagagaaggtgattttgaaatttcagataacgcagaatttttttattctcgccggagttttctcctcccaccgtctctgattctcgtcgccgccgtacacagttgttgttctctgccgtttctgcaagatgattggatcgtttcttacaagaggattggtgatggtgttgggctatgcttaccctgcgtatgaatgttacaagactgttgaaaagaataggcctgaaatcgagcaacttcgcttttggtgtcagtactggatattggttgcttgcttgacagtttttgagagagttggtgatgcgtttgtttcatgggttccgatgtacagtgaagctaagttggcattcttcatatacctgtggtatcctaaaaccaggggtactacatatgtctacgagtccttctttaggccatatctctcacagcatgagaatgacatagaccatagtttgctcgagctaaggactagagcaggagatatggctgttatatactggcaacgagttgcaagttatggtcagaccagaatccttgagattttgcagtatgttgctgcacaatcaactccaagaccgcagccacctcagaaacgtggaggtagagctaatcaagctcctgcgaagcctaagaaagcccctgtcccccaatcagaacctgaagaagtatcattgtcctcgtcttctagctcatcttcaagtgaaaatgaaggtaatgagccaacccgtaaagtatcaggcccgtcaagacctagaccaacagtgacatctgtaccagctgcagatcccaaaaacgcgggtaccactcagatagcacagaaatcagtagcttccccaattgtgaacccaccacagtcaaccacccaagtggaaccaatgcagatagaagaagtggaaggagaggcagaatcagggaatgaaaatcccaacccggaaggtccaaaggagacagtgatggaggagacaatcaggatgactcgtgggaggttgaggaagacgcgttcggaagaaagccgttgaaagaagaagaagaagctcaatccaaaaaattgttacttacttgcataacagtggtctctcttctctcttactctatgtttcctgcttctagaattacgttgacaggaactaacaactagtgggaatggttgtatgaaaagttaatctgttggttttgttcttttattcaatttagttgcatctttgacaaaaaaaaaaaaaaaatcaatttagttgcattaagtgtaaaagataacactcttgttttgtttgttcctttcgataactaattcggtaaaatagg

SEQ ID NO: 98825 - protein, 296 aa, Arabidopsis thaliana
  peptide (1)..(296): Ceres Seq. ID no. 13601561
  misc_feature (3)..(98): Pfam Name: TB2/DP1, HVA22 family Pfam Description: TB2/DP1, HVA22 family
  misc_feature (12)..(296): Homolog of NCBI NO: 9759014 NR Description: gene_id:K16E1.3~unknown protein [Arabidopsis
  misc_feature (1)..(296): Homolog of NCBI NO: 18422223 NR Description: expressed protein [Arabidopsis thaliana]
  misc_feature (1)..(296): Homolog of NCBI NO: 21553813 NR Description: unknown [Arabidopsis thaliana]
  misc_feature (1)..(296): Homolog of NCBI NO: 18394805 NR Description: expressed protein [Arabidopsis thaliana] At1g19950/T20H2_25 [Arabidopsis thaliana]
  misc_feature (1)..(296): Homolog of NCBI NO: 21553483 NR Description: pathogenicity protein PATH531-like protein
  misc_feature (12)..(296): Homolog of NCBI NO: 25513732 NR Description: T20H2.26 protein - Arabidopsis thaliana Contains similarity to Magnaporthe grisea pathogenicity protein
  misc_feature (1)..(151): Homolog of NCBI NO: 20502988 NR Description: Putative InsB from Escherichia coli [Oryza sativa
  misc_feature (12)..(156): Homolog of NCBI NO: 15222332 NR Description: hypothetical protein [Arabidopsis thaliana]
  misc_feature (1)..(146): Homolog of NCBI NO: 21671921 NR Description: Putative protein with HVA22 domain [Oryza sativa
  misc_feature (1)..(175): Homolog of NCBI NO: 37531658 NR Description: putative Magnaporthe grisea pathogenicity protein
MIGSFLTRGLVMVLGYAYPAYECYKTVEKNRPEIEQLRFWCQYWILVACLTVFERVGDAFVSWVPMYSEAKLAFFIYLWYPKTRGTTYVYESFFRPYLSQHENDIDHSLLELRTRAGDMAVIYWQRVASYGQTRILEILQYVAAQSTPRPQPPQKRGGRANQAPAKPKKAPVPQSEPEEVSLSSSSSSSSSENEGNEPTRKVSGPSRPRPTVTSVPAADPKNAGTTQIAQKSVASPIVNPPQSTTQVEPMQIEEVEGEAESGNENPNPEGPKETVMEETIRMTRGRLRKTRSEESR

SEQ ID NO: 98826 - protein, 285 aa, Arabidopsis thaliana
  peptide (1)..(285): Ceres Seq. ID no. 13601562
  misc_feature (1)..(87): Pfam Name: TB2/DP1, HVA22 family Pfam Description: TB2/DP1, HVA22 family
  misc_feature (1)..(285): Homolog of NCBI NO: 9759014 NR Description: gene_id:K16E1.3~unknown protein [Arabidopsis
  misc_feature (1)..(285): Homolog of NCBI NO: 18422223 NR Description: expressed protein [Arabidopsis thaliana]
  misc_feature (1)..(285): Homolog of NCBI NO: 21553813 NR Description: unknown [Arabidopsis thaliana]
  misc_feature (1)..(285): Homolog of NCBI NO: 18394805 NR Description: expressed protein [Arabidopsis thaliana] At1g19950/T20H2_25 [Arabidopsis thaliana]
  misc_feature (1)..(285): Homolog of NCBI NO: 21553483 NR Description: pathogenicity protein PATH531-like protein
  misc_feature (1)..(285): Homolog of NCBI NO: 25513732 NR Description: T20H2.26 protein - Arabidopsis thaliana Contains similarity to Magnaporthe grisea pathogenicity protein
  misc_feature (1)..(140): Homolog of NCBI NO: 20502988 NR Description: Putative InsB from Escherichia coli [Oryza sativa
  misc_feature (1)..(145): Homolog of NCBI NO: 15222332 NR Description: hypothetical protein [Arabidopsis thaliana]
  misc_feature (1)..(135): Homolog of NCBI NO: 21671921 NR Description: Putative protein with HVA22 domain [Oryza sativa
  misc_feature (1)..(164): Homolog of NCBI NO: 37531658 NR Description: putative Magnaporthe grisea pathogenicity protein
MVLGYAYPAYECYKTVEKNRPEIEQLRFWCQYWILVACLTVFERVGDAFVSWVPMYSEAKLAFFIYLWYPKTRGTTYVYESFFRPYLSQHENDIDHSLLELRTRAGDMAVIYWQRVASYGQTRILEILQYVAAQSTPRPQPPQKRGGRANQAPAKPKKAPVPQSEPEEVSLSSSSSSSSSENEGNEPTRKVSGPSRPRPTVTSVPAADPKNAGTTQIAQKSVASPIVNPPQSTTQVEPMQIEEVEGEAESGNENPNPEGPKETVMEETIRMTRGRLRKTRSEESR

SEQ ID NO: 98827 - protein, 231 aa, Arabidopsis thaliana
  peptide (1)..(231): Ceres Seq. ID no. 13601563
  misc_feature (1)..(231): Homolog of NCBI NO: 9759014 NR Description: gene_id:K16E1.3~unknown protein [Arabidopsis
  misc_feature (1)..(231): Homolog of NCBI NO: 18422223 NR Description: expressed protein [Arabidopsis thaliana]
  misc_feature (1)..(231): Homolog of NCBI NO: 21553813 NR Description: unknown [Arabidopsis thaliana]
  misc_feature (1)..(231): Homolog of NCBI NO: 18394805 NR Description: expressed protein [Arabidopsis thaliana] At1g19950/T20H2_25 [Arabidopsis thaliana]
  misc_feature (1)..(231): Homolog of NCBI NO: 21553483 NR Description: pathogenicity protein PATH531-like protein
  misc_feature (1)..(231): Homolog of NCBI NO: 25513732 NR Description: T20H2.26 protein - Arabidopsis thaliana Contains similarity to Magnaporthe grisea pathogenicity protein
  misc_feature (1)..(86): Homolog of NCBI NO: 20502988 NR Description: Putative InsB from Escherichia coli [Oryza sativa
  misc_feature (1)..(91): Homolog of NCBI NO: 15222332 NR Description: hypothetical protein [Arabidopsis thaliana]
  misc_feature (1)..(81): Homolog of NCBI NO: 21671921 NR Description: Putative protein with HVA22 domain [Oryza sativa
  misc_feature (1)..(110): Homolog of NCBI NO: 37531658 NR Description: putative Magnaporthe grisea pathogenicity protein
MYSEAKLAFFIYLWYPKTRGTTYVYESFFRPYLSQHENDIDHSLLELRTRAGDMAVIYWQRVASYGQTRILEILQYVAAQSTPRPQPPQKRGGRANQAPAKPKKAPVPQSEPEEVSLSSSSSSSSSENEGNEPTRKVSGPSRPRPTVTSVPAADPKNAGTTQIAQKSVASPIVNPPQSTTQVEPMQIEEVEGEAESGNENPNPEGPKETVMEETIRMTRGRLRKTRSEESR

SEQ ID NO: 98828 - DNA, 890 bp, Arabidopsis thaliana
  misc_feature (1)..(890): Ceres Seq. ID no. 13601564
  misc_feature: MA Experiment ID: 108434 Result: Down-regulated in Transcription
  misc_feature: MA Experiment 108434 PARAMETER Experiment Name: At_Root_Tips_cDNA_P Parameter: Tissue Value: Root Tips
  misc_feature: MA Experiment ID: 108573 Result: Up-regulated in Transcription
  misc_feature: MA Experiment 108573 PARAMETER Experiment Name: At_Drought_cDNA_P Parameter: Timepoint (hr) Value: 6
  misc_feature: MA Experiment 108573 PARAMETER Experiment Name: At_Drought_cDNA_P Parameter: Tissue Value: Aerial
  misc_feature: MA Experiment 108573 PARAMETER Experiment Name: At_Drought_cDNA_P Parameter: Treatment Value: Drought vs. No Drought
  misc_feature: MA Experiment ID: 108579 Result: Up-regulated in Transcription
  misc_feature: MA Experiment 108579 PARAMETER Experiment Name: At_4deg_Cold_cDNA_P Parameter: Temperature (deg C) Value: 4 vs. 22
  misc_feature: MA Experiment 108579 PARAMETER Experiment Name: At_4deg_Cold_cDNA_P Parameter: Timepoint (hr) Value: 6
  misc_feature: MA Experiment 108579 PARAMETER Experiment Name: At_4deg_Cold_cDNA_P Parameter: Tissue Value: Aerial
  misc_feature: MA Experiment ID: 108585 Result: Up-regulated in Transcription
  misc_feature: MA Experiment 108585 PARAMETER Experiment Name: At_5mM_NaNP_cDNA_P Parameter: Timepoint (hr) Value: 6
  misc_feature: MA Experiment 108585 PARAMETER Experiment Name: At_5mM_NaNP_cDNA_P Parameter: Tissue Value: Aerial
  misc_feature: MA Experiment 108585 PARAMETER Experiment Name: At_5mM_NaNP_cDNA_P Parameter: Treatment Value: null
  misc_feature: MA Experiment ID: 108595 Result: Up-regulated in Transcription
  misc_feature: MA Experiment 108595 PARAMETER Experiment Name: At_Ler-pi_Ovule_cDNA_P Parameter: Plant Line Value: null
  misc_feature: MA Experiment ID: 108668 Result: Up-regulated in Transcription
  misc_feature: MA Experiment 108668 PARAMETER Experiment Name: At_2mM_SA_cDNA_P Parameter: Plant Line Value: WS
  misc_feature: MA Experiment 108668 PARAMETER Experiment Name: At_2mM_SA_cDNA_P Parameter: Timepoint (hr) Value: 6
  misc_feature: MA Experiment 108668 PARAMETER Experiment Name: At_2mM_SA_cDNA_P Parameter: Treatment Value: 2mM SA vs. No Treatment
  misc_feature: MA Experiment ID: 20000090 Result: Up-regulated in Transcription
  misc_feature: MA Experiment ID: 20000173 Result: Up-regulated in Transcription
  misc_feature: MA Experiment 20000173 PARAMETER Experiment Name: At_42deg_Heat_P Parameter: Age (day) Value: 14
  misc_feature: MA Experiment 20000173 PARAMETER Experiment Name: At_42deg_Heat_P Parameter: Organism Value: A. thaliana
  misc_feature: MA Experiment 20000173 PARAMETER Experiment Name: At_42deg_Heat_P Parameter: Plant Line Value: WS
  misc_feature: MA Experiment 20000173 PARAMETER Experiment Name: At_42deg_Heat_P Parameter: Temperature (deg C) Value: 42 vs. 22
  misc_feature: MA Experiment 20000173 PARAMETER Experiment Name: At_42deg_Heat_P Parameter: Timepoint (hr) Value: 6
  misc_feature: MA Experiment 20000173 PARAMETER Experiment Name: At_42deg_Heat_P Parameter: Tissue Value: Aerial
  misc_feature: MA Experiment ID: 20000182 Result: Up-regulated in Transcription
  misc_feature: MA Experiment 20000182 PARAMETER Experiment Name: At_2mM_SA_P Parameter: Age (day) Value: 14
  misc_feature: MA Experiment 20000182 PARAMETER Experiment Name: At_2mM_SA_P Parameter: Organism Value: A. thaliana
  misc_feature: MA Experiment 20000182 PARAMETER Experiment Name: At_2mM_SA_P Parameter: Plant Line Value: WS
  misc_feature: MA Experiment 20000182 PARAMETER Experiment Name: At_2mM_SA_P Parameter: Timepoint (hr) Value: 6
  misc_feature: MA Experiment 20000182 PARAMETER Experiment Name: At_2mM_SA_P Parameter: Tissue Value: Aerial
  misc_feature: MA Experiment 20000182 PARAMETER Experiment Name: At_2mM_SA_P Parameter: Treatment Value: 2mM SA vs. No Treatment
  misc_feature: MA Experiment ID: 20000184 Result: Down-regulated in Transcription
  misc_feature: MA Experiment 20000184 PARAMETER Experiment Name: At_Shoots__P Parameter: Age (day) Value: 7
  misc_feature: MA Experiment 20000184 PARAMETER Experiment Name: At_Shoots__P Parameter: Tissue Value: Shoots vs. Whole Plant
  misc_feature: MA Experiment ID: 20000436 Result: Up-regulated in Transcription
  misc_feature: MA Experiment 20000436 PARAMETER Experiment Name: At_Drought_P Parameter: Age (day) Value: 7
  misc_feature: MA Experiment 20000436 PARAMETER Experiment Name: At_Drought_P Parameter: Organism Value: A. thaliana
  misc_feature: MA Experiment 20000436 PARAMETER Experiment Name: At_Drought_P Parameter: Plant Line Value: WS
  misc_feature: MA Experiment 20000436 PARAMETER Experiment Name: At_Drought_P Parameter: Timepoint (hr) Value: 12
  misc_feature: MA Experiment 20000436 PARAMETER Experiment Name: At_Drought_P Parameter: Tissue Value: Whole Plant
  misc_feature: MA Experiment 20000436 PARAMETER Experiment Name: At_Drought_P Parameter: Treatment Value: Drought vs. No Drought
  misc_feature: MA Experiment ID: 20000437 Result: Up-regulated in Transcription
  misc_feature: MA Experiment 20000437 PARAMETER Experiment Name: At_Drought_P Parameter: Age (day) Value: 8
  misc_feature: MA Experiment 20000437 PARAMETER Experiment Name: At_Drought_P Parameter: Organism Value: A. thaliana
  misc_feature: MA Experiment 20000437 PARAMETER Experiment Name: At_Drought_P Parameter: Plant Line Value: WS
  misc_feature: MA Experiment 20000437 PARAMETER Experiment Name: At_Drought_P Parameter: Timepoint (hr) Value: 24
  misc_feature: MA Experiment 20000437 PARAMETER Experiment Name: At_Drought_P Parameter: Tissue Value: Whole Plant
  misc_feature: MA Experiment 20000437 PARAMETER Experiment Name: At_Drought_P Parameter: Treatment Value: Drought vs. No Drought
  misc_feature: MA Experiment ID: 20000438 Result: Down-regulated in Transcription
  misc_feature: MA Experiment 20000438 PARAMETER Experiment Name: At_Shoots__P Parameter: Age (day) Value: 14
  misc_feature: MA Experiment 20000438 PARAMETER Experiment Name: At_Shoots__P Parameter: Tissue Value: Shoots vs. Whole Plant
attgaccgacacaacaaacaacacgttctctctcatttttcttcttctccgatcaatctagggtttactctcaccggcgacgaacaatgatccacctcctttacacagtgatcttcgccgaaatggcactgatccttctcctcctcttcaaaactcctctccgaaagctaatcatcctcaccttcgatcgaatcaaacgtggccgtggtcccgtcgtcgtcaaaaccataggaaccaccgtattcgtcgttctcttgtcgagtatctacagtttggttaatatccaacgccgatctgaagatggtgctgttcttaatcccactgatcaagtccttgcgtctaagcatcttctcgaagcttctcttatggggtttgtgttgtttctctcgcttatgattgatagactacaccattacattagagagcttcgtttgttgaggaagacaatggagactgcaaagaagcagaacagaggttttgaggatgggaaaaccacaagtggggaggaagtgaaagcgctcggggaagagatcgcggcgttaaaagcgaagataaagacgttagaatcggagagtgaaagtaaaggcaaagaattgaaaggtgcacaaggtgaaacagaggctttgagaaagcaagctgatgggtttcttatggagtatgataggttgcttgaggataatcagaatttgaggaaccagttggagtctattgggcatagtcctgagggaaagaagggtatgtaagagtaaaaactaaggattctgttttgtagagaacaaagtaactataggaaatgtggttttactgatttttgcttcatgtaatatgcaatatcgtctcctcttttgaatgtattttactattatattgcaatctagtaagtttggaac

SEQ ID NO: 98829 - protein, 218 aa, Arabidopsis thaliana; identical to SEQ ID NO: 26068
  peptide (1)..(218): Ceres Seq. ID no. 13601565
  misc_feature (4)..(192): Pfam Name: B-cell receptor-associated protein 31-like Pfam Description: B-cell receptor-associated protein 31-like
  misc_feature (1)..(218): Homolog of NCBI NO: 18422225 NR Description: expressed protein [Arabidopsis thaliana]
  misc_feature (1)..(218): Homolog of NCBI NO: 21553655 NR Description: unknown [Arabidopsis thaliana]
  misc_feature (1)..(216): Homolog of NCBI NO: 9759015 NR Description: gene_id:K16E1.4~unknown protein [Arabidopsis
  misc_feature (1)..(208): Homolog of NCBI NO: 22655198 NR Description: unknown protein [Arabidopsis thaliana]
  misc_feature (1)..(209): Homolog of NCBI NO: 34897474 NR Description: unknown protein [Oryza sativa (japonica
  misc_feature (1)..(205): Homolog of NCBI NO: 15239667 NR Description: hypothetical protein [Arabidopsis thaliana] contains similarity to unknown
  misc_feature (1)..(205): Homolog of NCBI NO: 15231412 NR Description: expressed protein [Arabidopsis thaliana]
  misc_feature (1)..(155): Homolog of NCBI NO: 30682503 NR Description: expressed protein [Arabidopsis thaliana]
  misc_feature (1)..(129): Homolog of NCBI NO: 18402620 NR Description: expressed protein [Arabidopsis thaliana]

SEQ ID NO: 98830 - protein, 206 aa, Arabidopsis thaliana; identical to SEQ ID NO: 26069
  peptide (1)..(206): Ceres Seq. ID no. 13601566
  misc_feature (1)..(180): Pfam Name: B-cell receptor-associated protein 31-like Pfam Description: B-cell receptor-associated protein 31-like
  misc_feature (1)..(206): Homolog of NCBI NO: 18422225 NR Description: expressed protein [Arabidopsis thaliana]
  misc_feature (1)..(206): Homolog of NCBI NO: 21553655 NR Description: unknown [Arabidopsis thaliana]
  misc_feature (1)..(204): Homolog of NCBI NO: 9759015 NR Description: gene_id:K16E1.4~unknown protein [Arabidopsis
  misc_feature (1)..(196): Homolog of NCBI NO: 22655198 NR Description: unknown protein [Arabidopsis thaliana]
  misc_feature (1)..(197): Homolog of NCBI NO: 34897474 NR Description: unknown protein [Oryza sativa (japonica
  misc_feature (1)..(193): Homolog of NCBI NO: 15239667 NR Description: hypothetical protein [Arabidopsis thaliana] contains similarity to unknown
  misc_feature (1)..(193): Homolog of NCBI NO: 15231412 NR Description: expressed protein [Arabidopsis thaliana]
  misc_feature (1)..(143): Homolog of NCBI NO: 30682503 NR Description: expressed protein [Arabidopsis thaliana]
  misc_feature (1)..(117): Homolog of NCBI NO: 18402620 NR Description: expressed protein [Arabidopsis thaliana]

SEQ ID NO: 98831 - protein, 125 aa, Arabidopsis thaliana
  peptide (1)..(125): Ceres Seq. ID no. 13601567
  misc_feature (1)..(99): Pfam Name: B-cell receptor-associated protein 31-like Pfam Description: B-cell receptor-associated protein 31-like
  misc_feature (1)..(125): Homolog of NCBI NO: 18422225 NR Description: expressed protein [Arabidopsis thaliana]
  misc_feature (1)..(125): Homolog of NCBI NO: 21553655 NR Description: unknown [Arabidopsis thaliana]
  misc_feature (1)..(123): Homolog of NCBI NO: 9759015 NR Description: gene_id:K16E1.4~unknown protein [Arabidopsis
  misc_feature (1)..(115): Homolog of NCBI NO: 22655198 NR Description: unknown protein [Arabidopsis thaliana]
  misc_feature (1)..(116): Homolog of NCBI NO: 34897474 NR Description: unknown protein [Oryza sativa (japonica
  misc_feature (1)..(112): Homolog of NCBI NO: 15239667 NR Description: hypothetical protein [Arabidopsis thaliana] contains similarity to unknown
  misc_feature (1)..(112): Homolog of NCBI NO: 15231412 NR Description: expressed protein [Arabidopsis thaliana]
  misc_feature (1)..(62): Homolog of NCBI NO: 30682503 NR Description: expressed protein [Arabidopsis thaliana]
  misc_feature (1)..(36): Homolog of NCBI NO: 18402620 NR Description: expressed protein [Arabidopsis thaliana]
MGFVLFLSLMIDRLHHYIRELRLLRKTMETAKKQNRGFEDGKTTSGEEVKALGEEIAALKAKIKTLESESESKGKELKGAQGETEALRKQADGFLMEYDRLLEDNQNLRNQLESIGHSPEGKKGM

SEQ ID NO: 98832 - DNA, 1708 bp, Arabidopsis thaliana
  misc_feature (1)..(1708): Ceres Seq. ID no. 13601576
  misc_feature: MA Experiment ID: 108461 Result: Up-regulated in Transcription
  misc_feature: MA Experiment 108461 PARAMETER Experiment Name: At_Germinating_Seeds_cDNA_P Parameter: Age (day) Value: 1 vs. 0
  misc_feature: MA Experiment 108461 PARAMETER Experiment Name: At_Germinating_Seeds_cDNA_P Parameter: Tissue Value: Germinating Seeds
  misc_feature: MA Experiment ID: 108462 Result: Up-regulated in Transcription
  misc_feature: MA Experiment 108462 PARAMETER Experiment Name: At_Germinating_Seeds_cDNA_P Parameter: Age (day) Value: 2 vs. 0
  misc_feature: MA Experiment 108462 PARAMETER Experiment Name: At_Germinating_Seeds_cDNA_P Parameter: Tissue Value: Germinating Seeds
  misc_feature: MA Experiment ID: 108464 Result: Up-regulated in Transcription
  misc_feature: MA Experiment 108464 PARAMETER Experiment Name: At_Germinating_Seeds_cDNA_P Parameter: Age (day) Value: 4 vs. 0
  misc_feature: MA Experiment 108464 PARAMETER Experiment Name: At_Germinating_Seeds_cDNA_P Parameter: Tissue Value: Germinating Seeds
  misc_feature: MA Experiment ID: 108501 Result: Up-regulated in Transcription
  misc_feature: MA Experiment 108501 PARAMETER Experiment Name: At_ap2_floral_buds_cDNA_P Parameter: Plant Line Value: ap2 (Ler.)
  misc_feature: MA Experiment 108501 PARAMETER Experiment Name: At_ap2_floral_buds_cDNA_P Parameter: Tissue Value: Closed Flower
  misc_feature: MA Experiment ID: 108569 Result: Up-regulated in Transcription
  misc_feature: MA Experiment 108569 PARAMETER Experiment Name: At_0.001%_MeJA__cDNA_P Parameter: Timepoint (hr) Value: 6
  misc_feature: MA Experiment 108569 PARAMETER Experiment Name: At_0.001%_MeJA__cDNA_P Parameter: Tissue Value: Aerial
  misc_feature: MA Experiment 108569 PARAMETER Experiment Name: At_0.001%_MeJA__cDNA_P Parameter: Treatment Value: 0.001% MeJA vs. No Treatment
  misc_feature: MA Experiment ID: 108576 Result: Up-regulated in Transcription
  misc_feature: MA Experiment 108576 PARAMETER Experiment Name: At_42deg_Heat_cDNA_P Parameter: Temperature (deg C) Value: 42 vs. 22
  misc_feature: MA Experiment 108576 PARAMETER Experiment Name: At_42deg_Heat_cDNA_P Parameter: Timepoint (hr) Value: 1
  misc_feature: MA Experiment 108576 PARAMETER Experiment Name: At_42deg_Heat_cDNA_P Parameter: Tissue Value: Aerial
  misc_feature: MA Experiment ID: 20000030 Result: Down-regulated in Transcription
  misc_feature: MA Experiment 20000030 PARAMETER Experiment Name: At_CS6630_Roots_cDNA_P Parameter: Plant Line Value: CS6630 vs. WS
  misc_feature: MA Experiment 20000030 PARAMETER Experiment Name: At_CS6630_Roots_cDNA_P Parameter: Tissue Value: Roots
  misc_feature: MA Experiment ID: 20000090 Result: Down-regulated in Transcription
  misc_feature: MA Experiment ID: 20000117 Result: Down-regulated in Transcription
  misc_feature: MA Experiment 20000117 PARAMETER Experiment Name: At_100uM_ABA_Mutants_cDNA_P Parameter: Plant Line Value: Columbia
  misc_feature: MA Experiment 20000117 PARAMETER Experiment Name: At_100uM_ABA_Mutants_cDNA_P Parameter: Timepoint (hr) Value: 6
  misc_feature: MA Experiment 20000117 PARAMETER Experiment Name: At_100uM_ABA_Mutants_cDNA_P Parameter: Tissue Value: Aerial
  misc_feature: MA Experiment 20000117 PARAMETER Experiment Name: At_100uM_ABA_Mutants_cDNA_P Parameter: Treatment Value: 100uM ABA vs. No Treatment
  misc_feature: MA Experiment ID: 20000144 Result: Up-regulated in Transcription
  misc_feature: MA Experiment 20000144 PARAMETER Experiment Name: At_42deg_Heat_cDNA_P Parameter: Temperature (deg C) Value: 42 vs. 22
  misc_feature: MA Experiment 20000144 PARAMETER Experiment Name: At_42deg_Heat_cDNA_P Parameter: Timepoint (hr) Value: 1
  misc_feature: MA Experiment 20000144 PARAMETER Experiment Name: At_42deg_Heat_cDNA_P Parameter: Tissue Value: Aerial
  misc_feature: MA Experiment ID: 20000184 Result: Up-regulated in Transcription
  misc_feature: MA Experiment 20000184 PARAMETER Experiment Name: At_Shoots__P Parameter: Age (day) Value: 7
  misc_feature: MA Experiment 20000184 PARAMETER Experiment Name: At_Shoots__P Parameter: Tissue Value: Shoots vs. Whole Plant
  misc_feature: MA Experiment ID: 20000495 Result: Up-regulated in Transcription
  misc_feature: MA Experiment 20000495 PARAMETER Experiment Name: At_Guard_Cells_P Parameter: Harvest Date Value: 8/2/2002
  misc_feature: MA Experiment 20000495 PARAMETER Experiment Name: At_Guard_Cells_P Parameter: Organism Value: A. thaliana
  misc_feature: MA Experiment 20000495 PARAMETER Experiment Name: At_Guard_Cells_P Parameter: Tissue Value: Guard Cells vs. Leaves
tttatggataatagatctagtagtcttcgtttactaattctctctcacaaatccaaacaaaaaggaactgtgtacttaaatcctgtaatgacaatttcatacatactaaacaagaactattaaatactaggataatacatacttgaagaaataacaactcttcatgtagtcgtgtctttttacaatttaaaatttgaaaaataaaagttacatttacctttacaacgtcggtcgttttccacacaatagattacccacttctactcgatagttttctctataatatagagacaaaagaagagagcatttaaattctaaagaacaaaaaaggaaaaacagagcagccatgagagcttctgtttattcattgatcctactcttcttctcgtgtttactacatctatcaaagtctcaaccgttcctcggagtaaactacggcctaaccgccgacaatcttccacctccgtcagcgagtgcaaagctccttcaatccacaactttccaaaaagtccgtctttacggatccgacccggctgtaatcaaggccctagcaaacacggggatcgagatcgtcatcggggcgtctaacggcgatgtacccggtctagcatcggacccgagtttcgcccgaagctgggtcgaaaccaacgtggtaccttattatccagcgagcaagattgttctcattgccgtgggaaatgagatcacatcattcggcgacaacagtctcatgtcgcagcttttgccggcgatgaaaaatgtccaaactgccctcgaggcggcgtctcttggtggcgggaaaatcaaagtctcgacagtacacataatgtcggttctagccgggtcagaccctccttcgaccgcggtatttaaaccggagcatgctgatatattgaagggattgctagagtttaatagtgaaaccgggtcgcctttcgcggttaacccctacccgtttttcgcttaccaagatgaccggagacccgaaacgttggcctattgcttgtttcaggccaatcctggccgtgtcgaccccaacagcaacctcaagtatatgaacatgttcgatgctcaggttgatgcggtgtattcagctttgaactcgatggggttcaaggacgtagagataatggtcgctgagactggatggccatacaagggagacccggaggaggctggtgcaacagttgagaacgctagagcttacaataaaaatctcattgctcatttaaaatctgggtccgggacgccacttatgcccgggagagtgatcgacacatacttgttcgcattgtacgacgagaatctcaagcccgggaaaggttctgaacgagccttcggtttgtttagacctgatctaaccatgacttatgatatcgggctcaccaagactaccaattataaccaaacttccatggctccattgtcaccaacaaggccacgtcttccaccagccgcggccccgacgagacaaacattaccttctcctccgcagatgattcttccttcaccagttactccctccgacaaaaactctgggcaaaccgatgttcacaattccactccgcgctctgcctctctggctcacatatgccgctctctctctatttcggcatcgatgttctttgtctccgttttgtatgcattgatcatattgttgtaaaatctcttcatcgatcttatattatgtctcttactaatttaaact

SEQ ID NO: 98833 - protein, 438 aa, Arabidopsis thaliana; identical to SEQ ID NO: 39792
  peptide (1)..(438): Ceres Seq. ID no. 13601577
  misc_feature (26)..(331): Pfam Name: Glycosyl hydrolases family 17 Pfam Description: Glycosyl hydrolases family 17
  misc_feature (1)..(438): Homolog of NCBI NO: 22327528 NR Description: glycosyl hydrolase family 17 [Arabidopsis
  misc_feature (1)..(331): Homolog of NCBI NO: 10177275 NR Description: beta-1,3-glucanase-like protein [Arabidopsis
  misc_feature (1)..(354): Homolog of NCBI NO: 30690053 NR Description: glycosyl hydrolase family 17 [Arabidopsis
  misc_feature (9)..(359): Homolog of NCBI NO: 15226720 NR Description: glycosyl hydrolase family 17 [Arabidopsis
  misc_feature (22)..(354): Homolog of NCBI NO: 7447982 NR Description: hypothetical protein T4L20.60 - Arabidopsis (fragment) >gi|3641838|emb|CAA18827.1| putative protein
  misc_feature (1)..(363): Homolog of NCBI NO: 14279169 NR Description: beta-1,3-glucanase-like protein [Olea europaea]
  misc_feature (15)..(350): Homolog of NCBI NO: 31126737 NR Description: putative beta 1,3-glucanase [Oryza sativa
  misc_feature (6)..(380): Homolog of NCBI NO: 34902328 NR Description: Putative glycosyl hydrolase [Oryza sativa
  misc_feature (19)..(399): Homolog of NCBI NO: 34395169 NR Description: putative glucan endo-1,3-beta-glucosidase
  misc_feature (1)..(344): Homolog of NCBI NO: 34908492 NR Description: putative beta-1,3-glucanase [Oryza sativa

SEQ ID NO: 98834 - protein, 310 aa, Arabidopsis thaliana; identical to SEQ ID NO: 39793
  peptide (1)..(310): Ceres Seq. ID no. 13601578
  misc_feature (1)..(203): Pfam Name: Glycosyl hydrolases family 17 Pfam Description: Glycosyl hydrolases family 17
  misc_feature (1)..(310): Homolog of NCBI NO: 22327528 NR Description: glycosyl hydrolase family 17 [Arabidopsis
  misc_feature (1)..(203): Homolog of NCBI NO: 10177275 NR Description: beta-1,3-glucanase-like protein [Arabidopsis
  misc_feature (1)..(226): Homolog of NCBI NO: 30690053 NR Description: glycosyl hydrolase family 17 [Arabidopsis
  misc_feature (1)..(231): Homolog of NCBI NO: 15226720 NR Description: glycosyl hydrolase family 17 [Arabidopsis
  misc_feature (1)..(226): Homolog of NCBI NO: 7447982 NR Description: hypothetical protein T4L20.60 - Arabidopsis (fragment) >gi|3641838|emb|CAA18827.1| putative protein
  misc_feature (1)..(235): Homolog of NCBI NO: 14279169 NR Description: beta-1,3-glucanase-like protein [Olea europaea]
  misc_feature (1)..(222): Homolog of NCBI NO: 31126737 NR Description: putative beta 1,3-glucanase [Oryza sativa
  misc_feature (1)..(252): Homolog of NCBI NO: 34902328 NR Description: Putative glycosyl hydrolase [Oryza sativa
  misc_feature (1)..(271): Homolog of NCBI NO: 34395169 NR Description: putative glucan endo-1,3-beta-glucosidase
  misc_feature (1)..(216): Homolog of NCBI NO: 34908492 NR Description: putative beta-1,3-glucanase [Oryza sativa

SEQ ID NO: 98835 - protein, 303 aa, Arabidopsis thaliana
  peptide (1)..(303): Ceres Seq. ID no. 13601579
  misc_feature (1)..(196): Pfam Name: Glycosyl hydrolases family 17 Pfam Description: Glycosyl hydrolases family 17
  misc_feature (1)..(303): Homolog of NCBI NO: 22327528 NR Description: glycosyl hydrolase family 17 [Arabidopsis
  misc_feature (1)..(196): Homolog of NCBI NO: 10177275 NR Description: beta-1,3-glucanase-like protein [Arabidopsis
  misc_feature (1)..(219): Homolog of NCBI NO: 30690053 NR Description: glycosyl hydrolase family 17 [Arabidopsis
  misc_feature (1)..(224): Homolog of NCBI NO: 15226720 NR Description: glycosyl hydrolase family 17 [Arabidopsis
  misc_feature (1)..(219): Homolog of NCBI NO: 7447982 NR Description: hypothetical protein T4L20.60 - Arabidopsis (fragment) >gi|3641838|emb|CAA18827.1| putative protein
  misc_feature (1)..(228): Homolog of NCBI NO: 14279169 NR Description: beta-1,3-glucanase-like protein [Olea europaea]
  misc_feature (1)..(215): Homolog of NCBI NO: 31126737 NR Description: putative beta 1,3-glucanase [Oryza sativa
  misc_feature (1)..(245): Homolog of NCBI NO: 34902328 NR Description: Putative glycosyl hydrolase [Oryza sativa
  misc_feature (1)..(264): Homolog of NCBI NO: 34395169 NR Description: putative glucan endo-1,3-beta-glucosidase
  misc_feature (1)..(209): Homolog of NCBI NO: 34908492 NR Description: putative beta-1,3-glucanase [Oryza sativa
MKNVQTALEAASLGGGKIKVSTVHIMSVLAGSDPPSTAVFKPEHADILKGLLEFNSETGSPFAVNPYPFFAYQDDRRPETLAYCLFQANPGRVDPNSNLKYMNMFDAQVDAVYSALNSMGFKDVEIMVAETGWPYKGDPEEAGATVENARAYNKNLIAHLKSGSGTPLMPGRVIDTYLFALYDENLKPGKGSERAFGLFRPDLTMTYDIGLTKTTNYNQTSMAPLSPTRPRLPPAAAPTRQTLPSPPQMILPSPVTPSDKNSGQTDVHNSTPRSASLAHICRSLSISASMFFVSVLYALIILL

SEQ ID NO: 98836 - DNA, 1080 bp, Arabidopsis thaliana
  misc_feature (1)..(1080): Ceres Seq. ID no. 13601587
  misc_feature: MA Experiment ID: 108434 Result: Up-regulated in Transcription
  misc_feature: MA Experiment 108434 PARAMETER Experiment Name: At_Root_Tips_cDNA_P Parameter: Tissue Value: Root Tips
  misc_feature: MA Experiment ID: 108462 Result: Down-regulated in Transcription
  misc_feature: MA Experiment 108462 PARAMETER Experiment Name: At_Germinating_Seeds_cDNA_P Parameter: Age (day) Value: 2 vs. 0
  misc_feature: MA Experiment 108462 PARAMETER Experiment Name: At_Germinating_Seeds_cDNA_P Parameter: Tissue Value: Germinating Seeds
  misc_feature: MA Experiment ID: 108463 Result: Down-regulated in Transcription
  misc_feature: MA Experiment 108463 PARAMETER Experiment Name: At_Germinating_Seeds_cDNA_P Parameter: Age (day) Value: 3 vs. 0
  misc_feature: MA Experiment 108463 PARAMETER Experiment Name: At_Germinating_Seeds_cDNA_P Parameter: Tissue Value: Germinating Seeds
  misc_feature: MA Experiment ID: 108573 Result: Up-regulated in Transcription
  misc_feature: MA Experiment 108573 PARAMETER Experiment Name: At_Drought_cDNA_P Parameter: Timepoint (hr) Value: 6
  misc_feature: MA Experiment 108573 PARAMETER Experiment Name: At_Drought_cDNA_P Parameter: Tissue Value: Aerial
  misc_feature: MA Experiment 108573 PARAMETER Experiment Name: At_Drought_cDNA_P Parameter: Treatment Value: Drought vs. No Drought
  misc_feature: MA Experiment ID: 108585 Result: Up-regulated in Transcription
  misc_feature: MA Experiment 108585 PARAMETER Experiment Name: At_5mM_NaNP_cDNA_P Parameter: Timepoint (hr) Value: 6
  misc_feature: MA Experiment 108585 PARAMETER Experiment Name: At_5mM_NaNP_cDNA_P Parameter: Tissue Value: Aerial
  misc_feature: MA Experiment 108585 PARAMETER Experiment Name: At_5mM_NaNP_cDNA_P Parameter: Treatment Value: null
  misc_feature: MA Experiment ID: 20000179 Result: Down-regulated in Transcription
  misc_feature: MA Experiment 20000179 PARAMETER Experiment Name: At_Germinating_Seeds_P Parameter: Age (hr) Value: 6 vs. 0
  misc_feature: MA Experiment 20000179 PARAMETER Experiment Name: At_Germinating_Seeds_P Parameter: Tissue Value: Germinating Seeds
  misc_feature: MA Experiment ID: 20000182 Result: Up-regulated in Transcription
  misc_feature: MA Experiment 20000182 PARAMETER Experiment Name: At_2mM_SA_P Parameter: Age (day) Value: 14
  misc_feature: MA Experiment 20000182 PARAMETER Experiment Name: At_2mM_SA_P Parameter: Organism Value: A. thaliana
  misc_feature: MA Experiment 20000182 PARAMETER Experiment Name: At_2mM_SA_P Parameter: Plant Line Value: WS
  misc_feature: MA Experiment 20000182 PARAMETER Experiment Name: At_2mM_SA_P Parameter: Timepoint (hr) Value: 6
  misc_feature: MA Experiment 20000182 PARAMETER Experiment Name: At_2mM_SA_P Parameter: Tissue Value: Aerial
  misc_feature: MA Experiment 20000182 PARAMETER Experiment Name: At_2mM_SA_P Parameter: Treatment Value: 2mM SA vs. No Treatment
  misc_feature: MA Experiment ID: 20000224 Result: Down-regulated in Transcription
ggcttgaaggaaaagaaaagttttgtttctgaactttcgtctctataaaccctttcgacgacgagtgaagaagaaagcgagacgaagaagcaaagatgttcagaaaccaatacgacacagatgttacgacatggagtccaacaggtcgtttattccaagtggaatacgccatggaagcagtgaagcaaggatctgcagcaattggactcagatctcgttctcatgtcgttctcgcttgtgttaacaaagctcaatcggagctttcttcgcatcagaggaagatctttaaagtcgatgaccatatcggtgttgcaatcgctggtctcacagccgacggtcgtgtattgtctcggtatatgagatcggaatcgattaatcactcttttacttatgagtctcctcttcctgttggtcgtctcgttgttcatcttgctgataaagctcaggtctgtacccaacgatcatggaaacgaccctatggtgttggtttgctggtaggtggattggatgagtctggagcccacctttactacaactgtcccagcggaaactacttcgagtaccaagcttttgctattggatcccgttcccaagcagcaaagacctatctggaacgcaggtttgagagctttggggattcttctagagaagatctgatcaaagatgctattttggctgttagggagacattgcaaggggaaacactgaagagttctctctgcacagtcgctattctaggagtcgatgaaccgttccacttcctggaccaggaagcaatacagaaagtgatcgacacatttgagaaagtgccagaggaagaggaaggagaaggcgaggctggtgagggtgaggccgaagctgccgaggctgcaccagcagaacgaggtggtggtgttgcaggtgaccaagacgtggctccaatggaaatgtaaggcttgtgtgtgtaacgctggaactattttatttcgatgttagttggatttttactttgcaaaatggctgcgggtttagattatatgcttgagaagttgaaaccatttcgtcatttaaactcaatagctgccatcaagactttctcgt

SEQ ID NO: 98837 - protein, 278 aa, Arabidopsis thaliana
  peptide (1)..(278): Ceres Seq. ID no. 13601588
  misc_feature (29)..(214): Pfam Name: Proteasome A-type and B-type Pfam Description: Proteasome A-type and B-type
  misc_feature (1)..(278): Homolog of NCBI NO: 15239061 NR Description: 20S proteasome alpha subunit F1 (PAF1)
  misc_feature (1)..(278): Homolog of NCBI NO: 25290066 NR Description: C 3.4.25.1 proteasome endopeptidase complex ()
  misc_feature (1)..(278): Homolog of NCBI NO: 21537234 NR Description: 20S proteasome subunit PAF1 [Arabidopsis thaliana]
  misc_feature (1)..(278): Homolog of NCBI NO: 15220151 NR Description: 20S proteasome alpha subunit F2 (PAF2)
  misc_feature (11)..(278): Homolog of NCBI NO: 2511586 NR Description: multicatalytic endopeptidase [Arabidopsis
  misc_feature (1)..(278): Homolog of NCBI NO: 22947842 NR Description: 20S proteasome alpha 6 subunit [Nicotiana
  misc_feature (1)..(262): Homolog of NCBI NO: 1709758 NR Description: Proteasome subunit alpha type 1 (20S proteasome
  misc_feature (6)..(162): Homolog of NCBI NO: 14594923 NR Description: putative alpha6 proteasome subunit [Nicotiana
  misc_feature (1)..(262): Homolog of NCBI NO: 33563282 NR Description: proteasome (prosome, macropain) subunit, alpha alpha type 1 (Proteasome component C2) (Macropain subunit C2)
  misc_feature (1)..(262): Homolog of NCBI NO: 8394060 NR Description: proteasome (prosome, macropain) subunit, alpha alpha type 1 (Proteasome component C2) (Macropain subunit C2)
MFRNQYDTDVTTWSPTGRLFQVEYAMEAVKQGSAAIGLRSRSHVVLACVNKAQSELSSHQRKIFKVDDHIGVAIAGLTADGRVLSRYMRSESINHSFTYESPLPVGRLVVHLADKAQVCTQRSWKRPYGVGLLVGGLDESGAHLYYNCPSGNYFEYQAFAIGSRSQAAKTYLERRFESFGDSSREDLIKDAILAVRETLQGETLKSSLCTVAILGVDEPFHFLDQEAIQKVIDTFEKVPEEEEGEGEAGEGEAEAAEAAPAERGGGVAGDQDVAPMEM

SEQ ID NO: 98838 - protein, 253 aa, Arabidopsis thaliana
  peptide (1)..(253): Ceres Seq. ID no. 13601589
  misc_feature (4)..(189): Pfam Name: Proteasome A-type and B-type Pfam Description: Proteasome A-type and B-type
  misc_feature (1)..(253): Homolog of NCBI NO: 15239061 NR Description: 20S proteasome alpha subunit F1 (PAF1)
  misc_feature (1)..(253): Homolog of NCBI NO: 25290066 NR Description: C 3.4.25.1 proteasome endopeptidase complex ()
  misc_feature (1)..(253): Homolog of NCBI NO: 21537234 NR Description: 20S proteasome subunit PAF1 [Arabidopsis thaliana]
  misc_feature (1)..(253): Homolog of NCBI NO: 15220151 NR Description: 20S proteasome alpha subunit F2 (PAF2)
  misc_feature (1)..(253): Homolog of NCBI NO: 2511586 NR Description: multicatalytic endopeptidase [Arabidopsis
  misc_feature (1)..(253): Homolog of NCBI NO: 22947842 NR Description: 20S proteasome alpha 6 subunit [Nicotiana
  misc_feature (1)..(237): Homolog of NCBI NO: 1709758 NR Description: Proteasome subunit alpha type 1 (20S proteasome
  misc_feature (1)..(137): Homolog of NCBI NO: 14594923 NR Description: putative alpha6 proteasome subunit [Nicotiana
  misc_feature (1)..(237): Homolog of NCBI NO: 33563282 NR Description: proteasome (prosome, macropain) subunit, alpha alpha type 1 (Proteasome component C2) (Macropain subunit C2)
  misc_feature (1)..(237): Homolog of NCBI NO: 8394060 NR Description: proteasome (prosome, macropain) subunit, alpha alpha type 1 (Proteasome component C2) (Macropain subunit C2)
MEAVKQGSAAIGLRSRSHVVLACVNKAQSELSSHQRKIFKVDDHIGVAIAGLTADGRVLSRYMRSESINHSFTYESPLPVGRLVVHLADKAQVCTQRSWKRPYGVGLLVGGLDESGAHLYYNCPSGNYFEYQAFAIGSRSQAAKTYLERRFESFGDSSREDLIKDAILAVRETLQGETLKSSLCTVAILGVDEPFHFLDQEAIQKVIDTFEKVPEEEEGEGEAGEGEAEAAEAAPAERGGGVAGDQDVAPMEM

SEQ ID NO: 98839 - protein, 191 aa, Arabidopsis thaliana
  peptide (1)..(191): Ceres Seq. ID no. 13601590
  misc_feature (1)..(127): Pfam Name: Proteasome A-type and B-type Pfam Description: Proteasome A-type and B-type
  misc_feature (1)..(191): Homolog of NCBI NO: 15239061 NR Description: 20S proteasome alpha subunit F1 (PAF1)
  misc_feature (1)..(191): Homolog of NCBI NO: 25290066 NR Description: C 3.4.25.1 proteasome endopeptidase complex ()
  misc_feature (1)..(191): Homolog of NCBI NO: 21537234 NR Description: 20S proteasome subunit PAF1 [Arabidopsis thaliana]
  misc_feature (1)..(191): Homolog of NCBI NO: 15220151 NR Description: 20S proteasome alpha subunit F2 (PAF2)
  misc_feature (1)..(191): Homolog of NCBI NO: 2511586 NR Description: multicatalytic endopeptidase [Arabidopsis
  misc_feature (1)..(191): Homolog of NCBI NO: 22947842 NR Description: 20S proteasome alpha 6 subunit [Nicotiana
  misc_feature (1)..(175): Homolog of NCBI NO: 1709758 NR Description: Proteasome subunit alpha type 1 (20S proteasome
  misc_feature (1)..(75): Homolog of NCBI NO: 14594923 NR Description: putative alpha6 proteasome subunit [Nicotiana
  misc_feature (1)..(175): Homolog of NCBI NO: 33563282 NR Description: proteasome (prosome, macropain) subunit, alpha alpha type 1 (Proteasome component C2) (Macropain subunit C2)
  misc_feature (1)..(175): Homolog of NCBI NO: 8394060 NR Description: proteasome (prosome, macropain) subunit, alpha alpha type 1 (Proteasome component C2) (Macropain subunit C2)
MRSESINHSFTYESPLPVGRLVVHLADKAQVCTQRSWKRPYGVGLLVGGLDESGAHLYYNCPSGNYFEYQAFAIGSRSQAAKTYLERRFESFGDSSREDLIKDAILAVRETLQGETLKSSLCTVAILGVDEPFHFLDQEAIQKVIDTFEKVPEEEEGEGEAGEGEAEAAEAAPAERGGGVAGDQDVAPMEM

SEQ ID NO: 98840 - DNA, 1364 bp, Arabidopsis thaliana
  misc_feature (1)..(1364): Ceres Seq. ID no. 13601591
  misc_feature: MA Experiment ID: 108434 Result: Down-regulated in Transcription
  misc_feature: MA Experiment 108434 PARAMETER Experiment Name: At_Root_Tips_cDNA_P Parameter: Tissue Value: Root Tips
  misc_feature: MA Experiment ID: 108461 Result: Down-regulated in Transcription
  misc_feature: MA Experiment 108461 PARAMETER Experiment Name: At_Germinating_Seeds_cDNA_P Parameter: Age (day) Value: 1 vs. 0
  misc_feature: MA Experiment 108461 PARAMETER Experiment Name: At_Germinating_Seeds_cDNA_P Parameter: Tissue Value: Germinating Seeds
  misc_feature: MA Experiment ID: 108573 Result: Up-regulated in Transcription
  misc_feature: MA Experiment 108573 PARAMETER Experiment Name: At_Drought_cDNA_P Parameter: Timepoint (hr) Value: 6
  misc_feature: MA Experiment 108573 PARAMETER Experiment Name: At_Drought_cDNA_P Parameter: Tissue Value: Aerial
  misc_feature: MA Experiment 108573 PARAMETER Experiment Name: At_Drought_cDNA_P Parameter: Treatment Value: Drought vs. No Drought
  misc_feature: MA Experiment ID: 108668 Result: Up-regulated in Transcription
  misc_feature: MA Experiment 108668 PARAMETER Experiment Name: At_2mM_SA_cDNA_P Parameter: Plant Line Value: WS
  misc_feature: MA Experiment 108668 PARAMETER Experiment Name: At_2mM_SA_cDNA_P Parameter: Timepoint (hr) Value: 6
  misc_feature: MA Experiment 108668 PARAMETER Experiment Name: At_2mM_SA_cDNA_P Parameter: Treatment Value: 2mM SA vs. No Treatment
  misc_feature: MA Experiment ID: 20000068 Result: Up-regulated in Transcription
  misc_feature: MA Experiment ID: 20000224 Result: Up-regulated in Transcription
  misc_feature: MA Experiment ID: 20000315 Result: Down-regulated in Transcription
  misc_feature: MA Experiment 20000315 PARAMETER Experiment Name: At_14day_Shoots-Roots_Sub_P Parameter: Age (day) Value: 14
  misc_feature: MA Experiment 20000315 PARAMETER Experiment Name: At_14day_Shoots-Roots_Sub_P Parameter: Organism Value: A. thaliana
  misc_feature: MA Experiment 20000315 PARAMETER Experiment Name: At_14day_Shoots-Roots_Sub_P Parameter: Plant Line Value: WS
  misc_feature: MA Experiment 20000315 PARAMETER Experiment Name: At_14day_Shoots-Roots_Sub_P Parameter: Tissue Value: Shoots vs. Whole Plant
  misc_feature: MA Experiment ID: 20000328 Result: Down-regulated in Transcription
  misc_feature: MA Experiment 20000328 PARAMETER Experiment Name: At_42deg_Heat_Sub_P Parameter: Age (day) Value: 14
  misc_feature: MA Experiment 20000328 PARAMETER Experiment Name: At_42deg_Heat_Sub_P Parameter: Organism Value: A. thaliana
  misc_feature: MA Experiment 20000328 PARAMETER Experiment Name: At_42deg_Heat_Sub_P Parameter: Plant Line Value: WS
  misc_feature: MA Experiment 20000328 PARAMETER Experiment Name: At_42deg_Heat_Sub_P Parameter: Temperature (deg C) Value: 42 vs. 22
  misc_feature: MA Experiment 20000328 PARAMETER Experiment Name: At_42deg_Heat_Sub_P Parameter: Timepoint (hr) Value: 6
  misc_feature: MA Experiment 20000328 PARAMETER Experiment Name: At_42deg_Heat_Sub_P Parameter: Tissue Value: Aerial
  misc_feature: MA Experiment ID: 20000347 Result: Up-regulated in Transcription
  misc_feature: MA Experiment 20000347 PARAMETER Experiment Name: At_2mM_SA_Sub_P Parameter: Age (day) Value: 14
  misc_feature: MA Experiment 20000347 PARAMETER Experiment Name: At_2mM_SA_Sub_P Parameter: Organism Value: A. thaliana
  misc_feature: MA Experiment 20000347 PARAMETER Experiment Name: At_2mM_SA_Sub_P Parameter: Plant Line Value: WS
  misc_feature: MA Experiment 20000347 PARAMETER Experiment Name: At_2mM_SA_Sub_P Parameter: Timepoint (hr) Value: 6
  misc_feature: MA Experiment 20000347 PARAMETER Experiment Name: At_2mM_SA_Sub_P Parameter: Tissue Value: Aerial
  misc_feature: MA Experiment 20000347 PARAMETER Experiment Name: At_2mM_SA_Sub_P Parameter: Treatment Value: 2mM SA vs. No Treatment
  misc_feature: MA Experiment ID: 20000355 Result: Down-regulated in Transcription
  misc_feature: MA Experiment 20000355 PARAMETER Experiment Name: At_Siliques_Sub_P Parameter: Age (day) Value: 21
  misc_feature: MA Experiment 20000355 PARAMETER Experiment Name: At_Siliques_Sub_P Parameter: Organism Value: A. thaliana
  misc_feature: MA Experiment 20000355 PARAMETER Experiment Name: At_Siliques_Sub_P Parameter: Plant Line Value: WS
  misc_feature: MA Experiment 20000355 PARAMETER Experiment Name: At_Siliques_Sub_P Parameter: Tissue Value: Less Than 5mm Siliques vs. Whole Plant
  misc_feature: MA Experiment ID: 20000440 Result: Down-regulated in Transcription
  misc_feature: MA Experiment 20000440 PARAMETER Experiment Name: At_Closed-Flower__Sub_P Parameter: Tissue Value: Closed Flower vs. Whole Plant
attcttccacaatggattcttcatcttcagtaaaaatcgtctcgaaaagcttcgtgaaacccaaaaccttaccagaagaatcaaagcaaccatactatttatctccatgggactacgcaatgctctctgttcagtacatccaaaaaggtcttctctttcacaagccaccacttgactccattgacactcttcttgagaagctaaaagattctctggccgtcacactagtccatttctaccctctcgcgggtcgcctctcatcgttaacaacggaaaaaccgaaatcttactctgttttcgttgattgtaacgatagccctggcgcggggtttatctacgcgacctcagatttatgtataaaagatattgtgggtgctaagtatgtcccttcaattgttcaatctttctttgaccatcacaaagctgtgaatcatgatggacacaccatgagcctcttatctgtccaggtgacagaattggtagatggaattttcataggactgtctatgaaccatgcgatgggagacggtactgcgttctggaagttctttaccgcatggtccgaaatcttccaaggacaagagagcaaccaaaacgatgacttgtgtcttaagaatccacccgtgttgaagcgttacatccctgaaggatacggtcctctattcagccttccatatagtcatccagatgaatttatcagaacctacgaatctccaattctcaaggagagaatgttctgtttctcatcagaaaccataagaatgcttaaaacaagggtcaaccaaatatgcggaacaacctccatctcatctttccaatcgctaaccgcggttatatggagatgcataacaagggcgaggagattacctctcgatcgagaaacaagttgtagagttgctgctgacaacagaggaagaatgtatccaccgcttcacaaggattacttcggaaactgcctctctgctttgagaacggctgcaaaagctggtgaactattggagaatgatcttggatttgctgctttgaaagtgcatcaagcagtagctgaacatacgagcgaaaaggtatctcaaatgattgatcaatggctaaagtctccttatatttaccatattgatcggctatttgaaccgatgagcgttatgatgggaagctcgccgaggtttaataagtatggttgtgaatttgggttgggaaaaggagtgacgcttagaagtggctatgcgcataagttcgatggaaaggtatctgcttacccgggaagagaaggagggggaagtatagatttggaggtatgtcttgttccagagtttatggaagctttggaatcagatgaagagttcatgtcacttgtttctctttga

SEQ ID NO: 98841 - protein, 453 aa, Arabidopsis thaliana
  peptide (1)..(453): Ceres Seq. ID no. 13601592
  misc_feature (8)..(448): Pfam Name: Transferase family Pfam Description: Transferase family
  misc_feature (4)..(453): Homolog of NCBI NO: 15239072 NR Description: hydroxycinnamoyl benzoyltransferase-related
  misc_feature (4)..(452): Homolog of NCBI NO: 15240871 NR Description: hydroxycinnamoyl benzoyltransferase-related
  misc_feature (4)..(452): Homolog of NCBI NO: 15241433 NR Description: hydroxycinnamoyl benzoyltransferase-related
  misc_feature (4)..(452): Homolog of NCBI NO: 15241431 NR Description: hydroxycinnamoyl benzoyltransferase-related
  misc_feature (4)..(452): Homolog of NCBI NO: 24413968 NR Description: N-hydroxycinnamoyl/benzoyltransferase-like
  misc_feature (9)..(261): Homolog of NCBI NO: 15225603 NR Description: transferase family [Arabidopsis thaliana]
  misc_feature (268)..(452): Homolog of NCBI NO: 15225603 NR Description: transferase family [Arabidopsis thaliana]
  misc_feature (3)..(452): Homolog of NCBI NO: 34899602 NR Description: N-hydroxycinnamoyl benzoyltransferase-like
  misc_feature (7)..(260): Homolog of NCBI NO: 21666314 NR Description: AER [Nicotiana tabacum]
  misc_feature (264)..(452): Homolog of NCBI NO: 21666314 NR Description: AER [Nicotiana tabacum]
SSTMDSSSSVKIVSKSFVKPKTLPEESKQPYYLSPWDYAMLSVQYIQKGLLFHKPPLDSIDTLLEKLKDSLAVTLVHFYPLAGRLSSLTTEKPKSYSVFVDCNDSPGAGFIYATSDLCIKDIVGAKYVPSIVQSFFDHHKAVNHDGHTMSLLSVQVTELVDGIFIGLSMNHAMGDGTAFWKFFTAWSEIFQGQESNQNDDLCLKNPPVLKRYIPEGYGPLFSLPYSHPDEFIRTYESPILKERMFCFSSETIRMLKTRVNQICGTTSISSFQSLTAVIWRCITRARRLPLDRETSCRVAADNRGRMYPPLHKDYFGNCLSALRTAAKAGELLENDLGFAALKVHQAVAEHTSEKVSQMIDQWLKSPYIYHIDRLFEPMSVMMGSSPRFNKYGCEFGLGKGVTLRSGYAHKFDGKVSAYPGREGGGSIDLEVCLVPEFMEALESDEEFMSLVSL

SEQ ID NO: 98842 - protein, 450 aa, Arabidopsis thaliana
  peptide (1)..(450): Ceres Seq. ID no. 13601593
  misc_feature (5)..(445): Pfam Name: Transferase family Pfam Description: Transferase family
  misc_feature (1)..(450): Homolog of NCBI NO: 15239072 NR Description: hydroxycinnamoyl benzoyltransferase-related
  misc_feature (1)..(449): Homolog of NCBI NO: 15240871 NR Description: hydroxycinnamoyl benzoyltransferase-related
  misc_feature (1)..(449): Homolog of NCBI NO: 15241433 NR Description: hydroxycinnamoyl benzoyltransferase-related
  misc_feature (1)..(449): Homolog of NCBI NO: 15241431 NR Description: hydroxycinnamoyl benzoyltransferase-related
  misc_feature (1)..(449): Homolog of NCBI NO: 24413968 NR Description: N-hydroxycinnamoyl/benzoyltransferase-like
  misc_feature (6)..(258): Homolog of NCBI NO: 15225603 NR Description: transferase family [Arabidopsis thaliana]
  misc_feature (265)..(449): Homolog of NCBI NO: 15225603 NR Description: transferase family [Arabidopsis thaliana]
  misc_feature (1)..(449): Homolog of NCBI NO: 34899602 NR Description: N-hydroxycinnamoyl benzoyltransferase-like
  misc_feature (4)..(257): Homolog of NCBI NO: 21666314 NR Description: AER [Nicotiana tabacum]
  misc_feature (261)..(449): Homolog of NCBI NO: 21666314 NR Description: AER [Nicotiana tabacum]
MDSSSSVKIVSKSFVKPKTLPEESKQPYYLSPWDYAMLSVQYIQKGLLFHKPPLDSIDTLLEKLKDSLAVTLVHFYPLAGRLSSLTTEKPKSYSVFVDCNDSPGAGFIYATSDLCIKDIVGAKYVPSIVQSFFDHHKAVNHDGHTMSLLSVQVTELVDGIFIGLSMNHAMGDGTAFWKFFTAWSEIFQGQESNQNDDLCLKNPPVLKRYIPEGYGPLFSLPYSHPDEFIRTYESPILKERMFCFSSETIRMLKTRVNQICGTTSISSFQSLTAVIWRCITRARRLPLDRETSCRVAADNRGRMYPPLHKDYFGNCLSALRTAAKAGELLENDLGFAALKVHQAVAEHTSEKVSQMIDQWLKSPYIYHIDRLFEPMSVMMGSSPRFNKYGCEFGLGKGVTLRSGYAHKFDGKVSAYPGREGGGSIDLEVCLVPEFMEALESDEEFMSLVSL

SEQ ID NO: 98843 - protein, 414 aa, Arabidopsis thaliana
  peptide (1)..(414): Ceres Seq. ID no. 13601594
  misc_feature (1)..(409): Pfam Name: Transferase family Pfam Description: Transferase family
  misc_feature (1)..(414): Homolog of NCBI NO: 15239072 NR Description: hydroxycinnamoyl benzoyltransferase-related
  misc_feature (1)..(413): Homolog of NCBI NO: 15240871 NR Description: hydroxycinnamoyl benzoyltransferase-related
  misc_feature (1)..(413): Homolog of NCBI NO: 15241433 NR Description: hydroxycinnamoyl benzoyltransferase-related
  misc_feature (1)..(413): Homolog of NCBI NO: 15241431 NR Description: hydroxycinnamoyl benzoyltransferase-related
  misc_feature (1)..(413): Homolog of NCBI NO: 24413968 NR Description: N-hydroxycinnamoyl/benzoyltransferase-like
  misc_feature (1)..(222): Homolog of NCBI NO: 15225603 NR Description: transferase family [Arabidopsis thaliana]
  misc_feature (229)..(413): Homolog of NCBI NO: 15225603 NR Description: transferase family [Arabidopsis thaliana]
  misc_feature (1)..(413): Homolog of NCBI NO: 34899602 NR Description: N-hydroxycinnamoyl benzoyltransferase-like
  misc_feature (1)..(221): Homolog of NCBI NO: 21666314 NR Description: AER [Nicotiana tabacum]
  misc_feature (225)..(413): Homolog of NCBI NO: 21666314 NR Description: AER [Nicotiana tabacum]
MLSVQYIQKGLLFHKPPLDSIDTLLEKLKDSLAVTLVHFYPLAGRLSSLTTEKPKSYSVFVDCNDSPGAGFIYATSDLCIKDIVGAKYVPSIVQSFFDHHKAVNHDGHTMSLLSVQVTELVDGIFIGLSMNHAMGDGTAFWKFFTAWSEIFQGQESNQNDDLCLKNPPVLKRYIPEGYGPLFSLPYSHPDEFIRTYESPILKERMFCFSSETIRMLKTRVNQICGTTSISSFQSLTAVIWRCITRARRLPLDRETSCRVAADNRGRMYPPLHKDYFGNCLSALRTAAKAGELLENDLGFAALKVHQAVAEHTSEKVSQMIDQWLKSPYIYHIDRLFEPMSVMMGSSPRFNKYGCEFGLGKGVTLRSGYAHKFDGKVSAYPGREGGGSIDLEVCLVPEFMEALESDEEFMSLVSL

SEQ ID NO: 98844 - DNA, 612 bp, Arabidopsis thaliana
  misc_feature (1)..(612): Ceres Seq. ID no. 13601595
  misc_feature: MA Experiment ID: 108433 Result: Up-regulated in Transcription
  misc_feature: MA Experiment 108433 PARAMETER Experiment Name: At_rhl_Mutant2_cDNA_P Parameter: Age (day) Value: 7
  misc_feature: MA Experiment 108433 PARAMETER Experiment Name: At_rhl_Mutant2_cDNA_P Parameter: Organism Value: A. thaliana
  misc_feature: MA Experiment 108433 PARAMETER Experiment Name: At_rhl_Mutant2_cDNA_P Parameter: Plant Line Value: rhl Mutant vs. wt landsburg
  misc_feature: MA Experiment 108433 PARAMETER Experiment Name: At_rhl_Mutant2_cDNA_P Parameter: Tissue Value: Roots
  misc_feature: MA Experiment ID: 108434 Result: Down-regulated in Transcription
  misc_feature: MA Experiment 108434 PARAMETER Experiment Name: At_Root_Tips_cDNA_P Parameter: Tissue Value: Root Tips
  misc_feature: MA Experiment ID: 108488 Result: Down-regulated in Transcription
  misc_feature: MA Experiment ID: 20000227 Result: Down-regulated in Transcription
  misc_feature: MA Experiment 20000227 PARAMETER Experiment Name: At_Root-Tips-vs-Tops_P Parameter: Tissue Value: Root Tips vs. Root Tops
  misc_feature: MA Experiment ID: 20000234 Result: Down-regulated in Transcription
  misc_feature: MA Experiment 20000234 PARAMETER Experiment Name: At_Siliques_P Parameter: Age (day) Value: 21
  misc_feature: MA Experiment 20000234 PARAMETER Experiment Name: At_Siliques_P Parameter: Organism Value: A. thaliana
  misc_feature: MA Experiment 20000234 PARAMETER Experiment Name: At_Siliques_P Parameter: Plant Line Value: WS
  misc_feature: MA Experiment 20000234 PARAMETER Experiment Name: At_Siliques_P Parameter: Tissue Value: Less Than 5mm Siliques vs. Whole Plant
  misc_feature: MA Experiment ID: 20000235 Result: Down-regulated in Transcription
  misc_feature: MA Experiment 20000235 PARAMETER Experiment Name: At_Siliques_P Parameter: Age (day) Value: 21
  misc_feature: MA Experiment 20000235 PARAMETER Experiment Name: At_Siliques_P Parameter: Organism Value: A. thaliana
  misc_feature: MA Experiment 20000235 PARAMETER Experiment Name: At_Siliques_P Parameter: Plant Line Value: WS
  misc_feature: MA Experiment 20000235 PARAMETER Experiment Name: At_Siliques_P Parameter: Tissue Value: 5-10mm Siliques vs. Whole Plant
  misc_feature: MA Experiment ID: 20000286 Result: Down-regulated in Transcription
  misc_feature: MA Experiment 20000286 PARAMETER Experiment Name: At_Open_Flower_P Parameter: Age (day) Value: 21
  misc_feature: MA Experiment 20000286 PARAMETER Experiment Name: At_Open_Flower_P Parameter: Plant Line Value: WS
  misc_feature: MA Experiment 20000286 PARAMETER Experiment Name: At_Open_Flower_P Parameter: Tissue Value: Half Open vs. Whole Plant
  misc_feature: MA Experiment ID: 20000573 Result: Down-regulated in Transcription
  misc_feature: MA Experiment 20000573 PARAMETER Experiment Name: At_100uM_ABA_Mutants__P Parameter: Organism Value: A. thaliana
  misc_feature: MA Experiment 20000573 PARAMETER Experiment Name: At_100uM_ABA_Mutants__P Parameter: Plant Line Value: CS22 vs. Ler wt
  misc_feature: MA Experiment 20000573 PARAMETER Experiment Name: At_100uM_ABA_Mutants__P Parameter: Timepoint (hr) Value: N/A
  misc_feature: MA Experiment 20000573 PARAMETER Experiment Name: At_100uM_ABA_Mutants__P Parameter: Tissue Value: Whole Plant
  misc_feature: MA Experiment 20000573 PARAMETER Experiment Name: At_100uM_ABA_Mutants__P Parameter: Treatment Value: None
  misc_feature: MA Experiment ID: 20000574 Result: Down-regulated in Transcription
  misc_feature: MA Experiment 20000574 PARAMETER Experiment Name: At_100uM_ABA_Mutants__P Parameter: Organism Value: A. thaliana
  misc_feature: MA Experiment 20000574 PARAMETER Experiment Name: At_100uM_ABA_Mutants__P Parameter: Plant Line Value: CS23 vs. Ler wt
  misc_feature: MA Experiment 20000574 PARAMETER Experiment Name: At_100uM_ABA_Mutants__P Parameter: Timepoint (hr) Value: N/A
  misc_feature: MA Experiment 20000574 PARAMETER Experiment Name: At_100uM_ABA_Mutants__P Parameter: Tissue Value: Whole Plant
  misc_feature: MA Experiment 20000574 PARAMETER Experiment Name: At_100uM_ABA_Mutants__P Parameter: Treatment Value: None
  misc_feature: MA Experiment ID: 20001905 Result: Up-regulated in Transcription
  misc_feature: MA Experiment 20001905 PARAMETER Experiment Name: At_Drought_Reproduction_P Parameter: Age (day) Value: 40
  misc_feature: MA Experiment 20001905 PARAMETER Experiment Name: At_Drought_Reproduction_P Parameter: Organism Value: A. thaliana
  misc_feature: MA Experiment 20001905 PARAMETER Experiment Name: At_Drought_Reproduction_P Parameter: Plant Line Value: WS
  misc_feature: MA Experiment 20001905 PARAMETER Experiment Name: At_Drought_Reproduction_P Parameter: Timepoint (day) Value: 10
  misc_feature: MA Experiment 20001905 PARAMETER Experiment Name: At_Drought_Reproduction_P Parameter: Tissue Value: Rosettes
  misc_feature: MA Experiment 20001905 PARAMETER Experiment Name: At_Drought_Reproduction_P Parameter: Treatment Value: Drought vs. No Drought
agaagaagaagaagaaagatgacgttgaagaaggtggacgcgaatccatcaaccttggaatcgagtttacaagaactgaaatcagacgaaacaagccgtagcaagatcaatttcatactcttcctcgccgacaatgatcccaccaccggtcaaagctggtgtccagactgtgttagagctgaacctgtgatttacaagactctagaggaatttccagaggaggtgaagctaattcgtgcttacgccggagacagaccgacgtggcggactccggcgcatccttggagagttgattctcggtttaaactaaccggagtaccaactcttgttcgttgggatggtgactctgttaaaggacgtcttgaagatcatcaagctcaccttcctcacttgattcttccccttcttgcaccatccacttgatttgatcgatatcgatttctcgggactatcgtgggattgaggatcaaatatcttatatatatttctagttgtgaattgttttccaataaatcctttacaatggtaaaggaaagtttgtttcttcgatgatctttacgatttcgtgctcaatgtagtgttatttctctaataaattacggtgatattagc

SEQ ID NO: 98845 - protein, 140 aa, Arabidopsis thaliana
  peptide (1)..(140): Ceres Seq. ID no. 13601596
  misc_feature (7)..(138): Pfam Name: Eukaryotic protein of unknown function (DUF953) Pfam Description: Eukaryotic protein of unknown function (DUF953)
  misc_feature (7)..(140): Homolog of NCBI NO: 18422261 NR Description: expressed protein [Arabidopsis thaliana] gene_id:MBD2.4~unknown protein [Arabidopsis thaliana] unknown protein [Arabidopsis thaliana]
  misc_feature (7)..(140): Homolog of NCBI NO: 21592399 NR Description: unknown [Arabidopsis thaliana]
  misc_feature (20)..(132): Homolog of NCBI NO: 17556458 NR Description: Putative cytoplasmic protein of eukaryotic origin kD) [Caenorhabditis elegans] >gi|13559783|gb|AAK29986.1|
  misc_feature (27)..(132): Homolog of NCBI NO: 27673864 NR Description: similar to hypothetical protein D11Ertd672e;
  misc_feature (27)..(112): Homolog of NCBI NO: 12835324 NR Description: unnamed protein product [Mus musculus]
  misc_feature (27)..(112): Homolog of NCBI NO: 15216179 NR Description: putative 42-9-9 protein [Mus musculus]
  misc_feature (27)..(112): Homolog of NCBI NO: 13386060 NR Description: hypothetical protein D11Ertd672e; putative 42-9-9 [Mus musculus] >gi|12841235|dbj|BAB25126.1| unnamed protein [Mus musculus] >gi|12850255|dbj|BAB28648.1| unnamed protein
  misc_feature (40)..(110): Homolog of NCBI NO: 39585269 NR Description: Hypothetical protein CBG00487 [Caenorhabditis
  misc_feature (21)..(132): Homolog of NCBI NO: 14249348 NR Description: hypothetical protein MGC14353 [Homo sapiens]
  misc_feature (39)..(112): Homolog of NCBI NO: 31233134 NR Description: ENSANGP00000010228 [Anopheles gambiae]
RRRRRKMTLKKVDANPSTLESSLQELKSDETSRSKINFILFLADNDPTTGQSWCPDCVRAEPVIYKTLEEFPEEVKLIRAYAGDRPTWRTPAHPWRVDSRFKLTGVPTLVRWDGDSVKGRLEDHQAHLPHLILPLLAPST

SEQ ID NO: 98846 - protein, 134 aa, Arabidopsis thaliana
  peptide (1)..(134): Ceres Seq. ID no. 13601597
  misc_feature (1)..(132): Pfam Name: Eukaryotic protein of unknown function (DUF953) Pfam Description: Eukaryotic protein of unknown function (DUF953)
  misc_feature (1)..(134): Homolog of NCBI NO: 18422261 NR Description: expressed protein [Arabidopsis thaliana] gene_id:MBD2.4~unknown protein [Arabidopsis thaliana] unknown protein [Arabidopsis thaliana]
  misc_feature (1)..(134): Homolog of NCBI NO: 21592399 NR Description: unknown [Arabidopsis thaliana]
  misc_feature (14)..(126): Homolog of NCBI NO: 17556458 NR Description: Putative cytoplasmic protein of eukaryotic origin kD) [Caenorhabditis elegans] >gi|13559783|gb|AAK29986.1|
  misc_feature (21)..(126): Homolog of NCBI NO: 27673864 NR Description: similar to hypothetical protein D11Ertd672e;
  misc_feature (21)..(106): Homolog of NCBI NO: 12835324 NR Description: unnamed protein product [Mus musculus]
  misc_feature (21)..(106): Homolog of NCBI NO: 15216179 NR Description: putative 42-9-9 protein [Mus musculus]
  misc_feature (21)..(106): Homolog of NCBI NO: 13386060 NR Description: hypothetical protein D11Ertd672e; putative 42-9-9 [Mus musculus] >gi|12841235|dbj|BAB25126.1| unnamed protein [Mus musculus] >gi|12850255|dbj|BAB28648.1| unnamed protein
  misc_feature (34)..(104): Homolog of NCBI NO: 39585269 NR Description: Hypothetical protein CBG00487 [Caenorhabditis
  misc_feature (15)..(126): Homolog of NCBI NO: 14249348 NR Description: hypothetical protein MGC14353 [Homo sapiens]
  misc_feature (33)..(106): Homolog of NCBI NO: 31233134 NR Description: ENSANGP00000010228 [Anopheles gambiae]
MTLKKVDANPSTLESSLQELKSDETSRSKINFILFLADNDPTTGQSWCPDCVRAEPVIYKTLEEFPEEVKLIRAYAGDRPTWRTPAHPWRVDSRFKLTGVPTLVRWDGDSVKGRLEDHQAHLPHLILPLLAPST

SEQ ID NO: 98847 - DNA, 2821 bp, Arabidopsis thaliana
  misc_feature (1)..(2821): Ceres Seq. ID no. 13601610
  misc_feature: MA Experiment ID: 20000171 Result: Down-regulated in Transcription
  misc_feature: MA Experiment 20000171 PARAMETER Experiment Name: At_42deg_Heat_P Parameter: Age (day) Value: 14
  misc_feature: MA Experiment 20000171 PARAMETER Experiment Name: At_42deg_Heat_P Parameter: Organism Value: A. thaliana
  misc_feature: MA Experiment 20000171 PARAMETER Experiment Name: At_42deg_Heat_P Parameter: Plant Line Value: WS
  misc_feature: MA Experiment 20000171 PARAMETER Experiment Name: At_42deg_Heat_P Parameter: Temperature (deg C) Value: 42 vs. 22
  misc_feature: MA Experiment 20000171 PARAMETER Experiment Name: At_42deg_Heat_P Parameter: Timepoint (hr) Value: 1
  misc_feature: MA Experiment 20000171 PARAMETER Experiment Name: At_42deg_Heat_P Parameter: Tissue Value: Aerial
  misc_feature: MA Experiment ID: 20000173 Result: Down-regulated in Transcription
  misc_feature: MA Experiment 20000173 PARAMETER Experiment Name: At_42deg_Heat_P Parameter: Age (day) Value: 14
  misc_feature: MA Experiment 20000173 PARAMETER Experiment Name: At_42deg_Heat_P Parameter: Organism Value: A. thaliana
  misc_feature: MA Experiment 20000173 PARAMETER Experiment Name: At_42deg_Heat_P Parameter: Plant Line Value: WS
  misc_feature: MA Experiment 20000173 PARAMETER Experiment Name: At_42deg_Heat_P Parameter: Temperature (deg C) Value: 42 vs. 22
  misc_feature: MA Experiment 20000173 PARAMETER Experiment Name: At_42deg_Heat_P Parameter: Timepoint (hr) Value: 6
  misc_feature: MA Experiment 20000173 PARAMETER Experiment Name: At_42deg_Heat_P Parameter: Tissue Value: Aerial
  misc_feature: MA Experiment ID: 20000182 Result: Up-regulated in Transcription
  misc_feature: MA Experiment 20000182 PARAMETER Experiment Name: At_2mM_SA_P Parameter: Age (day) Value: 14
  misc_feature: MA Experiment 20000182 PARAMETER Experiment Name: At_2mM_SA_P Parameter: Organism Value: A. thaliana
  misc_feature: MA Experiment 20000182 PARAMETER Experiment Name: At_2mM_SA_P Parameter: Plant Line Value: WS
  misc_feature: MA Experiment 20000182 PARAMETER Experiment Name: At_2mM_SA_P Parameter: Timepoint (hr) Value: 6
  misc_feature: MA Experiment 20000182 PARAMETER Experiment Name: At_2mM_SA_P Parameter: Tissue Value: Aerial
  misc_feature: MA Experiment 20000182 PARAMETER Experiment Name: At_2mM_SA_P Parameter: Treatment Value: 2mM SA vs. No Treatment
  misc_feature: MA Experiment ID: 20000185 Result: Down-regulated in Transcription
  misc_feature: MA Experiment 20000185 PARAMETER Experiment Name: At_Roots__P Parameter: Age (day) Value: 7 vs. 21
  misc_feature: MA Experiment 20000185 PARAMETER Experiment Name: At_Roots__P Parameter: Organism Value: A. thaliana
  misc_feature: MA Experiment 20000185 PARAMETER Experiment Name: At_Roots__P Parameter: Tissue Value: Roots vs. Whole Plant
  misc_feature: MA Experiment ID: 20000234 Result: Down-regulated in Transcription
  misc_feature: MA Experiment 20000234 PARAMETER Experiment Name: At_Siliques_P Parameter: Age (day) Value: 21
  misc_feature: MA Experiment 20000234 PARAMETER Experiment Name: At_Siliques_P Parameter: Organism Value: A. thaliana
  misc_feature: MA Experiment 20000234 PARAMETER Experiment Name: At_Siliques_P Parameter: Plant Line Value: WS
  misc_feature: MA Experiment 20000234 PARAMETER Experiment Name: At_Siliques_P Parameter: Tissue Value: Less Than 5mm Siliques vs. Whole Plant
  misc_feature: MA Experiment ID: 20000264 Result: Down-regulated in Transcription
  misc_feature: MA Experiment 20000264 PARAMETER Experiment Name: At_Open_Flower_P Parameter: Age (day) Value: 21
  misc_feature: MA Experiment 20000264 PARAMETER Experiment Name: At_Open_Flower_P Parameter: Plant Line Value: WS
  misc_feature: MA Experiment 20000264 PARAMETER Experiment Name: At_Open_Flower_P Parameter: Tissue Value: Open Flower vs. Whole Plant
  misc_feature: MA Experiment ID: 20000265 Result: Down-regulated in Transcription
  misc_feature: MA Experiment 20000265 PARAMETER Experiment Name: At_Open_Flower_P Parameter: Age (day) Value: 21
  misc_feature: MA Experiment 20000265 PARAMETER Experiment Name: At_Open_Flower_P Parameter: Plant Line Value: WS
  misc_feature: MA Experiment 20000265 PARAMETER Experiment Name: At_Open_Flower_P Parameter: Tissue Value: Closed Flower vs. Whole Plant
  misc_feature: MA Experiment ID: 20000286 Result: Down-regulated in Transcription
  misc_feature: MA Experiment 20000286 PARAMETER Experiment Name: At_Open_Flower_P Parameter: Age (day) Value: 21
  misc_feature: MA Experiment 20000286 PARAMETER Experiment Name: At_Open_Flower_P Parameter: Plant Line Value: WS
  misc_feature: MA Experiment 20000286 PARAMETER Experiment Name: At_Open_Flower_P Parameter: Tissue Value: Half Open vs. Whole Plant
  misc_feature: MA Experiment ID: 20000437 Result: Down-regulated in Transcription
  misc_feature: MA Experiment 20000437 PARAMETER Experiment Name: At_Drought_P Parameter: Age (day) Value: 8
  misc_feature: MA Experiment 20000437 PARAMETER Experiment Name: At_Drought_P Parameter: Organism Value: A. thaliana
  misc_feature: MA Experiment 20000437 PARAMETER Experiment Name: At_Drought_P Parameter: Plant Line Value: WS
  misc_feature: MA Experiment 20000437 PARAMETER Experiment Name: At_Drought_P Parameter: Timepoint (hr) Value: 24
  misc_feature: MA Experiment 20000437 PARAMETER Experiment Name: At_Drought_P Parameter: Tissue Value: Whole Plant
  misc_feature: MA Experiment 20000437 PARAMETER Experiment Name: At_Drought_P Parameter: Treatment Value: Drought vs. No Drought
  misc_feature: MA Experiment ID: 20000439 Result: Down-regulated in Transcription
  misc_feature: MA Experiment 20000439 PARAMETER Experiment Name: At_Roots__P Parameter: Age (day) Value: 14 vs. 21
  misc_feature: MA Experiment 20000439 PARAMETER Experiment Name: At_Roots__P Parameter: Organism Value: A. thaliana
  misc_feature: MA Experiment 20000439 PARAMETER Experiment Name: At_Roots__P Parameter: Tissue Value: Roots vs. Whole Plant
  misc_feature: MA Experiment ID: 20000441 Result: Up-regulated in Transcription
  misc_feature: MA Experiment 20000441 PARAMETER Experiment Name: At_1uM_BR-BRZ__P Parameter: Tissue Value: Shoot Apices
  misc_feature: MA Experiment 20000441 PARAMETER Experiment Name: At_1uM_BR-BRZ__P Parameter: Treatment Value: 1uM BR vs. No Treatment
  misc_feature: MA Experiment ID: 20000451 Result: Up-regulated in Transcription
  misc_feature: MA Experiment 20000451 PARAMETER Experiment Name: At_CS6879_Shoots-Roots_P Parameter: Age (day) Value: 14
  misc_feature: MA Experiment 20000451 PARAMETER Experiment Name: At_CS6879_Shoots-Roots_P Parameter: Organism Value: A. thaliana
  misc_feature: MA Experiment 20000451 PARAMETER Experiment Name: At_CS6879_Shoots-Roots_P Parameter: Plant Line Value: CS6879 vs. WS
  misc_feature: MA Experiment 20000451 PARAMETER Experiment Name: At_CS6879_Shoots-Roots_P Parameter: Tissue Value: Roots
  misc_feature: MA Experiment ID: 20000794 Result: Down-regulated in Transcription
  misc_feature: MA Experiment 20000794 PARAMETER Experiment Name: At_Petals_P Parameter: Age (day) Value: 23-25 days
  misc_feature: MA Experiment 20000794 PARAMETER Experiment Name: At_Petals_P Parameter: Plant Line Value: WS
  misc_feature: MA Experiment 20000794 PARAMETER Experiment Name: At_Petals_P Parameter: Tissue Value: Petals vs. Whole plant
  misc_feature: MA Experiment ID: 20001248 Result: Down-regulated in Transcription
  misc_feature: MA Experiment 20001248 PARAMETER Experiment Name: At_Far-red-induction_P Parameter: Age (day) Value: 7
  misc_feature: MA Experiment 20001248 PARAMETER Experiment Name: At_Far-red-induction_P Parameter: Light Value: Far-red vs. White
  misc_feature: MA Experiment 20001248 PARAMETER Experiment Name: At_Far-red-induction_P Parameter: Organism Value: A. thaliana
  misc_feature: MA Experiment 20001248 PARAMETER Experiment Name: At_Far-red-induction_P Parameter: Plant Line Value: Columbia
  misc_feature: MA Experiment 20001248 PARAMETER Experiment Name: At_Far-red-induction_P Parameter: Timepoint (hr) Value: 4
  misc_feature: MA Experiment 20001248 PARAMETER Experiment Name: At_Far-red-induction_P Parameter: Tissue Value: Whole Plant
  misc_feature: MA Experiment ID: 20001555 Result: Down-regulated in Transcription
  misc_feature: MA Experiment 20001555 PARAMETER Experiment Name: At_Drought_Soil_Dry_P Parameter: Age (day) Value: 24
  misc_feature: MA Experiment 20001555 PARAMETER Experiment Name: At_Drought_Soil_Dry_P Parameter: Organism Value: A. thaliana
  misc_feature: MA Experiment 20001555 PARAMETER Experiment Name: At_Drought_Soil_Dry_P Parameter: Plant Line Value: WS
  misc_feature: MA Experiment 20001555 PARAMETER Experiment Name: At_Drought_Soil_Dry_P Parameter: Post Timepoint (hr) Value: None
  misc_feature: MA Experiment 20001555 PARAMETER Experiment Name: At_Drought_Soil_Dry_P Parameter: Post-Treatment Value: None
  misc_feature: MA Experiment 20001555 PARAMETER Experiment Name: At_Drought_Soil_Dry_P Parameter: Timepoint (day) Value: 10
  misc_feature: MA Experiment 20001555 PARAMETER Experiment Name: At_Drought_Soil_Dry_P Parameter: Treatment Value: Drought vs. No Drought
  misc_feature: MA Experiment ID: 20001556 Result: Down-regulated in Transcription
  misc_feature: MA Experiment 20001556 PARAMETER Experiment Name: At_Drought_Soil_Dry_P Parameter: Age (day) Value: 26
  misc_feature: MA Experiment 20001556 PARAMETER Experiment Name: At_Drought_Soil_Dry_P Parameter: Organism Value: A. thaliana
  misc_feature: MA Experiment 20001556 PARAMETER Experiment Name: At_Drought_Soil_Dry_P Parameter: Plant Line Value: WS
  misc_feature: MA Experiment 20001556 PARAMETER Experiment Name: At_Drought_Soil_Dry_P Parameter: Post Timepoint (hr) Value: None
  misc_feature: MA Experiment 20001556 PARAMETER Experiment Name: At_Drought_Soil_Dry_P Parameter: Post-Treatment Value: None
  misc_feature: MA Experiment 20001556 PARAMETER Experiment Name: At_Drought_Soil_Dry_P Parameter: Timepoint (day) Value: 12
  misc_feature: MA Experiment 20001556 PARAMETER Experiment Name: At_Drought_Soil_Dry_P Parameter: Treatment Value: Drought vs. No Drought
  misc_feature: MA Experiment ID: 20001559 Result: Down-regulated in Transcription
  misc_feature: MA Experiment 20001559 PARAMETER Experiment Name: At_Drought_Soil_Dry_P Parameter: Age (day) Value: 28
  misc_feature: MA Experiment 20001559 PARAMETER Experiment Name: At_Drought_Soil_Dry_P Parameter: Organism Value: A. thaliana
  misc_feature: MA Experiment 20001559 PARAMETER Experiment Name: At_Drought_Soil_Dry_P Parameter: Plant Line Value: WS
  misc_feature: MA Experiment 20001559 PARAMETER Experiment Name: At_Drought_Soil_Dry_P Parameter: Post Timepoint (hr) Value: 29
  misc_feature: MA Experiment 20001559 PARAMETER Experiment Name: At_Drought_Soil_Dry_P Parameter: Post-Treatment Value: Re-Water vs. No Drought
  misc_feature: MA Experiment 20001559 PARAMETER Experiment Name: At_Drought_Soil_Dry_P Parameter: Timepoint (day) Value: 14
  misc_feature: MA Experiment 20001559 PARAMETER Experiment Name: At_Drought_Soil_Dry_P Parameter: Treatment Value: Drought vs. No Drought
  misc_feature: MA Experiment ID: 20001560 Result: Down-regulated in Transcription
  misc_feature: MA Experiment 20001560 PARAMETER Experiment Name: At_Drought_Soil_Dry_P Parameter: Age (day) Value: 28
  misc_feature: MA Experiment 20001560 PARAMETER Experiment Name: At_Drought_Soil_Dry_P Parameter: Organism Value: A. thaliana
  misc_feature: MA Experiment 20001560 PARAMETER Experiment Name: At_Drought_Soil_Dry_P Parameter: Plant Line Value: WS
  misc_feature: MA Experiment 20001560 PARAMETER Experiment Name: At_Drought_Soil_Dry_P Parameter: Post Timepoint (hr) Value: None
  misc_feature: MA Experiment 20001560 PARAMETER Experiment Name: At_Drought_Soil_Dry_P Parameter: Post-Treatment Value: None
  misc_feature: MA Experiment 20001560 PARAMETER Experiment Name: At_Drought_Soil_Dry_P Parameter: Timepoint (day) Value: 14
  misc_feature: MA Experiment 20001560 PARAMETER Experiment Name: At_Drought_Soil_Dry_P Parameter: Treatment Value: Drought vs. No Drought
  misc_feature: MA Experiment ID: 20001904 Result: Down-regulated in Transcription
  misc_feature: MA Experiment 20001904 PARAMETER Experiment Name: At_Drought_Reproduction_P Parameter: Age (day) Value: 37
  misc_feature: MA Experiment 20001904 PARAMETER Experiment Name: At_Drought_Reproduction_P Parameter: Organism Value: A. thaliana
  misc_feature: MA Experiment 20001904 PARAMETER Experiment Name: At_Drought_Reproduction_P Parameter: Plant Line Value: WS
  misc_feature: MA Experiment 20001904 PARAMETER Experiment Name: At_Drought_Reproduction_P Parameter: Timepoint (day) Value: 7
  misc_feature: MA Experiment 20001904 PARAMETER Experiment Name: At_Drought_Reproduction_P Parameter: Tissue Value: Rosettes
  misc_feature: MA Experiment 20001904 PARAMETER Experiment Name: At_Drought_Reproduction_P Parameter: Treatment Value: Drought vs. No Drought
  misc_feature: MA Experiment ID: 20001905 Result: Down-regulated in Transcription
  misc_feature: MA Experiment 20001905 PARAMETER Experiment Name: At_Drought_Reproduction_P Parameter: Age (day) Value: 40
  misc_feature: MA Experiment 20001905 PARAMETER Experiment Name: At_Drought_Reproduction_P Parameter: Organism Value: A. thaliana
  misc_feature: MA Experiment 20001905 PARAMETER Experiment Name: At_Drought_Reproduction_P Parameter: Plant Line Value: WS
  misc_feature: MA Experiment 20001905 PARAMETER Experiment Name: At_Drought_Reproduction_P Parameter: Timepoint (day) Value: 10
  misc_feature: MA Experiment 20001905 PARAMETER Experiment Name: At_Drought_Reproduction_P Parameter: Tissue Value: Rosettes
  misc_feature: MA Experiment 20001905 PARAMETER Experiment Name: At_Drought_Reproduction_P Parameter: Treatment Value: Drought vs. No Drought
  misc_feature: MA Experiment ID: 20001906 Result: Down-regulated in Transcription
  misc_feature: MA Experiment 20001906 PARAMETER Experiment Name: At_Drought_Reproduction_P Parameter: Age (day) Value: 35
  misc_feature: MA Experiment 20001906 PARAMETER Experiment Name: At_Drought_Reproduction_P Parameter: Organism Value: A. thaliana
  misc_feature: MA Experiment 20001906 PARAMETER Experiment Name: At_Drought_Reproduction_P Parameter: Plant Line Value: WS
  misc_feature: MA Experiment 20001906 PARAMETER Experiment Name: At_Drought_Reproduction_P Parameter: Timepoint (day) Value: 5
  misc_feature: MA Experiment 20001906 PARAMETER Experiment Name: At_Drought_Reproduction_P Parameter: Tissue Value: Siliques
  misc_feature: MA Experiment 20001906 PARAMETER Experiment Name: At_Drought_Reproduction_P Parameter: Treatment Value: Drought vs. No Drought
aaaattcttcaattctcttctcgtttttttttttttatcaattccaatgatctgtcacgttttagtaattttcactattctcgtttccgccgtcgtcgacgcaacggcgtcgtatgagcccactgatgtctttctcatcaattgcggcgatacctccaacaacatggactacagtggccggaactggacgacggagaatccgaaatttatgtcatcgaatgcagttgacgacgcgtcgttcacttcatctgcgtcataccaagaatcagggattcctcaagtgccgtacttgaaagctaggattttccgatatgatttcacttacagttttccagtctctcccggctggaaattcctccggttatacttttatccgacccgttacggatccgatttcgacgccgttaaatccttcttctccgtcaacgtcaaccgtttcactctcttgcataacttcagtgtaaaagcttccataccggagtcaagttctctaatcaaagagtttatcgttccggttaaccaaactcttgatctcacgttcacgccctctccgaattcattagctttcgttaacggaatcgagattatctccatgcctgaccggttttactcaaagggaggatttgacgacgttgtaagaaacgttggtagggacgttgacttcgagatagacaactccacggctttcgagaccgtttatcgggtaaacgtaggtggaaaagtggtgggcgacgtcggagattcgggaatgttccggcgttggctttccgatgaaggtttcttactcggtattaattcgggagccattccgaatataacaggtgtaaagatcaactacacggataaaactcccgcgtacgttgcgccggaagatgtatacacgacgtgtcgcctgatggggaacaaagacagtcctgagctaaacctgaatttcaacctgacgtggctctttgaagtcgatgccgggtttgcctatatagtgaggcttcatttctgtgagacgcaaccggaagtcaacaaaacgggtgaccgcgtcttctccatcttcttcggatatcaactggccatgcgtgaaatggacgtgtttcggctgagtggtggttttcggctaccgatgtatctagatttcaaggtacttgtcgacgccgacggaactagccagagacctagtcttcgagttgacttgacaccttacaaagaggactatccaacctattacgacgctattttgagtggtgtagagattctcaagctgagtaattctgatggtaatcttgcggggcttaatccaattcctcaactaagtccaccaccacaatctataacgccactaaaaggaaaaggcaagtcatcacatgttttgccaataataattgcagtggttggttctgcagttgcgctagcgttttttgttcttgttgttgtcctcgttgttatgaagagaaagaagaagagcaacgagtctagtgtagataccacgaacaagccttctacgaactcgtcatggggtcctcttctgcacgggacaggctctacaaatacaaaatctgcctcatctcttccatcagatctctgccgtcgattctccatctacgaaatcaaatccgccacaaatgatttcgaggaaaaactaatcataggagtaggcgggtttggttctgtctacaaaggacgaatagacggtggagccacacttgttgcggttaaacggctggaaattacatcgaaccaaggtgctaaagagttcgatacagagctcgagatgctttcaaagcttcgacatgtacacctcgtctctctaatcggatattgcgatgacgacaacgagatggtacttgtctatgagtatatgccacatggtacacttaaagatcatcttttcaggagagacaaggcctctgatcctccattgtcatggaaacgaaggctagagatttgcattggagcagctcgtggattacagtatcttcatactggagccaagtacacgatcatacatagagacatcaaaaccacaaacatacttctcgatgagaacttcgtcgctaaagtatctgactttggtttatcaagagttggtcctactagtgcttctcaaacgcatgtctccaccgtcgttaaaggaacgtttggttacttggatcccgagtactatcgccgtcaaatcttgaccgaaaaatccgacgtgtactcttttggagttgttctgttggaggttttgtgctgtagaccgatcagaatgcaaagtgttccaccggaacaagcagatttgatccgatgggtgaagtcaaatttcaataaaagaaccgttgatcagatcattgactcagatttaaccgctgatatcacttcgacctcgatggagaagttttgtgagatagccattagatgtgttcaagaccgtggtatggaacggccaccgatgaacgacgttgtttgggcgcttgagtttgctcttcagcttcacgagactgctaagaagaagaatgacaacgtggagtctctggatctaatgccaagtggtgaagttggtacgaccacggacggagaagatgacttgtttagtaggactacaggacacgttgggaaatcgaccacgaccgatgactctgttctagttgttggtgatgagaggagtggttcgagttggggagtattttcggagatcaatgaacctaaagcacggtagatttgatggcttggtaaacaagtatcacattctggttagggttgatatatatttgtgtatgtataattgttgaataaacacattattgtatttaaattacattttgatgattatttagcagcttaaatttag

SEQ ID NO: 98848 - protein, 895 aa, Arabidopsis thaliana
  peptide (1)..(895): Ceres Seq. ID no. 13601611
  misc_feature (21)..(895): Homolog of NCBI NO: 15230520 NR Description: protein kinase family [Arabidopsis thaliana]
  misc_feature (16)..(490): Homolog of NCBI NO: 15241610 NR Description: protein kinase family [Arabidopsis thaliana]
  misc_feature (513)..(851): Homolog of NCBI NO: 15241610 NR Description: protein kinase family [Arabidopsis thaliana]
  misc_feature (21)..(895): Homolog of NCBI NO: 14334760 NR Description: putative receptor-protein kinase [Arabidopsis
  misc_feature (16)..(490): Homolog of NCBI NO: 15241612 NR Description: protein kinase family [Arabidopsis thaliana]
  misc_feature (524)..(853): Homolog of NCBI NO: 15241612 NR Description: protein kinase family [Arabidopsis thaliana]
  misc_feature (20)..(853): Homolog of NCBI NO: 15229329 NR Description: protein kinase family [Arabidopsis thaliana]
  misc_feature (46)..(895): Homolog of NCBI NO: 15241880 NR Description: protein kinase family [Arabidopsis thaliana]
  misc_feature (457)..(890): Homolog of NCBI NO: 15234944 NR Description: protein kinase family [Arabidopsis thaliana]
  misc_feature (5)..(427): Homolog of NCBI NO: 15234944 NR Description: protein kinase family [Arabidopsis thaliana]
KFFNSLLVFFFLSIPMICHVLVIFTILVSAVVDATASYEPTDVFLINCGDTSNNMDYSGRNWTTENPKFMSSNAVDDASFTSSASYQESGIPQVPYLKARIFRYDFTYSFPVSPGWKFLRLYFYPTRYGSDFDAVKSFFSVNVNRFTLLHNFSVKASIPESSSLIKEFIVPVNQTLDLTFTPSPNSLAFVNGIEIISMPDRFYSKGGFDDVVRNVGRDVDFEIDNSTAFETVYRVNVGGKVVGDVGDSGMFRRWLSDEGFLLGINSGAIPNITGVKINYTDKTPAYVAPEDVYTTCRLMGNKDSPELNLNFNLTWLFEVDAGFAYIVRLHFCETQPEVNKTGDRVFSIFFGYQLAMREMDVFRLSGGFRLPMYLDFKVLVDADGTSQRPSLRVDLTPYKEDYPTYYDAILSGVEILKLSNSDGNLAGLNPIPQLSPPPQSITPLKGKGKSSHVLPIIIAVVGSAVALAFFVLVVVLVVMKRKKKSNESSVDTTNKPSTNSSWGPLLHGTGSTNTKSASSLPSDLCRRFSIYEIKSATNDFEEKLIIGVGGFGSVYKGRIDGGATLVAVKRLEITSNQGAKEFDTELEMLSKLRHVHLVSLIGYCDDDNEMVLVYEYMPHGTLKDHLFRRDKASDPPLSWKRRLEICIGAARGLQYLHTGAKYTIIHRDIKTTNILLDENFVAKVSDFGLSRVGPTSASQTHVSTVVKGTFGYLDPEYYRRQILTEKSDVYSFGVVLLEVLCCRPIRMQSVPPEQADLIRWVKSNFNKRTVDQIIDSDLTADITSTSMEKFCEIAIRCVQDRGMERPPMNDVVWALEFALQLHETAKKKNDNVESLDLMPSGEVGTTTDGEDDLFSRTTGHVGKSTTTDDSVLVVGDERSGSSWGVFSEINEPKAR

SEQ ID NO: 98849 - protein, 880 aa, Arabidopsis thaliana
  peptide (1)..(880): Ceres Seq. ID no. 13601612
  misc_feature (6)..(880): Homolog of NCBI NO: 15230520 NR Description: protein kinase family [Arabidopsis thaliana]
  misc_feature (1)..(475): Homolog of NCBI NO: 15241610 NR Description: protein kinase family [Arabidopsis thaliana]
  misc_feature (498)..(836): Homolog of NCBI NO: 15241610 NR Description: protein kinase family [Arabidopsis thaliana]
  misc_feature (6)..(880): Homolog of NCBI NO: 14334760 NR Description: putative receptor-protein kinase [Arabidopsis
  misc_feature (1)..(475): Homolog of NCBI NO: 15241612 NR Description: protein kinase family [Arabidopsis thaliana]
  misc_feature (509)..(838): Homolog of NCBI NO: 15241612 NR Description: protein kinase family [Arabidopsis thaliana]
  misc_feature (5)..(838): Homolog of NCBI NO: 15229329 NR Description: protein kinase family [Arabidopsis thaliana]
  misc_feature (31)..(880): Homolog of NCBI NO: 15241880 NR Description: protein kinase family [Arabidopsis thaliana]
  misc_feature (442)..(875): Homolog of NCBI NO: 15234944 NR Description: protein kinase family [Arabidopsis thaliana]
  misc_feature (1)..(412): Homolog of NCBI NO: 15234944 NR Description: protein kinase family [Arabidopsis thaliana]
MICHVLVIFTILVSAVVDATASYEPTDVFLINCGDTSNNMDYSGRNWTTENPKFMSSNAVDDASFTSSASYQESGIPQVPYLKARIFRYDFTYSFPVSPGWKFLRLYFYPTRYGSDFDAVKSFFSVNVNRFTLLHNFSVKASIPESSSLIKEFIVPVNQTLDLTFTPSPNSLAFVNGIEIISMPDRFYSKGGFDDVVRNVGRDVDFEIDNSTAFETVYRVNVGGKVVGDVGDSGMFRRWLSDEGFLLGINSGAIPNITGVKINYTDKTPAYVAPEDVYTTCRLMGNKDSPELNLNFNLTWLFEVDAGFAYIVRLHFCETQPEVNKTGDRVFSIFFGYQLAMREMDVFRLSGGFRLPMYLDFKVLVDADGTSQRPSLRVDLTPYKEDYPTYYDAILSGVEILKLSNSDGNLAGLNPIPQLSPPPQSITPLKGKGKSSHVLPIIIAVVGSAVALAFFVLVVVLVVMKRKKKSNESSVDTTNKPSTNSSWGPLLHGTGSTNTKSASSLPSDLCRRFSIYEIKSATNDFEEKLIIGVGGFGSVYKGRIDGGATLVAVKRLEITSNQGAKEFDTELEMLSKLRHVHLVSLIGYCDDDNEMVLVYEYMPHGTLKDHLFRRDKASDPPLSWKRRLEICIGAARGLQYLHTGAKYTIIHRDIKTTNILLDENFVAKVSDFGLSRVGPTSASQTHVSTVVKGTFGYLDPEYYRRQILTEKSDVYSFGVVLLEVLCCRPIRMQSVPPEQADLIRWVKSNFNKRTVDQIIDSDLTADITSTSMEKFCEIAIRCVQDRGMERPPMNDVVWALEFALQLHETAKKKNDNVESLDLMPSGEVGTTTDGEDDLFSRTTGHVGKSTTTDDSVLVVGDERSGSSWGVFSEINEPKAR

SEQ ID NO: 98850 - protein, 841 aa, Arabidopsis thaliana
  peptide (1)..(841): Ceres Seq. ID no. 13601613
  misc_feature (1)..(841): Homolog of NCBI NO: 15230520 NR Description: protein kinase family [Arabidopsis thaliana]
  misc_feature (1)..(436): Homolog of NCBI NO: 15241610 NR Description: protein kinase family [Arabidopsis thaliana]
  misc_feature (459)..(797): Homolog of NCBI NO: 15241610 NR Description: protein kinase family [Arabidopsis thaliana]
  misc_feature (1)..(841): Homolog of NCBI NO: 14334760 NR Description: putative receptor-protein kinase [Arabidopsis
  misc_feature (1)..(436): Homolog of NCBI NO: 15241612 NR Description: protein kinase family [Arabidopsis thaliana]
  misc_feature (470)..(799): Homolog of NCBI NO: 15241612 NR Description: protein kinase family [Arabidopsis thaliana]
  misc_feature (1)..(799): Homolog of NCBI NO: 15229329 NR Description: protein kinase family [Arabidopsis thaliana]
  misc_feature (1)..(841): Homolog of NCBI NO: 15241880 NR Description: protein kinase family [Arabidopsis thaliana]
  misc_feature (403)..(836): Homolog of NCBI NO: 15234944 NR Description: protein kinase family [Arabidopsis thaliana]
  misc_feature (1)..(373): Homolog of NCBI NO: 15234944 NR Description: protein kinase family [Arabidopsis thaliana]
MDYSGRNWTTENPKFMSSNAVDDASFTSSASYQESGIPQVPYLKARIFRYDFTYSFPVSPGWKFLRLYFYPTRYGSDFDAVKSFFSVNVNRFTLLHNFSVKASIPESSSLIKEFIVPVNQTLDLTFTPSPNSLAFVNGIEIISMPDRFYSKGGFDDVVRNVGRDVDFEIDNSTAFETVYRVNVGGKVVGDVGDSGMFRRWLSDEGFLLGINSGAIPNITGVKINYTDKTPAYVAPEDVYTTCRLMGNKDSPELNLNFNLTWLFEVDAGFAYIVRLHFCETQPEVNKTGDRVFSIFFGYQLAMREMDVFRLSGGFRLPMYLDFKVLVDADGTSQRPSLRVDLTPYKEDYPTYYDAILSGVEILKLSNSDGNLAGLNPIPQLSPPPQSITPLKGKGKSSHVLPIIIAVVGSAVALAFFVLVVVLVVMKRKKKSNESSVDTTNKPSTNSSWGPLLHGTGSTNTKSASSLPSDLCRRFSIYEIKSATNDFEEKLIIGVGGFGSVYKGRIDGGATLVAVKRLEITSNQGAKEFDTELEMLSKLRHVHLVSLIGYCDDDNEMVLVYEYMPHGTLKDHLFRRDKASDPPLSWKRRLEICIGAARGLQYLHTGAKYTIIHRDIKTTNILLDENFVAKVSDFGLSRVGPTSASQTHVSTVVKGTFGYLDPEYYRRQILTEKSDVYSFGVVLLEVLCCRPIRMQSVPPEQADLIRWVKSNFNKRTVDQIIDSDLTADITSTSMEKFCEIAIRCVQDRGMERPPMNDVVWALEFALQLHETAKKKNDNVESLDLMPSGEVGTTTDGEDDLFSRTTGHVGKSTTTDDSVLVVGDERSGSSWGVFSEINEPKAR

SEQ ID NO: 98851 - DNA, 1504 bp, Arabidopsis thaliana
  misc_feature (1)..(1504): Ceres Seq. ID no. 13601614
  misc_feature: MA Experiment ID: 108435 Result: Down-regulated in Transcription
  misc_feature: MA Experiment 108435 PARAMETER Experiment Name: At_stm_Mutants_cDNA_P Parameter: Plant Line Value: wt Landsburg vs stm
  misc_feature: MA Experiment 108435 PARAMETER Experiment Name: At_stm_Mutants_cDNA_P Parameter: Tissue Value: Shoot Apical Meristem Region
  misc_feature: MA Experiment ID: 108462 Result: Up-regulated in Transcription
  misc_feature: MA Experiment 108462 PARAMETER Experiment Name: At_Germinating_Seeds_cDNA_P Parameter: Age (day) Value: 2 vs. 0
  misc_feature: MA Experiment 108462 PARAMETER Experiment Name: At_Germinating_Seeds_cDNA_P Parameter: Tissue Value: Germinating Seeds
  misc_feature: MA Experiment ID: 108464 Result: Up-regulated in Transcription
  misc_feature: MA Experiment 108464 PARAMETER Experiment Name: At_Germinating_Seeds_cDNA_P Parameter: Age (day) Value: 4 vs. 0
  misc_feature: MA Experiment 108464 PARAMETER Experiment Name: At_Germinating_Seeds_cDNA_P Parameter: Tissue Value: Germinating Seeds
  misc_feature: MA Experiment ID: 108473 Result: Up-regulated in Transcription
  misc_feature: MA Experiment 108473 PARAMETER Experiment Name: At_Drought_Flowers_cDNA_P Parameter: Timepoint (hr) Value: 7 d
  misc_feature: MA Experiment 108473 PARAMETER Experiment Name: At_Drought_Flowers_cDNA_P Parameter: Tissue Value: Flower
  misc_feature: MA Experiment 108473 PARAMETER Experiment Name: At_Drought_Flowers_cDNA_P Parameter: Treatment Value: Drought vs. No Drought
  misc_feature: MA Experiment ID: 108488 Result: Up-regulated in Transcription
  misc_feature: MA Experiment ID: 108501 Result: Up-regulated in Transcription
  misc_feature: MA Experiment 108501 PARAMETER Experiment Name: At_ap2_floral_buds_cDNA_P Parameter: Plant Line Value: ap2 (Ler.)
  misc_feature: MA Experiment 108501 PARAMETER Experiment Name: At_ap2_floral_buds_cDNA_P Parameter: Tissue Value: Closed Flower
  misc_feature: MA Experiment ID: 108572 Result: Up-regulated in Transcription
  misc_feature: MA Experiment 108572 PARAMETER Experiment Name: At_Drought_cDNA_P Parameter: Timepoint (hr) Value: 1
  misc_feature: MA Experiment 108572 PARAMETER Experiment Name: At_Drought_cDNA_P Parameter: Tissue Value: Aerial
  misc_feature: MA Experiment 108572 PARAMETER Experiment Name: At_Drought_cDNA_P Parameter: Treatment Value: Drought vs. No Drought
  misc_feature: MA Experiment ID: 108573 Result: Up-regulated in Transcription
  misc_feature: MA Experiment 108573 PARAMETER Experiment Name: At_Drought_cDNA_P Parameter: Timepoint (hr) Value: 6
  misc_feature: MA Experiment 108573 PARAMETER Experiment Name: At_Drought_cDNA_P Parameter: Tissue Value: Aerial
  misc_feature: MA Experiment 108573 PARAMETER Experiment Name: At_Drought_cDNA_P Parameter: Treatment Value: Drought vs. No Drought
  misc_feature: MA Experiment ID: 108579 Result: Up-regulated in Transcription
  misc_feature: MA Experiment 108579 PARAMETER Experiment Name: At_4deg_Cold_cDNA_P Parameter: Temperature (deg C) Value: 4 vs. 22
  misc_feature: MA Experiment 108579 PARAMETER Experiment Name: At_4deg_Cold_cDNA_P Parameter: Timepoint (hr) Value: 6
  misc_feature: MA Experiment 108579 PARAMETER Experiment Name: At_4deg_Cold_cDNA_P Parameter: Tissue Value: Aerial
  misc_feature: MA Experiment ID: 108594 Result: Up-regulated in Transcription
  misc_feature: MA Experiment 108594 PARAMETER Experiment Name: At_Ler-rhl_Root_cDNA_P Parameter: Plant Line Value: null
  misc_feature: MA Experiment ID: 108595 Result: Down-regulated in Transcription
  misc_feature: MA Experiment 108595 PARAMETER Experiment Name: At_Ler-pi_Ovule_cDNA_P Parameter: Plant Line Value: null
  misc_feature: MA Experiment ID: 108608 Result: Down-regulated in Transcription
  misc_feature: MA Experiment 108608 PARAMETER Experiment Name: At_100uM_ABA_cDNA_P Parameter: Timepoint (hr) Value: 1
  misc_feature: MA Experiment 108608 PARAMETER Experiment Name: At_100uM_ABA_cDNA_P Parameter: Tissue Value: Aerial
  misc_feature: MA Experiment 108608 PARAMETER Experiment Name: At_100uM_ABA_cDNA_P Parameter: Treatment Value: 100uM ABA vs. No Treatment
  misc_feature: MA Experiment ID: 20000069 Result: Down-regulated in Transcription
  misc_feature: MA Experiment 20000069 PARAMETER Experiment Name: At_100uM_ABA_Mutants_cDNA_P Parameter: Plant Line Value: CS23
  misc_feature: MA Experiment 20000069 PARAMETER Experiment Name: At_100uM_ABA_Mutants_cDNA_P Parameter: Timepoint (hr) Value: 6
  misc_feature: MA Experiment 20000069 PARAMETER Experiment Name: At_100uM_ABA_Mutants_cDNA_P Parameter: Tissue Value: Aerial
  misc_feature: MA Experiment 20000069 PARAMETER Experiment Name: At_100uM_ABA_Mutants_cDNA_P Parameter: Treatment Value: 100uM ABA vs. No Treatment
  misc_feature: MA Experiment ID: 20000070 Result: Down-regulated in Transcription
  misc_feature: MA Experiment 20000070 PARAMETER Experiment Name: At_100uM_ABA_Mutants_cDNA_P Parameter: Plant Line Value: CS24
  misc_feature: MA Experiment 20000070 PARAMETER Experiment Name: At_100uM_ABA_Mutants_cDNA_P Parameter: Timepoint (hr) Value: 6
  misc_feature: MA Experiment 20000070 PARAMETER Experiment Name: At_100uM_ABA_Mutants_cDNA_P Parameter: Tissue Value: Aerial
  misc_feature: MA Experiment 20000070 PARAMETER Experiment Name: At_100uM_ABA_Mutants_cDNA_P Parameter: Treatment Value: 100uM ABA vs. No Treatment
  misc_feature: MA Experiment ID: 20000071 Result: Down-regulated in Transcription
  misc_feature: MA Experiment 20000071 PARAMETER Experiment Name: At_100uM_ABA_Mutants_cDNA_P Parameter: Plant Line Value: CS8104
  misc_feature: MA Experiment 20000071 PARAMETER Experiment Name: At_100uM_ABA_Mutants_cDNA_P Parameter: Timepoint (hr) Value: 6
  misc_feature: MA Experiment 20000071 PARAMETER Experiment Name: At_100uM_ABA_Mutants_cDNA_P Parameter: Tissue Value: Aerial
  misc_feature: MA Experiment 20000071 PARAMETER Experiment Name: At_100uM_ABA_Mutants_cDNA_P Parameter: Treatment Value: 100uM ABA vs. No Treatment
  misc_feature: MA Experiment ID: 20000086 Result: Down-regulated in Transcription
  misc_feature: MA Experiment 20000086 PARAMETER Experiment Name: At_100uM_ABA_Mutants_cDNA_P Parameter: Plant Line Value: CS22
  misc_feature: MA Experiment 20000086 PARAMETER Experiment Name: At_100uM_ABA_Mutants_cDNA_P Parameter: Timepoint (hr) Value: 6
  misc_feature: MA Experiment 20000086 PARAMETER Experiment Name: At_100uM_ABA_Mutants_cDNA_P Parameter: Tissue Value: Aerial
  misc_feature: MA Experiment 20000086 PARAMETER Experiment Name: At_100uM_ABA_Mutants_cDNA_P Parameter: Treatment Value: 100uM ABA vs. No Treatment
  misc_feature: MA Experiment ID: 20000087 Result: Down-regulated in Transcription
  misc_feature: MA Experiment 20000087 PARAMETER Experiment Name: At_100uM_ABA_Mutants_cDNA_P Parameter: Plant Line Value: WS
  misc_feature: MA Experiment 20000087 PARAMETER Experiment Name: At_100uM_ABA_Mutants_cDNA_P Parameter: Timepoint (hr) Value: 6
  misc_feature: MA Experiment 20000087 PARAMETER Experiment Name: At_100uM_ABA_Mutants_cDNA_P Parameter: Tissue Value: Aerial
  misc_feature: MA Experiment 20000087 PARAMETER Experiment Name: At_100uM_ABA_Mutants_cDNA_P Parameter: Treatment Value: 100uM ABA vs. No Treatment
  misc_feature: MA Experiment ID: 20000089 Result: Down-regulated in Transcription
  misc_feature: MA Experiment ID: 20000113 Result: Up-regulated in Transcription
  misc_feature: MA Experiment 20000113 PARAMETER Experiment Name: At_42deg_Heat_cDNA_P Parameter: Temperature (deg C) Value: 42 vs. 22
  misc_feature: MA Experiment 20000113 PARAMETER Experiment Name: At_42deg_Heat_cDNA_P Parameter: Timepoint (hr) Value: 8
  misc_feature: MA Experiment 20000113 PARAMETER Experiment Name: At_42deg_Heat_cDNA_P Parameter: Tissue Value: Aerial
  misc_feature: MA Experiment ID: 20000117 Result: Down-regulated in Transcription
  misc_feature: MA Experiment 20000117 PARAMETER Experiment Name: At_100uM_ABA_Mutants_cDNA_P Parameter: Plant Line Value: Columbia
  misc_feature: MA Experiment 20000117 PARAMETER Experiment Name: At_100uM_ABA_Mutants_cDNA_P Parameter: Timepoint (hr) Value: 6
  misc_feature: MA Experiment 20000117 PARAMETER Experiment Name: At_100uM_ABA_Mutants_cDNA_P Parameter: Tissue Value: Aerial
  misc_feature: MA Experiment 20000117 PARAMETER Experiment Name: At_100uM_ABA_Mutants_cDNA_P Parameter: Treatment Value: 100uM ABA vs. No Treatment
  misc_feature: MA Experiment ID: 20000314 Result: Down-regulated in Transcription
  misc_feature: MA Experiment 20000314 PARAMETER Experiment Name: At_14day_Shoots-Roots_Sub_P Parameter: Age (day) Value: 14
  misc_feature: MA Experiment 20000314 PARAMETER Experiment Name: At_14day_Shoots-Roots_Sub_P Parameter: Organism Value: A. thaliana
  misc_feature: MA Experiment 20000314 PARAMETER Experiment Name: At_14day_Shoots-Roots_Sub_P Parameter: Plant Line Value: WS
  misc_feature: MA Experiment 20000314 PARAMETER Experiment Name: At_14day_Shoots-Roots_Sub_P Parameter: Tissue Value: Roots vs. Whole Plant
  misc_feature: MA Experiment ID: 20000315 Result: Up-regulated in Transcription
  misc_feature: MA Experiment 20000315 PARAMETER Experiment Name: At_14day_Shoots-Roots_Sub_P Parameter: Age (day) Value: 14
  misc_feature: MA Experiment 20000315 PARAMETER Experiment Name: At_14day_Shoots-Roots_Sub_P Parameter: Organism Value: A. thaliana
  misc_feature: MA Experiment 20000315 PARAMETER Experiment Name: At_14day_Shoots-Roots_Sub_P Parameter: Plant Line Value: WS
  misc_feature: MA Experiment 20000315 PARAMETER Experiment Name: At_14day_Shoots-Roots_Sub_P Parameter: Tissue Value: Shoots vs. Whole Plant
  misc_feature: MA Experiment ID: 20000355 Result: Down-regulated in Transcription
  misc_feature: MA Experiment 20000355 PARAMETER Experiment Name: At_Siliques_Sub_P Parameter: Age (day) Value: 21
  misc_feature: MA Experiment 20000355 PARAMETER Experiment Name: At_Siliques_Sub_P Parameter: Organism Value: A. thaliana
  misc_feature: MA Experiment 20000355 PARAMETER Experiment Name: At_Siliques_Sub_P Parameter: Plant Line Value: WS
  misc_feature: MA Experiment 20000355 PARAMETER Experiment Name: At_Siliques_Sub_P Parameter: Tissue Value: Less Than 5mm Siliques vs. Whole Plant
  misc_feature: MA Experiment ID: 20000440 Result: Down-regulated in Transcription
  misc_feature: MA Experiment 20000440 PARAMETER Experiment Name: At_Closed-Flower__Sub_P Parameter: Tissue Value: Closed Flower vs. Whole Plant
cttaccacaagattgttggagaaatggtttcatcacttaacatcatcgaagtggcacgagtcaccccttcaaactctgactcggccgagtcactcagtctcccactcacttatttcgaccttatctattataaacttcgcgccgtcgaacgagtcatcttctaccgaatcaccaacgtaactcgccctttctttgactcagtcatcgtcccaaatctcaaaacctctctatcctcatgcctctctcactatctcccactcgctggcaaacttatatgggaaccacttgatcacaaaccaaccattgtctactcccaaaacgacgacgtttcattcagcgtcgccgaaacaaacgctgatttctctagtttatccggcaatgaaccattcccctccaccgagttgtacccgttagtccccgcgttacaaagctccgacgactcggcctccattgtgtcgttccaagtcacgttatttccaaaccaaggattttgcatcggcgtaagtgcacatcatgccgttttagatggaaaaacgacaaccatgtttctcaaatcctgggctcacatatgtaaacatcaagatttttctctaccgcaggatttaatcccaacttacgatcgtacggtcattaaaagtccaacggatagtgaaaacaaagttttgaatgagtggcgctctttcaccaaaatattagctggtggtaaagaacctgccaaccccaagagtttaaagcttaatccatcatttgagattggtcctgacgttgtccgatacactctccagctcacgcgtgaagatatccaaacgcttcgcgagagacttaagagagaagtttcctcctcctcctcctcaacctcatcctcaaaagagcttcgcttgtctacatttgttattgtttactcgtatgtattagtatgcataataagagctcgaggcggggaaccacatagaccggttggatatgcgttttcggtggattgtcgaagcctcatgaatccgccgactccaaattattttggaaattgcatcgctggttgctctagaatgatgctgacggcaaaaatgtttatgggtgaagaaggacttttggctgctgcgacaatggtcagcgattcgatcgaagaatgggacgagagttttgcgtggaagattccggattttgtagcatatgcaactcttccaccagagacacaacttattttagtttcagggtctaaccgatttggagtatacgagttggattttgggtggggtagacctgataaagtgatggttgtgtcgatcagtccaggcaatgggatttccatggcggaaagtagagaccaaaacggcagtgtggagattggcttctcactcaagaagcacgaaatggacacattgattgatttgcttcattgtgaactaactatttaaataaacttttctttacatgaataaaattgattctctaaacaatatctttaaaacgataacaccaacttatctaatcaaattatttttag

SEQ ID NO: 98852 - protein, 470 aa, Arabidopsis thaliana
  peptide (1)..(470): Ceres Seq. ID no. 13601615
  misc_feature (10)..(469): Pfam Name: Transferase family Pfam Description: Transferase family
  misc_feature (8)..(470): Homolog of NCBI NO: 15241631 NR Description: transferase family [Arabidopsis thaliana]
  misc_feature (8)..(470): Homolog of NCBI NO: 21593292 NR Description: acyltransferase-like protein [Arabidopsis
  misc_feature (7)..(465): Homolog of NCBI NO: 15450469 NR Description: AT5g39050/MXF12_60 [Arabidopsis thaliana]
  misc_feature (7)..(465): Homolog of NCBI NO: 10177550 NR Description: anthocyanin acyltransferase-like protein
  misc_feature (7)..(346): Homolog of NCBI NO: 18421824 NR Description: transferase family [Arabidopsis thaliana]
  misc_feature (8)..(465): Homolog of NCBI NO: 15241632 NR Description: transferase family [Arabidopsis thaliana]
  misc_feature (11)..(463): Homolog of NCBI NO: 15230034 NR Description: transferase family [Arabidopsis thaliana]
  misc_feature (11)..(465): Homolog of NCBI NO: 15230048 NR Description: transferase family [Arabidopsis thaliana]
  misc_feature (11)..(470): Homolog of NCBI NO: 15230049 NR Description: transferase family [Arabidopsis thaliana]
  misc_feature (11)..(465): Homolog of NCBI NO: 15240152 NR Description: transferase family [Arabidopsis thaliana]
YHKIVGEMVSSLNIIEVARVTPSNSDSAESLSLPLTYFDLIYYKLRAVERVIFYRITNVTRPFFDSVIVPNLKTSLSSCLSHYLPLAGKLIWEPLDHKPTIVYSQNDDVSFSVAETNADFSSLSGNEPFPSTELYPLVPALQSSDDSASIVSFQVTLFPNQGFCIGVSAHHAVLDGKTTTMFLKSWAHICKHQDFSLPQDLIPTYDRTVIKSPTDSENKVLNEWRSFTKILAGGKEPANPKSLKLNPSFEIGPDVVRYTLQLTREDIQTLRERLKREVSSSSSSTSSSKELRLSTFVIVYSYVLVCIIRARGGEPHRPVGYAFSVDCRSLMNPPTPNYFGNCIAGCSRMMLTAKMFMGEEGLLAAATMVSDSIEEWDESFAWKIPDFVAYATLPPETQLILVSGSNRFGVYELDFGWGRPDKVMVVSISPGNGISMAESRDQNGSVEIGFSLKKHEMDTLIDLLHCELTI

SEQ ID NO: 98853 - protein, 463 aa, Arabidopsis thaliana; identical to SEQ ID NO: 24175
  peptide (1)..(463): Ceres Seq. ID no. 13601616
  misc_feature (3)..(462): Pfam Name: Transferase family Pfam Description: Transferase family
  misc_feature (1)..(463): Homolog of NCBI NO: 15241631 NR Description: transferase family [Arabidopsis thaliana]
  misc_feature (1)..(463): Homolog of NCBI NO: 21593292 NR Description: acyltransferase-like protein [Arabidopsis
  misc_feature (1)..(458): Homolog of NCBI NO: 15450469 NR Description: AT5g39050/MXF12_60 [Arabidopsis thaliana]
  misc_feature (1)..(458): Homolog of NCBI NO: 10177550 NR Description: anthocyanin acyltransferase-like protein
  misc_feature (1)..(339): Homolog of NCBI NO: 18421824 NR Description: transferase family [Arabidopsis thaliana]
  misc_feature (1)..(458): Homolog of NCBI NO: 15241632 NR Description: transferase family [Arabidopsis thaliana]
  misc_feature (4)..(456): Homolog of NCBI NO: 15230034 NR Description: transferase family [Arabidopsis thaliana]
  misc_feature (4)..(458): Homolog of NCBI NO: 15230048 NR Description: transferase family [Arabidopsis thaliana]
  misc_feature (4)..(463): Homolog of NCBI NO: 15230049 NR Description: transferase family [Arabidopsis thaliana]
  misc_feature (4)..(458): Homolog of NCBI NO: 15240152 NR Description: transferase family [Arabidopsis thaliana]

SEQ ID NO: 98854 - protein, 290 aa, Arabidopsis thaliana; identical to SEQ ID NO: 24176
  peptide (1)..(290): Ceres Seq. ID no. 13601617
  misc_feature (1)..(289): Pfam Name: Transferase family Pfam Description: Transferase family
  misc_feature (1)..(290): Homolog of NCBI NO: 15241631 NR Description: transferase family [Arabidopsis thaliana]
  misc_feature (1)..(290): Homolog of NCBI NO: 21593292 NR Description: acyltransferase-like protein [Arabidopsis
  misc_feature (1)..(285): Homolog of NCBI NO: 15450469 NR Description: AT5g39050/MXF12_60 [Arabidopsis thaliana]
  misc_feature (1)..(285): Homolog of NCBI NO: 10177550 NR Description: anthocyanin acyltransferase-like protein
  misc_feature (1)..(166): Homolog of NCBI NO: 18421824 NR Description: transferase family [Arabidopsis thaliana]
  misc_feature (1)..(285): Homolog of NCBI NO: 15241632 NR Description: transferase family [Arabidopsis thaliana]
  misc_feature (1)..(283): Homolog of NCBI NO: 15230034 NR Description: transferase family [Arabidopsis thaliana]
  misc_feature (1)..(285): Homolog of NCBI NO: 15230048 NR Description: transferase family [Arabidopsis thaliana]
  misc_feature (1)..(290): Homolog of NCBI NO: 15230049 NR Description: transferase family [Arabidopsis thaliana]
  misc_feature (1)..(285): Homolog of NCBI NO: 15240152 NR Description: transferase family [Arabidopsis thaliana]

SEQ ID NO: 98855 - DNA, 772 bp, Arabidopsis thaliana
  misc_feature (1)..(772): Ceres Seq. ID no. 13601645
  misc_feature: MA Experiment ID: 20000227 Result: Up-regulated in Transcription
  misc_feature: MA Experiment 20000227 PARAMETER Experiment Name: At_Root-Tips-vs-Tops_P Parameter: Tissue Value: Root Tips vs. Root Tops
  misc_feature: MA Experiment ID: 20001451 Result: Up-regulated in Transcription
  misc_feature: MA Experiment 20001451 PARAMETER Experiment Name: At_Far-red-induction_P Parameter: Age (day) Value: 7
  misc_feature: MA Experiment 20001451 PARAMETER Experiment Name: At_Far-red-induction_P Parameter: Light Value: Far-red vs. White
  misc_feature: MA Experiment 20001451 PARAMETER Experiment Name: At_Far-red-induction_P Parameter: Organism Value: A. thaliana
  misc_feature: MA Experiment 20001451 PARAMETER Experiment Name: At_Far-red-induction_P Parameter: Plant Line Value: Columbia
  misc_feature: MA Experiment 20001451 PARAMETER Experiment Name: At_Far-red-induction_P Parameter: Timepoint (hr) Value: 24
  misc_feature: MA Experiment 20001451 PARAMETER Experiment Name: At_Far-red-induction_P Parameter: Tissue Value: Whole Plant
  misc_feature: MA Experiment ID: 20001905 Result: Down-regulated in Transcription
  misc_feature: MA Experiment 20001905 PARAMETER Experiment Name: At_Drought_Reproduction_P Parameter: Age (day) Value: 40
  misc_feature: MA Experiment 20001905 PARAMETER Experiment Name: At_Drought_Reproduction_P Parameter: Organism Value: A. thaliana
  misc_feature: MA Experiment 20001905 PARAMETER Experiment Name: At_Drought_Reproduction_P Parameter: Plant Line Value: WS
  misc_feature: MA Experiment 20001905 PARAMETER Experiment Name: At_Drought_Reproduction_P Parameter: Timepoint (day) Value: 10
  misc_feature: MA Experiment 20001905 PARAMETER Experiment Name: At_Drought_Reproduction_P Parameter: Tissue Value: Rosettes
  misc_feature: MA Experiment 20001905 PARAMETER Experiment Name: At_Drought_Reproduction_P Parameter: Treatment Value: Drought vs. No Drought
accttcacttaacacagcagaaaccctttcttcagtcttctcctgcgttctccttcttcacttcccaactaaatctcgccggacgatcgtaaccggagagcttccgtcgaccggtcaagtgtttgatatctaaagaagatgttgaagtttctatcaaaagtaagaattgagttcaacacattagatccaagacttgcgtcttgtgttgaattcttagctcaatgcaatgcaaggaaggccaaagaatcgaatcccaattgtcaggttttggtgaaacgtagaaccgatgagcagccgccgcagatcactgtcacttttgttaatggtgttgaggaagcttttgatgcagctgcaacctcggctcagtcgattagaaagatgattcttgataaaggtcagtatcttgagacagagcaaatgtttcgtgaagctggagaacaatggcctgtgattatccctgatgaagaacttctccaagaggctcctggtgttaagccgagaaaagcagaagacaagaagtgatgctgcaccaagcacgatcaatatctcttggtgtaatctcattgatttgacaaatctagcttttcggaatgtaagatcgtttgctgtgtgcaactcgatatgtgtctcaagcttagggtttcgactgatagatttgtattgttttcttgtttatgtgaaccgcaatggatgaacttttggtcaggaaccgggactatgacactgttatggaagctattgaagctctgggaataaaaaccaatttttatag

SEQ ID NO: 98856 - protein, 127 aa, Arabidopsis thaliana; identical to SEQ ID NO: 47616
  peptide (1)..(127): Ceres Seq. ID no. 13601646
  misc_feature (1)..(127): Homolog of NCBI NO: 15241817 NR Description: expressed protein [Arabidopsis thaliana] Unknown protein [Arabidopsis thaliana]
  misc_feature (1)..(119): Homolog of NCBI NO: 9758335 NR Description: gene_id:MIJ24.9~unknown protein [Arabidopsis
  misc_feature (1)..(127): Homolog of NCBI NO: 27450530 NR Description: hypothetical protein [Prunus persica]

SEQ ID NO: 98857 - protein, 77 aa, Arabidopsis thaliana
  peptide (1)..(77): Ceres Seq. ID no. 13601647
MKNFSKRLLVLSREKQKTRSDAAPSTINISWCNLIDLTNLAFRNVRSFAVCNSICVSSLGFRLIDLYCFLVYVNRNG

SEQ ID NO: 98858 - DNA, 1745 bp, Arabidopsis thaliana
  misc_feature (1)..(1745): Ceres Seq. ID no. 13601656
  misc_feature: MA Experiment ID: 20001557 Result: Up-regulated in Transcription
  misc_feature: MA Experiment 20001557 PARAMETER Experiment Name: At_Drought_Soil_Dry_P Parameter: Age (day) Value: 27
  misc_feature: MA Experiment 20001557 PARAMETER Experiment Name: At_Drought_Soil_Dry_P Parameter: Organism Value: A. thaliana
  misc_feature: MA Experiment 20001557 PARAMETER Experiment Name: At_Drought_Soil_Dry_P Parameter: Plant Line Value: WS
  misc_feature: MA Experiment 20001557 PARAMETER Experiment Name: At_Drought_Soil_Dry_P Parameter: Post Timepoint (hr) Value: 3
  misc_feature: MA Experiment 20001557 PARAMETER Experiment Name: At_Drought_Soil_Dry_P Parameter: Post-Treatment Value: Re-Water vs. No Drought
  misc_feature: MA Experiment 20001557 PARAMETER Experiment Name: At_Drought_Soil_Dry_P Parameter: Timepoint (day) Value: 13
  misc_feature: MA Experiment 20001557 PARAMETER Experiment Name: At_Drought_Soil_Dry_P Parameter: Treatment Value: Drought vs. No Drought
acggttccttctcttctctctctctctttctccgtctgtcgctgtctctctcgtcctctcctctgtttcgtagcttctgcagcagatctctctttgtccttctctctccctcagatcactatggcacagcaggaagctagtccttcccctggtgctgaggttgttggtcgtgcctttgtggagcaatactatcatattcttcaccaatctcccggtttagttcatcggttttatcaagattcgagctttttaacccgacctgatgttaccggtgctgtgactactgtcacaactatgcaagcgatcaacgacaagattctgtcgttgaaatatgaagactacacggctgagatagaaactgctgatgctcaggagtctcatgagagaggtgttattgtgctggttacaggacgcttaaccgggaacgataatgttaggaagaagtttagtcaatcttttttcttggctccacaagacaaaggatactttgtcttaaacgacgtgtttcgattccttgaggagaaagaggtgactgcacaagcccgctctgtccccatcaatggaaccactagggatgttcaggctcctattgaaccagaacgtgttgttgttagtcacgagcccgaggtagaacccgagccagttgcttctatcgaggaagaagatcttgacaatgtggcggaagtgtatgatccttctgataaagatgaaggagttgttgttgacgttgagcctattgaacctcccactcaaataagtcataatgaaatcttatcagtgcctcaaggagatgctcctaagcattcttatgcttcaatcctcaagcagatgaaaagcagtccagcaccaacaacacacgttgctagaaacaagccaagaccagctccagtcaaccagaagctgaccgcgcctcctgctgagcctgcagcaagacccgaggcttcagctcatgagaatgttccgaatagtagccatgttgatgtggaagatgatggtcattcgatttatgttcgaaatttgccgtttgactccacaccaacacaacttgaagaggtgttcaagaactttggtgcaatcaagcatgaggggattcaagtcagaagcaacaagcagcaaggtttctgttttggttttgtggaatttgaaacatctagcggaaagcaaagtgccctcgaggcctcaccagttacaattggagatcgtcaagctgttgtagaggagaagaaaacaaatagtcgaggaggaggcaacaatggaggtagcaggggaaggtacttttccggaagaggaagtttccgaaatgaaagcttcaaaggaggacgcggtggtgggggaagaggaggctatggaagaggaggaggtgagttttctggtagaccaaagagctcaaacccacgaaatggaggagaaggttaccaaagggttcctcaaaacggaggaggtggaagaggaggccgcggagaaggaggtcgtggtggagctcgaggtggtggttcatcttgactttgcttttaacgctcctctacaagagagtagttttaatttttgttttgcgtctttctttttgcctactacttgagttgatgtggtattggcttttttgtcggtctagtttttcaatattcttgctttttttcctctcttttttgtttttcatctttcaatctttctttggggtaatgtactcttcataaacaaacattcaatttcataaggaatccattatagagttgtgttctttacgc

SEQ ID NO: 98859 - protein, 500 aa, Arabidopsis thaliana; identical to SEQ ID NO: 42649
  peptide (1)..(500): Ceres Seq. ID no. 13601657
  misc_feature (55)..(171): Pfam Name: Nuclear transport factor 2 (NTF2) domain Pfam Description: Nuclear transport factor 2 (NTF2) domain
  misc_feature (41)..(500): Homolog of NCBI NO: 30697455 NR Description: NTF2-containing RNA-binding protein, putative
  misc_feature (41)..(500): Homolog of NCBI NO: 30697452 NR Description: NTF2-containing RNA-binding protein, putative
  misc_feature (41)..(500): Homolog of NCBI NO: 21553535 NR Description: ras-GTPase-activating protein SH3-domain binding
  misc_feature (42)..(500): Homolog of NCBI NO: 30687772 NR Description: NTF2-containing RNA-binding protein, putative thaliana] >gi|17979475|gb|AAL50074.1| AT3g25150/MJL12_9 thaliana] >gi|21360395|gb|AAM47313.1| AT3g25150/MJL12_9
  misc_feature (55)..(500): Homolog of NCBI NO: 9294171 NR Description: RNA-binding protein-like [Arabidopsis thaliana]
  misc_feature (41)..(498): Homolog of NCBI NO: 31126693 NR Description: putative GAP SH3 binding protein [Oryza sativa
  misc_feature (41)..(473): Homolog of NCBI NO: 18394029 NR Description: NTF2-containing RNA-binding protein, putative
  misc_feature (180)..(490): Homolog of NCBI NO: 21742151 NR Description: OSJNBa0069D17.2 [Oryza sativa (japonica
  misc_feature (37)..(307): Homolog of NCBI NO: 21742151 NR Description: OSJNBa0069D17.2 [Oryza sativa (japonica
  misc_feature (427)..(497): Homolog of NCBI NO: 21742151 NR Description: OSJNBa0069D17.2 [Oryza sativa (japonica

SEQ ID NO: 98860 - protein, 460 aa, Arabidopsis thaliana; identical to SEQ ID NO: 42650
  peptide (1)..(460): Ceres Seq. ID no. 13601658
  misc_feature (15)..(131): Pfam Name: Nuclear transport factor 2 (NTF2) domain Pfam Description: Nuclear transport factor 2 (NTF2) domain
  misc_feature (1)..(460): Homolog of NCBI NO: 30697455 NR Description: NTF2-containing RNA-binding protein, putative
  misc_feature (1)..(460): Homolog of NCBI NO: 30697452 NR Description: NTF2-containing RNA-binding protein, putative
  misc_feature (1)..(460): Homolog of NCBI NO: 21553535 NR Description: ras-GTPase-activating protein SH3-domain binding
  misc_feature (2)..(460): Homolog of NCBI NO: 30687772 NR Description: NTF2-containing RNA-binding protein, putative thaliana] >gi|17979475|gb|AAL50074.1| AT3g25150/MJL12_9 thaliana] >gi|21360395|gb|AAM47313.1| AT3g25150/MJL12_9
  misc_feature (15)..(460): Homolog of NCBI NO: 9294171 NR Description: RNA-binding protein-like [Arabidopsis thaliana]
  misc_feature (1)..(458): Homolog of NCBI NO: 31126693 NR Description: putative GAP SH3 binding protein [Oryza sativa
  misc_feature (1)..(433): Homolog of NCBI NO: 18394029 NR Description: NTF2-containing RNA-binding protein, putative
  misc_feature (140)..(450): Homolog of NCBI NO: 21742151 NR Description: OSJNBa0069D17.2 [Oryza sativa (japonica
  misc_feature (1)..(267): Homolog of NCBI NO: 21742151 NR Description: OSJNBa0069D17.2 [Oryza sativa (japonica
  misc_feature (387)..(457): Homolog of NCBI NO: 21742151 NR Description: OSJNBa0069D17.2 [Oryza sativa (japonica

SEQ ID NO: 98861 - protein, 402 aa, Arabidopsis thaliana; identical to SEQ ID NO: 42651
  peptide (1)..(402): Ceres Seq. ID no. 13601659
  misc_feature (1)..(73): Pfam Name: Nuclear transport factor 2 (NTF2) domain Pfam Description: Nuclear transport factor 2 (NTF2) domain
  misc_feature (1)..(402): Homolog of NCBI NO: 30697455 NR Description: NTF2-containing RNA-binding protein, putative
  misc_feature (1)..(402): Homolog of NCBI NO: 30697452 NR Description: NTF2-containing RNA-binding protein, putative
  misc_feature (1)..(402): Homolog of NCBI NO: 21553535 NR Description: ras-GTPase-activating protein SH3-domain binding
  misc_feature (1)..(402): Homolog of NCBI NO: 30687772 NR Description: NTF2-containing RNA-binding protein, putative thaliana] >gi|17979475|gb|AAL50074.1| AT3g25150/MJL12_9 thaliana] >gi|21360395|gb|AAM47313.1| AT3g25150/MJL12_9
  misc_feature (1)..(402): Homolog of NCBI NO: 9294171 NR Description: RNA-binding protein-like [Arabidopsis thaliana]
  misc_feature (1)..(400): Homolog of NCBI NO: 31126693 NR Description: putative GAP SH3 binding protein [Oryza sativa
  misc_feature (1)..(375): Homolog of NCBI NO: 18394029 NR Description: NTF2-containing RNA-binding protein, putative
  misc_feature (82)..(392): Homolog of NCBI NO: 21742151 NR Description: OSJNBa0069D17.2 [Oryza sativa (japonica
  misc_feature (1)..(209): Homolog of NCBI NO: 21742151 NR Description: OSJNBa0069D17.2 [Oryza sativa (japonica
  misc_feature (329)..(399): Homolog of NCBI NO: 21742151 NR Description: OSJNBa0069D17.2 [Oryza sativa (japonica

SEQ ID NO: 98862 - DNA, 1716 bp, Arabidopsis thaliana
  misc_feature (1)..(1716): Ceres Seq. ID no. 13601660
  misc_feature: MA Experiment ID: 108434 Result: Up-regulated in Transcription
  misc_feature: MA Experiment 108434 PARAMETER Experiment Name: At_Root_Tips_cDNA_P Parameter: Tissue Value: Root Tips
  misc_feature: MA Experiment ID: 108461 Result: Down-regulated in Transcription
  misc_feature: MA Experiment 108461 PARAMETER Experiment Name: At_Germinating_Seeds_cDNA_P Parameter: Age (day) Value: 1 vs. 0
  misc_feature: MA Experiment 108461 PARAMETER Experiment Name: At_Germinating_Seeds_cDNA_P Parameter: Tissue Value: Germinating Seeds
  misc_feature: MA Experiment ID: 108462 Result: Down-regulated in Transcription
  misc_feature: MA Experiment 108462 PARAMETER Experiment Name: At_Germinating_Seeds_cDNA_P Parameter: Age (day) Value: 2 vs. 0
  misc_feature: MA Experiment 108462 PARAMETER Experiment Name: At_Germinating_Seeds_cDNA_P Parameter: Tissue Value: Germinating Seeds
  misc_feature: MA Experiment ID: 108463 Result: Down-regulated in Transcription
  misc_feature: MA Experiment 108463 PARAMETER Experiment Name: At_Germinating_Seeds_cDNA_P Parameter: Age (day) Value: 3 vs. 0
  misc_feature: MA Experiment 108463 PARAMETER Experiment Name: At_Germinating_Seeds_cDNA_P Parameter: Tissue Value: Germinating Seeds
  misc_feature: MA Experiment ID: 108464 Result: Down-regulated in Transcription
  misc_feature: MA Experiment 108464 PARAMETER Experiment Name: At_Germinating_Seeds_cDNA_P Parameter: Age (day) Value: 4 vs. 0
  misc_feature: MA Experiment 108464 PARAMETER Experiment Name: At_Germinating_Seeds_cDNA_P Parameter: Tissue Value: Germinating Seeds
  misc_feature: MA Experiment ID: 108572 Result: Down-regulated in Transcription
  misc_feature: MA Experiment 108572 PARAMETER Experiment Name: At_Drought_cDNA_P Parameter: Timepoint (hr) Value: 1
  misc_feature: MA Experiment 108572 PARAMETER Experiment Name: At_Drought_cDNA_P Parameter: Tissue Value: Aerial
  misc_feature: MA Experiment 108572 PARAMETER Experiment Name: At_Drought_cDNA_P Parameter: Treatment Value: Drought vs. No Drought
  misc_feature: MA Experiment ID: 108595 Result: Down-regulated in Transcription
  misc_feature: MA Experiment 108595 PARAMETER Experiment Name: At_Ler-pi_Ovule_cDNA_P Parameter: Plant Line Value: null
  misc_feature: MA Experiment ID: 20000180 Result: Down-regulated in Transcription
  misc_feature: MA Experiment 20000180 PARAMETER Experiment Name: At_Germinating_Seeds_P Parameter: Age (hr) Value: 24 vs. 0
  misc_feature: MA Experiment 20000180 PARAMETER Experiment Name: At_Germinating_Seeds_P Parameter: Tissue Value: Germinating Seeds
  misc_feature: MA Experiment ID: 20000184 Result: Down-regulated in Transcription
  misc_feature: MA Experiment 20000184 PARAMETER Experiment Name: At_Shoots__P Parameter: Age (day) Value: 7
  misc_feature: MA Experiment 20000184 PARAMETER Experiment Name: At_Shoots__P Parameter: Tissue Value: Shoots vs. Whole Plant
  misc_feature: MA Experiment ID: 20000224 Result: Up-regulated in Transcription
  misc_feature: MA Experiment ID: 20001557 Result: Up-regulated in Transcription
  misc_feature: MA Experiment 20001557 PARAMETER Experiment Name: At_Drought_Soil_Dry_P Parameter: Age (day) Value: 27
  misc_feature: MA Experiment 20001557 PARAMETER Experiment Name: At_Drought_Soil_Dry_P Parameter: Organism Value: A. thaliana
  misc_feature: MA Experiment 20001557 PARAMETER Experiment Name: At_Drought_Soil_Dry_P Parameter: Plant Line Value: WS
  misc_feature: MA Experiment 20001557 PARAMETER Experiment Name: At_Drought_Soil_Dry_P Parameter: Post Timepoint (hr) Value: 3
  misc_feature: MA Experiment 20001557 PARAMETER Experiment Name: At_Drought_Soil_Dry_P Parameter: Post-Treatment Value: Re-Water vs. No Drought
  misc_feature: MA Experiment 20001557 PARAMETER Experiment Name: At_Drought_Soil_Dry_P Parameter: Timepoint (day) Value: 13
  misc_feature: MA Experiment 20001557 PARAMETER Experiment Name: At_Drought_Soil_Dry_P Parameter: Treatment Value: Drought vs. No Drought
  misc_feature: MA Experiment ID: 20001558 Result: Up-regulated in Transcription
  misc_feature: MA Experiment 20001558 PARAMETER Experiment Name: At_Drought_Soil_Dry_P Parameter: Age (day) Value: 27
  misc_feature: MA Experiment 20001558 PARAMETER Experiment Name: At_Drought_Soil_Dry_P Parameter: Organism Value: A. thaliana
  misc_feature: MA Experiment 20001558 PARAMETER Experiment Name: At_Drought_Soil_Dry_P Parameter: Plant Line Value: WS
  misc_feature: MA Experiment 20001558 PARAMETER Experiment Name: At_Drought_Soil_Dry_P Parameter: Post Timepoint (hr) Value: 6
  misc_feature: MA Experiment 20001558 PARAMETER Experiment Name: At_Drought_Soil_Dry_P Parameter: Post-Treatment Value: Re-Water vs. No Drought
  misc_feature: MA Experiment 20001558 PARAMETER Experiment Name: At_Drought_Soil_Dry_P Parameter: Timepoint (day) Value: 13
  misc_feature: MA Experiment 20001558 PARAMETER Experiment Name: At_Drought_Soil_Dry_P Parameter: Treatment Value: Drought vs. No Drought
  misc_feature: MA Experiment ID: 20001560 Result: Up-regulated in Transcription
  misc_feature: MA Experiment 20001560 PARAMETER Experiment Name: At_Drought_Soil_Dry_P Parameter: Age (day) Value: 28
  misc_feature: MA Experiment 20001560 PARAMETER Experiment Name: At_Drought_Soil_Dry_P Parameter: Organism Value: A. thaliana
  misc_feature: MA Experiment 20001560 PARAMETER Experiment Name: At_Drought_Soil_Dry_P Parameter: Plant Line Value: WS
  misc_feature: MA Experiment 20001560 PARAMETER Experiment Name: At_Drought_Soil_Dry_P Parameter: Post Timepoint (hr) Value: None
  misc_feature: MA Experiment 20001560 PARAMETER Experiment Name: At_Drought_Soil_Dry_P Parameter: Post-Treatment Value: None
  misc_feature: MA Experiment 20001560 PARAMETER Experiment Name: At_Drought_Soil_Dry_P Parameter: Timepoint (day) Value: 14
  misc_feature: MA Experiment 20001560 PARAMETER Experiment Name: At_Drought_Soil_Dry_P Parameter: Treatment Value: Drought vs. No Drought
ttttctcagccaacaaacactagtctcttctgatttgtaccctaacgtttactcgacttatctaaagccgtgaacctcgccggaattcttaaagtcgcgatttttccttaacgccgtttgattcccttacggcctttgaggtccaggagatagcaaatttgttggtgagtactgaaaaatggaggaagagaacgaagtagtgaagacgtttgcagagcttggtgtgcgtgaggagcttgttaaagcttgcgagagattgggatggaagaacccttccaaaattcaagccgaagcccttccttttgctcttgaagggaaagatgtaattggacttgcgcaaaccggttctggtaaaaccggagcttttgcaattcctatattgcaagcactacttgagtatgtttatgattctgagcctaagaaaggacgtagaccggatcctgctttcttcgcttgtgttttatctccaactcgagaacttgcaatccagattgctgaacagtttgaagctcttggtgctgatataagtcttaggtgtgctgtgcttgttggaggtatagacaggatgcaacaaactattgctcttgggaaacggcctcatgttattgttgcaacacctggtcgtctttgggatcatatgtctgatacaaaaggcttttctctgaaatcattgaaatatctggttcttgatgaagcagatagactgttgaatgaagattttgagaaatctcttaaccagattttggaagagatccctcttgagcggaaaacatttcttttttcagcgactatgactaaaaaggttcgaaaacttcaaagggcatgtttgaggaatcctgtgaagattgaagctgcctccaaatattccactgtcgatactcttaagcagcagtatcggtttgttgccgctaaatacaaggattgctatctggtatacattctgagtgaaatgcctgaatcaacatctatgattttcacccgaacatgtgatggtactcgctttctggctttggtgcttcggagccttggttttagagctattcctatcagtggtcaaatgactcagtcaaagagactgggagctttaaataagttcaaagcaggggaatgtaatatcttggtttgtaccgatgtggctagtagagggctcgatatcccatcagttgatgtggttatcaattatgatattcccacaaattcaaaggattacatccatagagtaggaagaaccgctcgtgctggacgttctggtgttgggatatcacttgtaaaccagtatgagctcgaatggtatatacaaatagaaaaactcattggcaagaaactacctgaatatcccgctgaggaagatgaagtcttgtcattgttggagagagttgcagaagcgaaaaagctatctgcaatgaatatgaaagaatcaggaggtaggaagagaaggggagaagatgatgaagaaagtgagaggttcttgggaggtaacaaggacagaggcaacaaggaaagaggtggtaacaaagacaagaagtcttctaagaagttcaaacgataaaatagctctgtttttactgttttccgataactcaccaaagttttgaattgaagttttccatatgaactagggaaatttaatccattttgtactcgtaatttgtatgttcttttctttttgctttgtttctcaatgacagattatacaatttaagttgaaagatgttt

SEQ ID NO: 98863 - protein, 456 aa, Arabidopsis thaliana; identical to SEQ ID NO: 25574
  peptide (1)..(456): Ceres Seq. ID no. 13601661
  misc_feature (22)..(238): Pfam Name: DEAD/DEAH box helicase Pfam Description: DEAD/DEAH box helicase
  misc_feature (1)..(456): Homolog of NCBI NO: 18424420 NR Description: DEAD/DEAH box helicase, putative [Arabidopsis
  misc_feature (1)..(456): Homolog of NCBI NO: 26450667 NR Description: putative replication protein A1 [Arabidopsis
  misc_feature (1)..(456): Homolog of NCBI NO: 21593647 NR Description: replication protein A1-like [Arabidopsis thaliana]
  misc_feature (81)..(456): Homolog of NCBI NO: 11358794 NR Description: RNA helicase RH10 [imported] - Arabidopsis (fragment) >gi|3775997|emb|CAA09201.1| RNA helicase [Arabidopsis
  misc_feature (1)..(449): Homolog of NCBI NO: 31126733 NR Description: putative RNA helicase [Oryza sativa (japonica
  misc_feature (4)..(452): Homolog of NCBI NO: 11121196 NR Description: DEAD box protein [Homo sapiens]
  misc_feature (4)..(452): Homolog of NCBI NO: 20149629 NR Description: hqp0256 protein [Homo sapiens]
  misc_feature (4)..(452): Homolog of NCBI NO: 16549139 NR Description: unnamed protein product [Homo sapiens]
  misc_feature (4)..(452): Homolog of NCBI NO: 27229058 NR Description: RIKEN cDNA 4930588A18 [Mus musculus] unnamed protein product [Mus musculus]
  misc_feature (1)..(456): Homolog of NCBI NO: 21464402 NR Description: RE27528p [Drosophila melanogaster]

SEQ ID NO: 98864 - protein, 327 aa, Arabidopsis thaliana; identical to SEQ ID NO: 25575
  peptide (1)..(327): Ceres Seq. ID no. 13601662
  misc_feature (1)..(109): Pfam Name: DEAD/DEAH box helicase Pfam Description: DEAD/DEAH box helicase
  misc_feature (1)..(327): Homolog of NCBI NO: 18424420 NR Description: DEAD/DEAH box helicase, putative [Arabidopsis
  misc_feature (1)..(327): Homolog of NCBI NO: 26450667 NR Description: putative replication protein A1 [Arabidopsis
  misc_feature (1)..(327): Homolog of NCBI NO: 21593647 NR Description: replication protein A1-like [Arabidopsis thaliana]
  misc_feature (1)..(327): Homolog of NCBI NO: 11358794 NR Description: RNA helicase RH10 [imported] - Arabidopsis (fragment) >gi|3775997|emb|CAA09201.1| RNA helicase [Arabidopsis
  misc_feature (1)..(320): Homolog of NCBI NO: 31126733 NR Description: putative RNA helicase [Oryza sativa (japonica
  misc_feature (1)..(323): Homolog of NCBI NO: 11121196 NR Description: DEAD box protein [Homo sapiens]
  misc_feature (1)..(323): Homolog of NCBI NO: 20149629 NR Description: hqp0256 protein [Homo sapiens]
  misc_feature (1)..(323): Homolog of NCBI NO: 16549139 NR Description: unnamed protein product [Homo sapiens]
  misc_feature (1)..(323): Homolog of NCBI NO: 27229058 NR Description: RIKEN cDNA 4930588A18 [Mus musculus] unnamed protein product [Mus musculus]
  misc_feature (1)..(327): Homolog of NCBI NO: 21464402 NR Description: RE27528p [Drosophila melanogaster]

SEQ ID NO: 98865 - protein, 303 aa, Arabidopsis thaliana; identical to SEQ ID NO: 25576
  peptide (1)..(303): Ceres Seq. ID no. 13601663
  misc_feature (1)..(85): Pfam Name: DEAD/DEAH box helicase Pfam Description: DEAD/DEAH box helicase
  misc_feature (1)..(303): Homolog of NCBI NO: 18424420 NR Description: DEAD/DEAH box helicase, putative [Arabidopsis
  misc_feature (1)..(303): Homolog of NCBI NO: 26450667 NR Description: putative replication protein A1 [Arabidopsis
  misc_feature (1)..(303): Homolog of NCBI NO: 21593647 NR Description: replication protein A1-like [Arabidopsis thaliana]
  misc_feature (1)..(303): Homolog of NCBI NO: 11358794 NR Description: RNA helicase RH10 [imported] - Arabidopsis (fragment) >gi|3775997|emb|CAA09201.1| RNA helicase [Arabidopsis
  misc_feature (1)..(296): Homolog of NCBI NO: 31126733 NR Description: putative RNA helicase [Oryza sativa (japonica
  misc_feature (1)..(299): Homolog of NCBI NO: 11121196 NR Description: DEAD box protein [Homo sapiens]
  misc_feature (1)..(299): Homolog of NCBI NO: 20149629 NR Description: hqp0256 protein [Homo sapiens]
  misc_feature (1)..(299): Homolog of NCBI NO: 16549139 NR Description: unnamed protein product [Homo sapiens]
  misc_feature (1)..(299): Homolog of NCBI NO: 27229058 NR Description: RIKEN cDNA 4930588A18 [Mus musculus] unnamed protein product [Mus musculus]
  misc_feature (1)..(303): Homolog of NCBI NO: 21464402 NR Description: RE27528p [Drosophila melanogaster]

SEQ ID NO: 98866 - DNA, 2072 bp, Arabidopsis thaliana
  misc_feature (1)..(2072): Ceres Seq. ID no. 13601664
  misc_feature: MA Experiment ID: 108433 Result: Down-regulated in Transcription
  misc_feature: MA Experiment 108433 PARAMETER Experiment Name: At_rhl_Mutant2_cDNA_P Parameter: Age (day) Value: 7
  misc_feature: MA Experiment 108433 PARAMETER Experiment Name: At_rhl_Mutant2_cDNA_P Parameter: Organism Value: A. thaliana
  misc_feature: MA Experiment 108433 PARAMETER Experiment Name: At_rhl_Mutant2_cDNA_P Parameter: Plant Line Value: rhl Mutant vs. wt landsburg
  misc_feature: MA Experiment 108433 PARAMETER Experiment Name: At_rhl_Mutant2_cDNA_P Parameter: Tissue Value: Roots
  misc_feature: MA Experiment ID: 108434 Result: Up-regulated in Transcription
  misc_feature: MA Experiment 108434 PARAMETER Experiment Name: At_Root_Tips_cDNA_P Parameter: Tissue Value: Root Tips
  misc_feature: MA Experiment ID: 108461 Result: Up-regulated in Transcription
  misc_feature: MA Experiment 108461 PARAMETER Experiment Name: At_Germinating_Seeds_cDNA_P Parameter: Age (day) Value: 1 vs. 0
  misc_feature: MA Experiment 108461 PARAMETER Experiment Name: At_Germinating_Seeds_cDNA_P Parameter: Tissue Value: Germinating Seeds
  misc_feature: MA Experiment ID: 108561 Result: Down-regulated in Transcription
  misc_feature: MA Experiment 108561 PARAMETER Experiment Name: At_100uM_ABA_cDNA_P Parameter: Timepoint (hr) Value: 6
  misc_feature: MA Experiment 108561 PARAMETER Experiment Name: At_100uM_ABA_cDNA_P Parameter: Tissue Value: Aerial
  misc_feature: MA Experiment 108561 PARAMETER Experiment Name: At_100uM_ABA_cDNA_P Parameter: Treatment Value: 100uM ABA vs. No Treatment
  misc_feature: MA Experiment ID: 108573 Result: Down-regulated in Transcription
  misc_feature: MA Experiment 108573 PARAMETER Experiment Name: At_Drought_cDNA_P Parameter: Timepoint (hr) Value: 6
  misc_feature: MA Experiment 108573 PARAMETER Experiment Name: At_Drought_cDNA_P Parameter: Tissue Value: Aerial
  misc_feature: MA Experiment 108573 PARAMETER Experiment Name: At_Drought_cDNA_P Parameter: Treatment Value: Drought vs. No Drought
  misc_feature: MA Experiment ID: 108577 Result: Down-regulated in Transcription
  misc_feature: MA Experiment 108577 PARAMETER Experiment Name: At_42deg_Heat_cDNA_P Parameter: Temperature (deg C) Value: 42 vs. 22
  misc_feature: MA Experiment 108577 PARAMETER Experiment Name: At_42deg_Heat_cDNA_P Parameter: Timepoint (hr) Value: 6
  misc_feature: MA Experiment 108577 PARAMETER Experiment Name: At_42deg_Heat_cDNA_P Parameter: Tissue Value: Aerial
  misc_feature: MA Experiment ID: 108579 Result: Up-regulated in Transcription
  misc_feature: MA Experiment 108579 PARAMETER Experiment Name: At_4deg_Cold_cDNA_P Parameter: Temperature (deg C) Value: 4 vs. 22
  misc_feature: MA Experiment 108579 PARAMETER Experiment Name: At_4deg_Cold_cDNA_P Parameter: Timepoint (hr) Value: 6
  misc_feature: MA Experiment 108579 PARAMETER Experiment Name: At_4deg_Cold_cDNA_P Parameter: Tissue Value: Aerial
  misc_feature: MA Experiment ID: 108585 Result: Down-regulated in Transcription
  misc_feature: MA Experiment 108585 PARAMETER Experiment Name: At_5mM_NaNP_cDNA_P Parameter: Timepoint (hr) Value: 6
  misc_feature: MA Experiment 108585 PARAMETER Experiment Name: At_5mM_NaNP_cDNA_P Parameter: Tissue Value: Aerial
  misc_feature: MA Experiment 108585 PARAMETER Experiment Name: At_5mM_NaNP_cDNA_P Parameter: Treatment Value: null
  misc_feature: MA Experiment ID: 20000113 Result: Down-regulated in Transcription
  misc_feature: MA Experiment 20000113 PARAMETER Experiment Name: At_42deg_Heat_cDNA_P Parameter: Temperature (deg C) Value: 42 vs. 22
  misc_feature: MA Experiment 20000113 PARAMETER Experiment Name: At_42deg_Heat_cDNA_P Parameter: Timepoint (hr) Value: 8
  misc_feature: MA Experiment 20000113 PARAMETER Experiment Name: At_42deg_Heat_cDNA_P Parameter: Tissue Value: Aerial
  misc_feature: MA Experiment ID: 20000224 Result: Up-regulated in Transcription
  misc_feature: MA Experiment ID: 20000306 Result: Up-regulated in Transcription
  misc_feature: MA Experiment 20000306 PARAMETER Experiment Name: At_Germinating_Seeds_Sub_P Parameter: Age (hr) Value: 6 vs. 0
  misc_feature: MA Experiment 20000306 PARAMETER Experiment Name: At_Germinating_Seeds_Sub_P Parameter: Organism Value: A. thaliana
  misc_feature: MA Experiment 20000306 PARAMETER Experiment Name: At_Germinating_Seeds_Sub_P Parameter: Plant Line Value: WS
  misc_feature: MA Experiment 20000306 PARAMETER Experiment Name: At_Germinating_Seeds_Sub_P Parameter: Tissue Value: Germinating Seeds
  misc_feature: MA Experiment ID: 20000307 Result: Up-regulated in Transcription
  misc_feature: MA Experiment 20000307 PARAMETER Experiment Name: At_Germinating_Seeds_Sub_P Parameter: Age (hr) Value: 24 vs. 0
  misc_feature: MA Experiment 20000307 PARAMETER Experiment Name: At_Germinating_Seeds_Sub_P Parameter: Organism Value: A. thaliana
  misc_feature: MA Experiment 20000307 PARAMETER Experiment Name: At_Germinating_Seeds_Sub_P Parameter: Plant Line Value: WS
  misc_feature: MA Experiment 20000307 PARAMETER Experiment Name: At_Germinating_Seeds_Sub_P Parameter: Tissue Value: Germinating Seeds
  misc_feature: MA Experiment ID: 20000314 Result: Up-regulated in Transcription
  misc_feature: MA Experiment 20000314 PARAMETER Experiment Name: At_14day_Shoots-Roots_Sub_P Parameter: Age (day) Value: 14
  misc_feature: MA Experiment 20000314 PARAMETER Experiment Name: At_14day_Shoots-Roots_Sub_P Parameter: Organism Value: A. thaliana
  misc_feature: MA Experiment 20000314 PARAMETER Experiment Name: At_14day_Shoots-Roots_Sub_P Parameter: Plant Line Value: WS
  misc_feature: MA Experiment 20000314 PARAMETER Experiment Name: At_14day_Shoots-Roots_Sub_P Parameter: Tissue Value: Roots vs. Whole Plant
  misc_feature: MA Experiment ID: 20000328 Result: Down-regulated in Transcription
  misc_feature: MA Experiment 20000328 PARAMETER Experiment Name: At_42deg_Heat_Sub_P Parameter: Age (day) Value: 14
  misc_feature: MA Experiment 20000328 PARAMETER Experiment Name: At_42deg_Heat_Sub_P Parameter: Organism Value: A. thaliana
  misc_feature: MA Experiment 20000328 PARAMETER Experiment Name: At_42deg_Heat_Sub_P Parameter: Plant Line Value: WS
  misc_feature: MA Experiment 20000328 PARAMETER Experiment Name: At_42deg_Heat_Sub_P Parameter: Temperature (deg C) Value: 42 vs. 22
  misc_feature: MA Experiment 20000328 PARAMETER Experiment Name: At_42deg_Heat_Sub_P Parameter: Timepoint (hr) Value: 6
  misc_feature: MA Experiment 20000328 PARAMETER Experiment Name: At_42deg_Heat_Sub_P Parameter: Tissue Value: Aerial
  misc_feature: MA Experiment ID: 20000355 Result: Up-regulated in Transcription
  misc_feature: MA Experiment 20000355 PARAMETER Experiment Name: At_Siliques_Sub_P Parameter: Age (day) Value: 21
  misc_feature: MA Experiment 20000355 PARAMETER Experiment Name: At_Siliques_Sub_P Parameter: Organism Value: A. thaliana
  misc_feature: MA Experiment 20000355 PARAMETER Experiment Name: At_Siliques_Sub_P Parameter: Plant Line Value: WS
  misc_feature: MA Experiment 20000355 PARAMETER Experiment Name: At_Siliques_Sub_P Parameter: Tissue Value: Less Than 5mm Siliques vs. Whole Plant
  misc_feature: MA Experiment ID: 20000440 Result: Up-regulated in Transcription
  misc_feature: MA Experiment 20000440 PARAMETER Experiment Name: At_Closed-Flower__Sub_P Parameter: Tissue Value: Closed Flower vs. Whole Plant
actatctcacggcttttagttttcaccattctgattaaagagaaaccaaacgtttcatttttcaatatctagagagaaagatgcagacttcggtgaccccagatgccatctccaccgttttgtcaaacccatcctttgattcgtcttccgatcgatctgagatcgttgttcaagttgtggatcttaaacctatcggcaatcgctatacatttagtgcaaatgacggaaagacgaaagtcaaagcaatgtttactgcttcactcacacctgaaatcatttctgggaagatccagaacttgggtctaattcgtctcattgatttcactgttaacgacatttcaagcaaatctacaaaatatttccttgtgactaaatgtgaggctgttggttctgtgcttgattctgagattaacttggacagtaagagcggagaggaggaggctcgtgagcccaagaagcagaaactagagcattctcctgtcagtcctctgaatgatgttgtttctactggtatcacattgaaaccgaagcaggaatttgtagccaaatcagcttctcagataatgagtgaacaaaggggaaatgctgcaccagctgcaagaatggccatgactagaagggttcatccacttgtgtcattaaatccatatcaaggaaactggaccatcaaagtccgagttacaaacaagggagtgatgagaaattacaaaaacgctaggggtgaaggatgtgtcttcaatgttgaactaacagatgaagaaggaacacaaattcaagcaacgatgtttaatgatgctgcaaggaagttttttgacagattccagttgggaaaggtttattatatatcaagggggtcactaaaactcgctaacaagcagttcaaaacagttcagaatgattatgagatgacactgaatgaaaattcagaggttgaggaagctagtagcgaagaaatgttcatccctgagacaaaattcaacttcgtacccattgaagagttgggtctgtatgttaatcagaaggaacttattgatcttattggagttgttcaaagtgtatctcctaccatgagtattagaaggagaactgacaatgagatgattcctaagagggatataactttggctgatgagtcaaggaaaactgttgtggtgtccctgtggaatgatcttgcaactggcataggtcaggagctactagacatggctgatcagtcacctgtgattgcaatcaagtctctcaaagttggagattttcaaggtgtttcgttgtctaccatcagcagaagcaatgtggttattaacccggaatcaccagaagctaaaaagttgaaatcttggtttgattctgaaggcaaggaaatatccatgtcttctattggctcagggatgagcccttctgccaaaaatggatctcggtctttgtatactgaccgagtgcttctctctcacatcacaagcaatccatctttattcgaagaaaagcctgtatttttcagcactagggcttacataagcttcatcaaaccagaccaaacaatgtggtaccaagcttgtaagacttgtaacaagaaagtgacagaagcacttgactctggttactggtgtgaaggatgccagagaaagtatgaagaatgcagcttaaggtacataatggcggtgaaagtcaccgactcatctggagaaacttggatttcgtcattcaacgatgaagcagagaagattcttggatgttcagctgatgagctcaacaaactaaaatcagaggaaggtgaagtaaatgaatatcagacaaaactgaaagaggcaacatggtcatctcatgtcttccgggttagtgtcacacagaatgagtataacggtgagaagagacagagggtaactgtaaaaggagtagctcctcttgattttgctgctgaaacaagattgttgcttcaagacatctccaacaagaacaaaacatctcagtagtagcttttacttctttttttttctctattggcctaaaaaagtctcaaaacttttccttgtataatataagcctttctgcaatttataaaattagggttttgc

SEQ ID NO: 98867 - protein, 629 aa, Arabidopsis thaliana; identical to SEQ ID NO: 40682
  peptide (1)..(629): Ceres Seq. ID no. 13601665
  misc_feature (4)..(104): Pfam Name: Replication factor-A protein 1, N-terminal domain Pfam Description: Replication factor-A protein 1, N-terminal
  misc_feature (54)..(629): Homolog of NCBI NO: 15241489 NR Description: replication protein, putative [Arabidopsis
  misc_feature (4)..(622): Homolog of NCBI NO: 7440032 NR Description: probable replication protein A1 - rice
  misc_feature (4)..(622): Homolog of NCBI NO: 31580977 NR Description: replication protein A 70b [Oryza sativa (japonica
  misc_feature (1)..(618): Homolog of NCBI NO: 15225129 NR Description: replication protein, putative [Arabidopsis
  misc_feature (29)..(621): Homolog of NCBI NO: 4506583 NR Description: replication protein A1, 70kDa; replication A1 (70kD) [Homo sapiens] >gi|1350579|sp|P27694|RFA1_HUMAN
  misc_feature (29)..(625): Homolog of NCBI NO: 18390321 NR Description: replication protein A1; replication protein A1 kDa); replication protein A [Mus musculus]
  misc_feature (29)..(625): Homolog of NCBI NO: 34872759 NR Description: similar to replication protein A1 [Rattus
  misc_feature (9)..(621): Homolog of NCBI NO: 400975 NR Description: REPLICATION PROTEIN A 70 KD DNA-BINDING SUBUNIT
  misc_feature (20)..(623): Homolog of NCBI NO: 19111884 NR Description: replication factor-a protein 1
  misc_feature (180)..(625): Homolog of NCBI NO: 13536993 NR Description: replication protein A 70kDa [Oryza sativa

SEQ ID NO: 98868 - protein, 574 aa, Arabidopsis thaliana; identical to SEQ ID NO: 40683
  peptide (1)..(574): Ceres Seq. ID no. 13601666
  misc_feature (139)..(223): Pfam Name: OB-fold nucleic acid binding domain Pfam Description: OB-fold nucleic acid binding domain
  misc_feature (1)..(574): Homolog of NCBI NO: 15241489 NR Description: replication protein, putative [Arabidopsis
  misc_feature (1)..(567): Homolog of NCBI NO: 7440032 NR Description: probable replication protein A1 - rice
  misc_feature (1)..(567): Homolog of NCBI NO: 31580977 NR Description: replication protein A 70b [Oryza sativa (japonica
  misc_feature (1)..(563): Homolog of NCBI NO: 15225129 NR Description: replication protein, putative [Arabidopsis
  misc_feature (1)..(566): Homolog of NCBI NO: 4506583 NR Description: replication protein A1, 70kDa; replication A1 (70kD) [Homo sapiens] >gi|1350579|sp|P27694|RFA1_HUMAN
  misc_feature (1)..(570): Homolog of NCBI NO: 18390321 NR Description: replication protein A1; replication protein A1 kDa); replication protein A [Mus musculus]
  misc_feature (1)..(570): Homolog of NCBI NO: 34872759 NR Description: similar to replication protein A1 [Rattus
  misc_feature (1)..(566): Homolog of NCBI NO: 400975 NR Description: REPLICATION PROTEIN A 70 KD DNA-BINDING SUBUNIT
  misc_feature (1)..(568): Homolog of NCBI NO: 19111884 NR Description: replication factor-a protein 1
  misc_feature (125)..(570): Homolog of NCBI NO: 13536993 NR Description: replication protein A 70kDa [Oryza sativa

SEQ ID NO: 98869 - protein, 468 aa, Arabidopsis thaliana; identical to SEQ ID NO: 40684
  peptide (1)..(468): Ceres Seq. ID no. 13601667
  misc_feature (33)..(117): Pfam Name: OB-fold nucleic acid binding domain Pfam Description: OB-fold nucleic acid binding domain
  misc_feature (1)..(468): Homolog of NCBI NO: 15241489 NR Description: replication protein, putative [Arabidopsis
  misc_feature (1)..(461): Homolog of NCBI NO: 7440032 NR Description: probable replication protein A1 - rice
  misc_feature (1)..(461): Homolog of NCBI NO: 31580977 NR Description: replication protein A 70b [Oryza sativa (japonica
  misc_feature (1)..(457): Homolog of NCBI NO: 15225129 NR Description: replication protein, putative [Arabidopsis
  misc_feature (1)..(460): Homolog of NCBI NO: 4506583 NR Description: replication protein A1, 70kDa; replication A1 (70kD) [Homo sapiens] >gi|1350579|sp|P27694|RFA1_HUMAN
  misc_feature (1)..(464): Homolog of NCBI NO: 18390321 NR Description: replication protein A1; replication protein A1 kDa); replication protein A [Mus musculus]
  misc_feature (1)..(464): Homolog of NCBI NO: 34872759 NR Description: similar to replication protein A1 [Rattus
  misc_feature (1)..(460): Homolog of NCBI NO: 400975 NR Description: REPLICATION PROTEIN A 70 KD DNA-BINDING SUBUNIT
  misc_feature (1)..(462): Homolog of NCBI NO: 19111884 NR Description: replication factor-a protein 1
  misc_feature (19)..(464): Homolog of NCBI NO: 13536993 NR Description: replication protein A 70kDa [Oryza sativa

SEQ ID NO: 98870 - DNA, 1562 bp, Arabidopsis thaliana
  misc_feature (1)..(1562): Ceres Seq. ID no. 13601668
  misc_feature: MA Experiment ID: 108488 Result: Down-regulated in Transcription
  misc_feature: MA Experiment ID: 108595 Result: Up-regulated in Transcription
  misc_feature: MA Experiment 108595 PARAMETER Experiment Name: At_Ler-pi_Ovule_cDNA_P Parameter: Plant Line Value: null
  misc_feature: MA Experiment ID: 20000086 Result: Down-regulated in Transcription
  misc_feature: MA Experiment 20000086 PARAMETER Experiment Name: At_100uM_ABA_Mutants_cDNA_P Parameter: Plant Line Value: CS22
  misc_feature: MA Experiment 20000086 PARAMETER Experiment Name: At_100uM_ABA_Mutants_cDNA_P Parameter: Timepoint (hr) Value: 6
  misc_feature: MA Experiment 20000086 PARAMETER Experiment Name: At_100uM_ABA_Mutants_cDNA_P Parameter: Tissue Value: Aerial
  misc_feature: MA Experiment 20000086 PARAMETER Experiment Name: At_100uM_ABA_Mutants_cDNA_P Parameter: Treatment Value: 100uM ABA vs. No Treatment
  misc_feature: MA Experiment ID: 20000087 Result: Up-regulated in Transcription
  misc_feature: MA Experiment 20000087 PARAMETER Experiment Name: At_100uM_ABA_Mutants_cDNA_P Parameter: Plant Line Value: WS
  misc_feature: MA Experiment 20000087 PARAMETER Experiment Name: At_100uM_ABA_Mutants_cDNA_P Parameter: Timepoint (hr) Value: 6
  misc_feature: MA Experiment 20000087 PARAMETER Experiment Name: At_100uM_ABA_Mutants_cDNA_P Parameter: Tissue Value: Aerial
  misc_feature: MA Experiment 20000087 PARAMETER Experiment Name: At_100uM_ABA_Mutants_cDNA_P Parameter: Treatment Value: 100uM ABA vs. No Treatment
  misc_feature: MA Experiment ID: 20000111 Result: Up-regulated in Transcription
  misc_feature: MA Experiment 20000111 PARAMETER Experiment Name: At_42deg_Heat_cDNA_P Parameter: Temperature (deg C) Value: 42 vs. 22
  misc_feature: MA Experiment 20000111 PARAMETER Experiment Name: At_42deg_Heat_cDNA_P Parameter: Timepoint (hr) Value: 6
  misc_feature: MA Experiment 20000111 PARAMETER Experiment Name: At_42deg_Heat_cDNA_P Parameter: Tissue Value: Aerial
  misc_feature: MA Experiment ID: 20000112 Result: Up-regulated in Transcription
  misc_feature: MA Experiment 20000112 PARAMETER Experiment Name: At_42deg_Heat_cDNA_P Parameter: Temperature (deg C) Value: 42 vs. 22
  misc_feature: MA Experiment 20000112 PARAMETER Experiment Name: At_42deg_Heat_cDNA_P Parameter: Timepoint (hr) Value: 2
  misc_feature: MA Experiment 20000112 PARAMETER Experiment Name: At_42deg_Heat_cDNA_P Parameter: Tissue Value: Aerial
  misc_feature: MA Experiment ID: 20000179 Result: Down-regulated in Transcription
  misc_feature: MA Experiment 20000179 PARAMETER Experiment Name: At_Germinating_Seeds_P Parameter: Age (hr) Value: 6 vs. 0
  misc_feature: MA Experiment 20000179 PARAMETER Experiment Name: At_Germinating_Seeds_P Parameter: Tissue Value: Germinating Seeds
  misc_feature: MA Experiment ID: 20000180 Result: Down-regulated in Transcription
  misc_feature: MA Experiment 20000180 PARAMETER Experiment Name: At_Germinating_Seeds_P Parameter: Age (hr) Value: 24 vs. 0
  misc_feature: MA Experiment 20000180 PARAMETER Experiment Name: At_Germinating_Seeds_P Parameter: Tissue Value: Germinating Seeds
  misc_feature: MA Experiment ID: 20001557 Result: Up-regulated in Transcription
  misc_feature: MA Experiment 20001557 PARAMETER Experiment Name: At_Drought_Soil_Dry_P Parameter: Age (day) Value: 27
  misc_feature: MA Experiment 20001557 PARAMETER Experiment Name: At_Drought_Soil_Dry_P Parameter: Organism Value: A. thaliana
  misc_feature: MA Experiment 20001557 PARAMETER Experiment Name: At_Drought_Soil_Dry_P Parameter: Plant Line Value: WS
  misc_feature: MA Experiment 20001557 PARAMETER Experiment Name: At_Drought_Soil_Dry_P Parameter: Post Timepoint (hr) Value: 3
  misc_feature: MA Experiment 20001557 PARAMETER Experiment Name: At_Drought_Soil_Dry_P Parameter: Post-Treatment Value: Re-Water vs. No Drought
  misc_feature: MA Experiment 20001557 PARAMETER Experiment Name: At_Drought_Soil_Dry_P Parameter: Timepoint (day) Value: 13
  misc_feature: MA Experiment 20001557 PARAMETER Experiment Name: At_Drought_Soil_Dry_P Parameter: Treatment Value: Drought vs. No Drought
  misc_feature: MA Experiment ID: 20001558 Result: Up-regulated in Transcription
  misc_feature: MA Experiment 20001558 PARAMETER Experiment Name: At_Drought_Soil_Dry_P Parameter: Age (day) Value: 27
  misc_feature: MA Experiment 20001558 PARAMETER Experiment Name: At_Drought_Soil_Dry_P Parameter: Organism Value: A. thaliana
  misc_feature: MA Experiment 20001558 PARAMETER Experiment Name: At_Drought_Soil_Dry_P Parameter: Plant Line Value: WS
  misc_feature: MA Experiment 20001558 PARAMETER Experiment Name: At_Drought_Soil_Dry_P Parameter: Post Timepoint (hr) Value: 6
  misc_feature: MA Experiment 20001558 PARAMETER Experiment Name: At_Drought_Soil_Dry_P Parameter: Post-Treatment Value: Re-Water vs. No Drought
  misc_feature: MA Experiment 20001558 PARAMETER Experiment Name: At_Drought_Soil_Dry_P Parameter: Timepoint (day) Value: 13
  misc_feature: MA Experiment 20001558 PARAMETER Experiment Name: At_Drought_Soil_Dry_P Parameter: Treatment Value: Drought vs. No Drought
tttacttttcctctgctcgtagacagctttgtgcttgagacgattcccagtttctgcgattccaagtcgaagatataacctctcctatttgcgtctcagcttctacagagcttttagcattaaaagttgttaaaatggctggggggtcaaagaggtctaaaagagcaagacttgacagtgaatcggaagacataagcgaccaagaaaaccttaaggccgaaagcgacaatgaagatgatcaattacctgatgggatagaggatgatgaagtagatagcatggaagatgatgagggagagagtgaggaagacgatgaaggagataccgaggaagatgatgaaggagatagcgaggaagatgatgaaggagagaacaaggaagacgaggatggagaaagcgaggactttgaagatggaaatgataaagagagtgagagtggcgatgaaggtaatgatgacaataaagatgctcagatggaagagcttgagaaagaggtcaaggagcttcgttcacaagagcaggatatattgaagaacttgaagcgtgataagggtgaagatgctgttaaaggtcaagcggtgaagaatcagaaggctctttgggataagattctggagttcagattcttacttcagaaagcatttgatcgttcaaacagattaccacaggagcctgtgaaatcgttattttgttcagaagatgaggatgtctcaacagcatatacagatctagttacttcatctaagaagacattagattccctcttggagttgcaagaggctttgtttgagaagaacccctcggttgatcaacaagtgaatgcaacagctagtgaagaatccaataaatcagatgcagaagatagcgatgaatggcagcgaatatctgacttgcagaaaagaatgtctgtgttccgaaacaaggctgtggacaaatggcagagaaaaacacaagtcacaactggtgcagctgctattaaaggaaagctccacgcctttaaccagaacgttagtgaacaggttgcttcctacatgagggatccaagtagaatgattaaacagatgcaacaatcaagatctactgttgctgtttttggaactgtccctcaggaagccatggaaccaaatccagaggaaaaacaagaagaaggagaccctgaacttgtggaagatgctgagttctataggcagttactaaaggagtttctcgagactatcgatccagcttcctcagaggcggctttctacgagatgaagaagttccagacgaagaagaggaaagttgtggatcgacgtgcctcaaagagcagaaagatcaggtataatgttcatgagaagattgtcaactttatggctccacgaccagcgaagattcctccaaacacggcggatttgcttaagaatctcttcggtctcaagaccagaaacgttcagtctgaagcttaatatcaaacaaaccacaattttgaaacgctgtaatagatcgtccctttttctgtggtgtgttgtaatactactattgacaccgtttctatcgaaagccatatgtgaaagcatctagtt

SEQ ID NO: 98871 - protein, 436 aa, Arabidopsis thaliana
  peptide (1)..(436): Ceres Seq. ID no. 13601669
  misc_feature (14)..(150): Pfam Name: Chromadorea ALT protein Pfam Description: Chromadorea ALT protein
  misc_feature (1)..(436): Homolog of NCBI NO: 9757854 NR Description: contains similarity to apoptosis antagonizing
  misc_feature (1)..(436): Homolog of NCBI NO: 28416553 NR Description: At5g61330 [Arabidopsis thaliana]
  misc_feature (1)..(436): Homolog of NCBI NO: 15240224 NR Description: expressed protein [Arabidopsis thaliana]
  misc_feature (27)..(427): Homolog of NCBI NO: 34913376 NR Description: B1147B04.8 [Oryza sativa (japonica
  misc_feature (6)..(425): Homolog of NCBI NO: 19920846 NR Description: CG11188-PA [Drosophila melanogaster]
  misc_feature (1)..(436): Homolog of NCBI NO: 32407092 NR Description: hypothetical protein [Neurospora crassa]
  misc_feature (13)..(245): Homolog of NCBI NO: 9790013 NR Description: apoptosis antagonizing transcription factor; [Mus musculus] >gi|6716791|gb|AAF26745.1|AF222801_1 traube [Mus >gi|19263541|gb|AAH25080.1| apoptosis antagonizing transcription
  misc_feature (340)..(426): Homolog of NCBI NO: 9790013 NR Description: apoptosis antagonizing transcription factor; [Mus musculus] >gi|6716791|gb|AAF26745.1|AF222801_1 traube [Mus >gi|19263541|gb|AAH25080.1| apoptosis antagonizing transcription
  misc_feature (15)..(256): Homolog of NCBI NO: 7657013 NR Description: apoptosis antagonizing transcription factor [Homo >gi|7594612|emb|CAB57451.2| Ded protein [Homo sapiens]
  misc_feature (340)..(426): Homolog of NCBI NO: 7657013 NR Description: apoptosis antagonizing transcription factor [Homo >gi|7594612|emb|CAB57451.2| Ded protein [Homo sapiens]
MAGGSKRSKRARLDSESEDISDQENLKAESDNEDDQLPDGIEDDEVDSMEDDEGESEEDDEGDTEEDDEGDSEEDDEGENKEDEDGESEDFEDGNDKESESGDEGNDDNKDAQMEELEKEVKELRSQEQDILKNLKRDKGEDAVKGQAVKNQKALWDKILEFRFLLQKAFDRSNRLPQEPVKSLFCSEDEDVSTAYTDLVTSSKKTLDSLLELQEALFEKNPSVDQQVNATASEESNKSDAEDSDEWQRISDLQKRMSVFRNKAVDKWQRKTQVTTGAAAIKGKLHAFNQNVSEQVASYMRDPSRMIKQMQQSRSTVAVFGTVPQEAMEPNPEEKQEEGDPELVEDAEFYRQLLKEFLETIDPASSEAAFYEMKKFQTKKRKVVDRRASKSRKIRYNVHEKIVNFMAPRPAKIPPNTADLLKNLFGLKTRNVQSEA

SEQ ID NO: 98872 - protein, 388 aa, Arabidopsis thaliana
  peptide (1)..(388): Ceres Seq. ID no. 13601670
  misc_feature (1)..(102): Pfam Name: Chromadorea ALT protein Pfam Description: Chromadorea ALT protein
  misc_feature (1)..(388): Homolog of NCBI NO: 9757854 NR Description: contains similarity to apoptosis antagonizing
  misc_feature (1)..(388): Homolog of NCBI NO: 28416553 NR Description: At5g61330 [Arabidopsis thaliana]
  misc_feature (1)..(388): Homolog of NCBI NO: 15240224 NR Description: expressed protein [Arabidopsis thaliana]
  misc_feature (1)..(379): Homolog of NCBI NO: 34913376 NR Description: B1147B04.8 [Oryza sativa (japonica
  misc_feature (1)..(377): Homolog of NCBI NO: 19920846 NR Description: CG11188-PA [Drosophila melanogaster]
  misc_feature (1)..(388): Homolog of NCBI NO: 32407092 NR Description: hypothetical protein [Neurospora crassa]
  misc_feature (1)..(197): Homolog of NCBI NO: 9790013 NR Description: apoptosis antagonizing transcription factor; [Mus musculus] >gi|6716791|gb|AAF26745.1|AF222801_1 traube [Mus >gi|19263541|gb|AAH25080.1| apoptosis antagonizing transcription
  misc_feature (292)..(378): Homolog of NCBI NO: 9790013 NR Description: apoptosis antagonizing transcription factor; [Mus musculus] >gi|6716791|gb|AAF26745.1|AF222801_1 traube [Mus >gi|19263541|gb|AAH25080.1| apoptosis antagonizing transcription
  misc_feature (1)..(208): Homolog of NCBI NO: 7657013 NR Description: apoptosis antagonizing transcription factor [Homo >gi|7594612|emb|CAB57451.2| Ded protein [Homo sapiens]
  misc_feature (292)..(378): Homolog of NCBI NO: 7657013 NR Description: apoptosis antagonizing transcription factor [Homo >gi|7594612|emb|CAB57451.2| Ded protein [Homo sapiens]
MEDDEGESEEDDEGDTEEDDEGDSEEDDEGENKEDEDGESEDFEDGNDKESESGDEGNDDNKDAQMEELEKEVKELRSQEQDILKNLKRDKGEDAVKGQAVKNQKALWDKILEFRFLLQKAFDRSNRLPQEPVKSLFCSEDEDVSTAYTDLVTSSKKTLDSLLELQEALFEKNPSVDQQVNATASEESNKSDAEDSDEWQRISDLQKRMSVFRNKAVDKWQRKTQVTTGAAAIKGKLHAFNQNVSEQVASYMRDPSRMIKQMQQSRSTVAVFGTVPQEAMEPNPEEKQEEGDPELVEDAEFYRQLLKEFLETIDPASSEAAFYEMKKFQTKKRKVVDRRASKSRKIRYNVHEKIVNFMAPRPAKIPPNTADLLKNLFGLKTRNVQSEA

SEQ ID NO: 98873 - protein, 323 aa, Arabidopsis thaliana
  peptide (1)..(323): Ceres Seq. ID no. 13601671
  misc_feature (1)..(92): Pfam Name: Mpp10 protein Pfam Description: Mpp10 protein
  misc_feature (1)..(323): Homolog of NCBI NO: 9757854 NR Description: contains similarity to apoptosis antagonizing
  misc_feature (1)..(323): Homolog of NCBI NO: 28416553 NR Description: At5g61330 [Arabidopsis thaliana]
  misc_feature (1)..(323): Homolog of NCBI NO: 15240224 NR Description: expressed protein [Arabidopsis thaliana]
  misc_feature (1)..(314): Homolog of NCBI NO: 34913376 NR Description: B1147B04.8 [Oryza sativa (japonica
  misc_feature (1)..(312): Homolog of NCBI NO: 19920846 NR Description: CG11188-PA [Drosophila melanogaster]
  misc_feature (1)..(323): Homolog of NCBI NO: 32407092 NR Description: hypothetical protein [Neurospora crassa]
  misc_feature (1)..(132): Homolog of NCBI NO: 9790013 NR Description: apoptosis antagonizing transcription factor; [Mus musculus] >gi|6716791|gb|AAF26745.1|AF222801_1 traube [Mus >gi|19263541|gb|AAH25080.1| apoptosis antagonizing transcription
  misc_feature (227)..(313): Homolog of NCBI NO: 9790013 NR Description: apoptosis antagonizing transcription factor; [Mus musculus] >gi|6716791|gb|AAF26745.1|AF222801_1 traube [Mus >gi|19263541|gb|AAH25080.1| apoptosis antagonizing transcription
  misc_feature (1)..(143): Homolog of NCBI NO: 7657013 NR Description: apoptosis antagonizing transcription factor [Homo >gi|7594612|emb|CAB57451.2| Ded protein [Homo sapiens]
  misc_feature (227)..(313): Homolog of NCBI NO: 7657013 NR Description: apoptosis antagonizing transcription factor [Homo >gi|7594612|emb|CAB57451.2| Ded protein [Homo sapiens]
MEELEKEVKELRSQEQDILKNLKRDKGEDAVKGQAVKNQKALWDKILEFRFLLQKAFDRSNRLPQEPVKSLFCSEDEDVSTAYTDLVTSSKKTLDSLLELQEALFEKNPSVDQQVNATASEESNKSDAEDSDEWQRISDLQKRMSVFRNKAVDKWQRKTQVTTGAAAIKGKLHAFNQNVSEQVASYMRDPSRMIKQMQQSRSTVAVFGTVPQEAMEPNPEEKQEEGDPELVEDAEFYRQLLKEFLETIDPASSEAAFYEMKKFQTKKRKVVDRRASKSRKIRYNVHEKIVNFMAPRPAKIPPNTADLLKNLFGLKTRNVQSEA

SEQ ID NO: 98874 - DNA, 1327 bp, Arabidopsis thaliana
  misc_feature (1)..(1327): Ceres Seq. ID no. 13601676
  misc_feature: MA Experiment ID: 108573 Result: Up-regulated in Transcription
  misc_feature: MA Experiment 108573 PARAMETER Experiment Name: At_Drought_cDNA_P Parameter: Timepoint (hr) Value: 6
  misc_feature: MA Experiment 108573 PARAMETER Experiment Name: At_Drought_cDNA_P Parameter: Tissue Value: Aerial
  misc_feature: MA Experiment 108573 PARAMETER Experiment Name: At_Drought_cDNA_P Parameter: Treatment Value: Drought vs. No Drought
  misc_feature: MA Experiment ID: 108576 Result: Up-regulated in Transcription
  misc_feature: MA Experiment 108576 PARAMETER Experiment Name: At_42deg_Heat_cDNA_P Parameter: Temperature (deg C) Value: 42 vs. 22
  misc_feature: MA Experiment 108576 PARAMETER Experiment Name: At_42deg_Heat_cDNA_P Parameter: Timepoint (hr) Value: 1
  misc_feature: MA Experiment 108576 PARAMETER Experiment Name: At_42deg_Heat_cDNA_P Parameter: Tissue Value: Aerial
  misc_feature: MA Experiment ID: 108577 Result: Up-regulated in Transcription
  misc_feature: MA Experiment 108577 PARAMETER Experiment Name: At_42deg_Heat_cDNA_P Parameter: Temperature (deg C) Value: 42 vs. 22
  misc_feature: MA Experiment 108577 PARAMETER Experiment Name: At_42deg_Heat_cDNA_P Parameter: Timepoint (hr) Value: 6
  misc_feature: MA Experiment 108577 PARAMETER Experiment Name: At_42deg_Heat_cDNA_P Parameter: Tissue Value: Aerial
  misc_feature: MA Experiment ID: 108585 Result: Up-regulated in Transcription
  misc_feature: MA Experiment 108585 PARAMETER Experiment Name: At_5mM_NaNP_cDNA_P Parameter: Timepoint (hr) Value: 6
  misc_feature: MA Experiment 108585 PARAMETER Experiment Name: At_5mM_NaNP_cDNA_P Parameter: Tissue Value: Aerial
  misc_feature: MA Experiment 108585 PARAMETER Experiment Name: At_5mM_NaNP_cDNA_P Parameter: Treatment Value: null
  misc_feature: MA Experiment ID: 108595 Result: Down-regulated in Transcription
  misc_feature: MA Experiment 108595 PARAMETER Experiment Name: At_Ler-pi_Ovule_cDNA_P Parameter: Plant Line Value: null
  misc_feature: MA Experiment ID: 20000093 Result: Up-regulated in Transcription
  misc_feature: MA Experiment 20000093 PARAMETER Experiment Name: At_42deg_Heat_cDNA_P Parameter: Temperature (deg C) Value: 42 vs. 22
  misc_feature: MA Experiment 20000093 PARAMETER Experiment Name: At_42deg_Heat_cDNA_P Parameter: Timepoint (hr) Value: 0.5
  misc_feature: MA Experiment 20000093 PARAMETER Experiment Name: At_42deg_Heat_cDNA_P Parameter: Tissue Value: Aerial
  misc_feature: MA Experiment ID: 20000111 Result: Up-regulated in Transcription
  misc_feature: MA Experiment 20000111 PARAMETER Experiment Name: At_42deg_Heat_cDNA_P Parameter: Temperature (deg C) Value: 42 vs. 22
  misc_feature: MA Experiment 20000111 PARAMETER Experiment Name: At_42deg_Heat_cDNA_P Parameter: Timepoint (hr) Value: 6
  misc_feature: MA Experiment 20000111 PARAMETER Experiment Name: At_42deg_Heat_cDNA_P Parameter: Tissue Value: Aerial
  misc_feature: MA Experiment ID: 20000112 Result: Up-regulated in Transcription
  misc_feature: MA Experiment 20000112 PARAMETER Experiment Name: At_42deg_Heat_cDNA_P Parameter: Temperature (deg C) Value: 42 vs. 22
  misc_feature: MA Experiment 20000112 PARAMETER Experiment Name: At_42deg_Heat_cDNA_P Parameter: Timepoint (hr) Value: 2
  misc_feature: MA Experiment 20000112 PARAMETER Experiment Name: At_42deg_Heat_cDNA_P Parameter: Tissue Value: Aerial
  misc_feature: MA Experiment ID: 20000144 Result: Up-regulated in Transcription
  misc_feature: MA Experiment 20000144 PARAMETER Experiment Name: At_42deg_Heat_cDNA_P Parameter: Temperature (deg C) Value: 42 vs. 22
  misc_feature: MA Experiment 20000144 PARAMETER Experiment Name: At_42deg_Heat_cDNA_P Parameter: Timepoint (hr) Value: 1
  misc_feature: MA Experiment 20000144 PARAMETER Experiment Name: At_42deg_Heat_cDNA_P Parameter: Tissue Value: Aerial
  misc_feature: MA Experiment ID: 20000171 Result: Up-regulated in Transcription
  misc_feature: MA Experiment 20000171 PARAMETER Experiment Name: At_42deg_Heat_P Parameter: Age (day) Value: 14
  misc_feature: MA Experiment 20000171 PARAMETER Experiment Name: At_42deg_Heat_P Parameter: Organism Value: A. thaliana
  misc_feature: MA Experiment 20000171 PARAMETER Experiment Name: At_42deg_Heat_P Parameter: Plant Line Value: WS
  misc_feature: MA Experiment 20000171 PARAMETER Experiment Name: At_42deg_Heat_P Parameter: Temperature (deg C) Value: 42 vs. 22
  misc_feature: MA Experiment 20000171 PARAMETER Experiment Name: At_42deg_Heat_P Parameter: Timepoint (hr) Value: 1
  misc_feature: MA Experiment 20000171 PARAMETER Experiment Name: At_42deg_Heat_P Parameter: Tissue Value: Aerial
  misc_feature: MA Experiment ID: 20000173 Result: Up-regulated in Transcription
  misc_feature: MA Experiment 20000173 PARAMETER Experiment Name: At_42deg_Heat_P Parameter: Age (day) Value: 14
  misc_feature: MA Experiment 20000173 PARAMETER Experiment Name: At_42deg_Heat_P Parameter: Organism Value: A. thaliana
  misc_feature: MA Experiment 20000173 PARAMETER Experiment Name: At_42deg_Heat_P Parameter: Plant Line Value: WS
  misc_feature: MA Experiment 20000173 PARAMETER Experiment Name: At_42deg_Heat_P Parameter: Temperature (deg C) Value: 42 vs. 22
  misc_feature: MA Experiment 20000173 PARAMETER Experiment Name: At_42deg_Heat_P Parameter: Timepoint (hr) Value: 6
  misc_feature: MA Experiment 20000173 PARAMETER Experiment Name: At_42deg_Heat_P Parameter: Tissue Value: Aerial
atggcagcattgactcttcatcatcatcatcatcatcgtcatcactcgtgtcttcaagcgtctggacatctgtcacgtcgtctatatcaccgaatattctcgagctttccacgaaatcccgtcaaagatctcaactttcgtctaagtcttgccgatttctcgagtttttctttatctacacgtggcactgtgtttgctgtaagagctctgagtacagtcgcggtagaagagtcgtccgagaagaagatggtgaaagggattagggtttatgagcatggcggtcctgaggttctgaaatgggaagatgtggaagtaggggaaccaaaggagggtgagatacgtgtgaagaacaaggctatcgggcttaactttattgatgtttacttcaggaaaggtgtttacaagccagcttctatgcccttcacaccaggtatggaggctgttggagaggtggtagctgttgggtcgggattgactggcagaatgatcggtgatctcgttgcttatgctggaaatccgatgggtgcgtatgctgaggaacaaatccttccagcggataaagtggttcctgttccttcatctattgatcctatcgttgcagcatcaatcatgctcaagggtatgactgcacagtttctccttcgccgttgcttcaaggtcgaacctgggcacacaatccttgttcatgctgcagctggtggagttgggtctctgttgtgtcaatgggcaaatgcgcttggagccactgtgattggaactgtctcgaccaatgagaaagcggctcaagccaaagaagatggatgccaccatgttattatgtacaagaacgaggattttgtttcccgagtcaatgacattacatcgggtaaaggagtaaatgttgtttatgactctgtgggaaaagacacctttaagggatcgttagcatgtttgaagagccgaggatacatggtgagctttggacaatcctcaggatctccagatccgattccattatctgatcttgctccaaagtcgctcttcttgacaagaccttccatgatgcattacaatgaaactcgagatgagctcttggaatgtgcaggagaggttttcgctaatgttacctccggcatcttaaaggctcgtgtgaatcacaagtacccgttgtctcgagtcgctgacgcccacgcagatcttgagaataggatcacctctggctccgttgtgctcttgccatgaaaacatatacaatgatgttagtatctttcaataagggcaatgagattcctttgtgatggaaagaatattaaatgtaccttttggacctgaatgacaatttgagaat

SEQ ID NO: 98875 - protein, 406 aa, Arabidopsis thaliana
  peptide (1)..(406): Ceres Seq. ID no. 13601677
  misc_feature (83)..(406): Homolog of NCBI NO: 15240274 NR Description: NADP-dependent oxidoreductase, putative thaliana] >gi|9758467|dbj|BAB08996.1| quinone oxidoreductase
  misc_feature (83)..(406): Homolog of NCBI NO: 7430955 NR Description: quinone oxidoreductase homolog - cowpea
  misc_feature (84)..(406): Homolog of NCBI NO: 13570000 NR Description: putative quinone oxidoreductase [Oryza sativa]
  misc_feature (83)..(406): Homolog of NCBI NO: 531096 NR Description: TED2 [Zinnia elegans]
  misc_feature (241)..(406): Homolog of NCBI NO: 37536850 NR Description: putative quinone oxidoreductase [Oryza sativa
  misc_feature (73)..(219): Homolog of NCBI NO: 37536850 NR Description: putative quinone oxidoreductase [Oryza sativa
  misc_feature (87)..(406): Homolog of NCBI NO: 23014744 NR Description: hypothetical protein [Magnetospirillum
  misc_feature (83)..(406): Homolog of NCBI NO: 23500315 NR Description: quinone oxidoreductase [Brucella suis 1330]
  misc_feature (83)..(406): Homolog of NCBI NO: 22982287 NR Description: hypothetical protein [Burkholderia fungorum]
  misc_feature (83)..(405): Homolog of NCBI NO: 27381248 NR Description: quinone oxidoreductase [Bradyrhizobium japonicum]
MAALTLHHHHHHRHHSCLQASGHLSRRLYHRIFSSFPRNPVKDLNFRLSLADFSSFSLSTRGTVFAVRALSTVAVEESSEKKMVKGIRVYEHGGPEVLKWEDVEVGEPKEGEIRVKNKAIGLNFIDVYFRKGVYKPASMPFTPGMEAVGEVVAVGSGLTGRMIGDLVAYAGNPMGAYAEEQILPADKVVPVPSSIDPIVAASIMLKGMTAQFLLRRCFKVEPGHTILVHAAAGGVGSLLCQWANALGATVIGTVSTNEKAAQAKEDGCHHVIMYKNEDFVSRVNDITSGKGVNVVYDSVGKDTFKGSLACLKSRGYMVSFGQSSGSPDPIPLSDLAPKSLFLTRPSMMHYNETRDELLECAGEVFANVTSGILKARVNHKYPLSRVADAHADLENRITSGSVVLLP

SEQ ID NO: 98876 - protein, 324 aa, Arabidopsis thaliana; identical to SEQ ID NO: 23832
  peptide (1)..(324): Ceres Seq. ID no. 13601678
  misc_feature (1)..(324): Homolog of NCBI NO: 15240274 NR Description: NADP-dependent oxidoreductase, putative thaliana] >gi|9758467|dbj|BAB08996.1| quinone oxidoreductase
  misc_feature (1)..(324): Homolog of NCBI NO: 7430955 NR Description: quinone oxidoreductase homolog - cowpea
  misc_feature (2)..(324): Homolog of NCBI NO: 13570000 NR Description: putative quinone oxidoreductase [Oryza sativa]
  misc_feature (1)..(324): Homolog of NCBI NO: 531096 NR Description: TED2 [Zinnia elegans]
  misc_feature (159)..(324): Homolog of NCBI NO: 37536850 NR Description: putative quinone oxidoreductase [Oryza sativa
  misc_feature (1)..(137): Homolog of NCBI NO: 37536850 NR Description: putative quinone oxidoreductase [Oryza sativa
  misc_feature (5)..(324): Homolog of NCBI NO: 23014744 NR Description: hypothetical protein [Magnetospirillum
  misc_feature (1)..(324): Homolog of NCBI NO: 23500315 NR Description: quinone oxidoreductase [Brucella suis 1330]
  misc_feature (1)..(324): Homolog of NCBI NO: 22982287 NR Description: hypothetical protein [Burkholderia fungorum]
  misc_feature (1)..(323): Homolog of NCBI NO: 27381248 NR Description: quinone oxidoreductase [Bradyrhizobium japonicum]

SEQ ID NO: 98877 - protein, 268 aa, Arabidopsis thaliana; identical to SEQ ID NO: 23833
  peptide (1)..(268): Ceres Seq. ID no. 13601679
  misc_feature (1)..(268): Homolog of NCBI NO: 15240274 NR Description: NADP-dependent oxidoreductase, putative thaliana] >gi|9758467|dbj|BAB08996.1| quinone oxidoreductase
  misc_feature (1)..(268): Homolog of NCBI NO: 7430955 NR Description: quinone oxidoreductase homolog - cowpea
  misc_feature (1)..(268): Homolog of NCBI NO: 13570000 NR Description: putative quinone oxidoreductase [Oryza sativa]
  misc_feature (1)..(268): Homolog of NCBI NO: 531096 NR Description: TED2 [Zinnia elegans]
  misc_feature (103)..(268): Homolog of NCBI NO: 37536850 NR Description: putative quinone oxidoreductase [Oryza sativa
  misc_feature (1)..(81): Homolog of NCBI NO: 37536850 NR Description: putative quinone oxidoreductase [Oryza sativa
  misc_feature (1)..(268): Homolog of NCBI NO: 23014744 NR Description: hypothetical protein [Magnetospirillum
  misc_feature (1)..(268): Homolog of NCBI NO: 23500315 NR Description: quinone oxidoreductase [Brucella suis 1330]
  misc_feature (1)..(268): Homolog of NCBI NO: 22982287 NR Description: hypothetical protein [Burkholderia fungorum]
  misc_feature (1)..(267): Homolog of NCBI NO: 27381248 NR Description: quinone oxidoreductase [Bradyrhizobium japonicum]

SEQ ID NO: 98878 - DNA, 815 bp, Arabidopsis thaliana
  misc_feature (1)..(815): Ceres Seq. ID no. 13601680
  misc_feature: MA Experiment ID: 108434 Result: Down-regulated in Transcription
  misc_feature: MA Experiment 108434 PARAMETER Experiment Name: At_Root_Tips_cDNA_P Parameter: Tissue Value: Root Tips
  misc_feature: MA Experiment ID: 108488 Result: Down-regulated in Transcription
  misc_feature: MA Experiment ID: 108594 Result: Down-regulated in Transcription
  misc_feature: MA Experiment 108594 PARAMETER Experiment Name: At_Ler-rhl_Root_cDNA_P Parameter: Plant Line Value: null
  misc_feature: MA Experiment ID: 20000171 Result: Down-regulated in Transcription
  misc_feature: MA Experiment 20000171 PARAMETER Experiment Name: At_42deg_Heat_P Parameter: Age (day) Value: 14
  misc_feature: MA Experiment 20000171 PARAMETER Experiment Name: At_42deg_Heat_P Parameter: Organism Value: A. thaliana
  misc_feature: MA Experiment 20000171 PARAMETER Experiment Name: At_42deg_Heat_P Parameter: Plant Line Value: WS
  misc_feature: MA Experiment 20000171 PARAMETER Experiment Name: At_42deg_Heat_P Parameter: Temperature (deg C) Value: 42 vs. 22
  misc_feature: MA Experiment 20000171 PARAMETER Experiment Name: At_42deg_Heat_P Parameter: Timepoint (hr) Value: 1
  misc_feature: MA Experiment 20000171 PARAMETER Experiment Name: At_42deg_Heat_P Parameter: Tissue Value: Aerial
  misc_feature: MA Experiment ID: 20000184 Result: Down-regulated in Transcription
  misc_feature: MA Experiment 20000184 PARAMETER Experiment Name: At_Shoots__P Parameter: Age (day) Value: 7
  misc_feature: MA Experiment 20000184 PARAMETER Experiment Name: At_Shoots__P Parameter: Tissue Value: Shoots vs. Whole Plant
  misc_feature: MA Experiment ID: 20001757 Result: Down-regulated in Transcription
  misc_feature: MA Experiment 20001757 PARAMETER Experiment Name: At_50mM_NH4NO3_L-to-H_P Parameter: Timepoint (hr) Value: 6
  misc_feature: MA Experiment 20001757 PARAMETER Experiment Name: At_50mM_NH4NO3_L-to-H_P Parameter: Tissue Value: Leaf
  misc_feature: MA Experiment 20001757 PARAMETER Experiment Name: At_50mM_NH4NO3_L-to-H_P Parameter: Treatment Value: 50mM NH4NO3 vs 100mM Mannitol
  misc_feature: MA Experiment ID: 20001905 Result: Up-regulated in Transcription
  misc_feature: MA Experiment 20001905 PARAMETER Experiment Name: At_Drought_Reproduction_P Parameter: Age (day) Value: 40
  misc_feature: MA Experiment 20001905 PARAMETER Experiment Name: At_Drought_Reproduction_P Parameter: Organism Value: A. thaliana
  misc_feature: MA Experiment 20001905 PARAMETER Experiment Name: At_Drought_Reproduction_P Parameter: Plant Line Value: WS
  misc_feature: MA Experiment 20001905 PARAMETER Experiment Name: At_Drought_Reproduction_P Parameter: Timepoint (day) Value: 10
  misc_feature: MA Experiment 20001905 PARAMETER Experiment Name: At_Drought_Reproduction_P Parameter: Tissue Value: Rosettes
  misc_feature: MA Experiment 20001905 PARAMETER Experiment Name: At_Drought_Reproduction_P Parameter: Treatment Value: Drought vs. No Drought
agaatcagccgacgtttcctcttcaccactttcctctgtttctctgtttcgctctctctacaaaatttctccatgaacatacttaacaagctaggtataggatcaagtagacaaaccaacatggatccttctccaatcgcacaagtaatcgacgacgaagctccggcgccgggaaaccagtttactcaattcggcgccggttgtttctggagcgtggaattagcgtaccagagagttccaggagtgactcaaacagaggttggttattctcaagggatcactcacgatccttcttacaaagatgtttgttcaggtaccacgaatcatgccgagattgttcgtgttcaatatgatccaaaagagtgtagttaccagtcgctgcttgatttgttctggtctaagcatgatcccaccactttgaatcggcagggaaatgatgtgggaacccaataccgttcagggatatatttctacaacccggagcaagagaaactagcacgcgagtcactggagcggcaccagcaacaagttgacaggaaggttgtgacagagatcttaccggctaagaaattttatagagctgaggaacatcaccagcaatacttgtctaaaggagggaggtttggtcttaagcaatcaacggaaaaaggctgcaacgacccaatccgctgctacgggtaaaagccttgcttctaaccgaaagcagaggatgcttccacttatctatgatagattatagcaattatcgttgaaaaataaagaagccgaggctacttatgtaacttgttcttgttcataaaactttttaagtgttc

SEQ ID NO: 98879 - protein, 226 aa, Arabidopsis thaliana
  peptide (1)..(226): Ceres Seq. ID no. 13601681
  misc_feature (60)..(213): Pfam Name: Peptide methionine sulfoxide reductase Pfam Description: Peptide methionine sulfoxide reductase
  misc_feature (25)..(226): Homolog of NCBI NO: 18424492 NR Description: peptide methionine sulfoxide reductase - like [Arabidopsis thaliana] >gi|9758479|dbj|BAB09008.1| peptide sulfoxide reductase [Arabidopsis thaliana]
  misc_feature (25)..(226): Homolog of NCBI NO: 21592658 NR Description: peptide methionine sulfoxide reductase (msr)
  misc_feature (25)..(226): Homolog of NCBI NO: 15240796 NR Description: peptide methionine sulfoxide reductase (msr) thaliana] >gi|11278973|pir||T49886 peptide methionine sulfoxide
  misc_feature (25)..(226): Homolog of NCBI NO: 25308493 NR Description: protein-methionine-S-oxide reductase (EC 1.8.4.6)
  misc_feature (41)..(226): Homolog of NCBI NO: 26451744 NR Description: putative peptide methionine sulfoxide reductase
  misc_feature (17)..(226): Homolog of NCBI NO: 29469000 NR Description: peptide methionine sulfoxide reductase; cPMSR
  misc_feature (25)..(226): Homolog of NCBI NO: 12230349 NR Description: Peptide methionine sulfoxide reductase
  misc_feature (26)..(226): Homolog of NCBI NO: 21593143 NR Description: protein-methionine-S-oxide reductase [Arabidopsis
  misc_feature (26)..(226): Homolog of NCBI NO: 15234942 NR Description: protein-methionine-S-oxide reductase [Arabidopsis >gi|12644314|sp|P54150|MSRA_ARATH Peptide methionine sulfoxide
  misc_feature (26)..(226): Homolog of NCBI NO: 15146324 NR Description: AT4g25130/F13M23_270 [Arabidopsis thaliana]
RISRRFLFTTFLCFSVSLSLQNFSMNILNKLGIGSSRQTNMDPSPIAQVIDDEAPAPGNQFTQFGAGCFWSVELAYQRVPGVTQTEVGYSQGITHDPSYKDVCSGTTNHAEIVRVQYDPKECSYQSLLDLFWSKHDPTTLNRQGNDVGTQYRSGIYFYNPEQEKLARESLERHQQQVDRKVVTEILPAKKFYRAEEHHQQYLSKGGRFGLKQSTEKGCNDPIRCYG

SEQ ID NO: 98880 - protein, 202 aa, Arabidopsis thaliana
  peptide (1)..(202): Ceres Seq. ID no. 13601682
  misc_feature (36)..(189): Pfam Name: Peptide methionine sulfoxide reductase Pfam Description: Peptide methionine sulfoxide reductase
  misc_feature (1)..(202): Homolog of NCBI NO: 18424492 NR Description: peptide methionine sulfoxide reductase - like [Arabidopsis thaliana] >gi|9758479|dbj|BAB09008.1| peptide sulfoxide reductase [Arabidopsis thaliana]
  misc_feature (1)..(202): Homolog of NCBI NO: 21592658 NR Description: peptide methionine sulfoxide reductase (msr)
  misc_feature (1)..(202): Homolog of NCBI NO: 15240796 NR Description: peptide methionine sulfoxide reductase (msr) thaliana] >gi|11278973|pir||T49886 peptide methionine sulfoxide
  misc_feature (1)..(202): Homolog of NCBI NO: 25308493 NR Description: protein-methionine-S-oxide reductase (EC 1.8.4.6)
  misc_feature (17)..(202): Homolog of NCBI NO: 26451744 NR Description: putative peptide methionine sulfoxide reductase
  misc_feature (1)..(202): Homolog of NCBI NO: 29469000 NR Description: peptide methionine sulfoxide reductase; cPMSR
  misc_feature (1)..(202): Homolog of NCBI NO: 12230349 NR Description: Peptide methionine sulfoxide reductase
  misc_feature (2)..(202): Homolog of NCBI NO: 21593143 NR Description: protein-methionine-S-oxide reductase [Arabidopsis
  misc_feature (2)..(202): Homolog of NCBI NO: 15234942 NR Description: protein-methionine-S-oxide reductase [Arabidopsis >gi|12644314|sp|P54150|MSRA_ARATH Peptide methionine sulfoxide
  misc_feature (2)..(202): Homolog of NCBI NO: 15146324 NR Description: AT4g25130/F13M23_270 [Arabidopsis thaliana]
MNILNKLGIGSSRQTNMDPSPIAQVIDDEAPAPGNQFTQFGAGCFWSVELAYQRVPGVTQTEVGYSQGITHDPSYKDVCSGTTNHAEIVRVQYDPKECSYQSLLDLFWSKHDPTTLNRQGNDVGTQYRSGIYFYNPEQEKLARESLERHQQQVDRKVVTEILPAKKFYRAEEHHQQYLSKGGRFGLKQSTEKGCNDPIRCYG

SEQ ID NO: 98881 - protein, 186 aa, Arabidopsis thaliana
  peptide (1)..(186): Ceres Seq. ID no. 13601683
  misc_feature (20)..(173): Pfam Name: Peptide methionine sulfoxide reductase Pfam Description: Peptide methionine sulfoxide reductase
  misc_feature (1)..(186): Homolog of NCBI NO: 18424492 NR Description: peptide methionine sulfoxide reductase - like [Arabidopsis thaliana] >gi|9758479|dbj|BAB09008.1| peptide sulfoxide reductase [Arabidopsis thaliana]
  misc_feature (1)..(186): Homolog of NCBI NO: 21592658 NR Description: peptide methionine sulfoxide reductase (msr)
  misc_feature (1)..(186): Homolog of NCBI NO: 15240796 NR Description: peptide methionine sulfoxide reductase (msr) thaliana] >gi|11278973|pir||T49886 peptide methionine sulfoxide
  misc_feature (1)..(186): Homolog of NCBI NO: 25308493 NR Description: protein-methionine-S-oxide reductase (EC 1.8.4.6)
  misc_feature (1)..(186): Homolog of NCBI NO: 26451744 NR Description: putative peptide methionine sulfoxide reductase
  misc_feature (1)..(186): Homolog of NCBI NO: 29469000 NR Description: peptide methionine sulfoxide reductase; cPMSR
  misc_feature (1)..(186): Homolog of NCBI NO: 12230349 NR Description: Peptide methionine sulfoxide reductase
  misc_feature (1)..(186): Homolog of NCBI NO: 21593143 NR Description: protein-methionine-S-oxide reductase [Arabidopsis
  misc_feature (1)..(186): Homolog of NCBI NO: 15234942 NR Description: protein-methionine-S-oxide reductase [Arabidopsis >gi|12644314|sp|P54150|MSRA_ARATH Peptide methionine sulfoxide
  misc_feature (1)..(186): Homolog of NCBI NO: 15146324 NR Description: AT4g25130/F13M23_270 [Arabidopsis thaliana]
MDPSPIAQVIDDEAPAPGNQFTQFGAGCFWSVELAYQRVPGVTQTEVGYSQGITHDPSYKDVCSGTTNHAEIVRVQYDPKECSYQSLLDLFWSKHDPTTLNRQGNDVGTQYRSGIYFYNPEQEKLARESLERHQQQVDRKVVTEILPAKKFYRAEEHHQQYLSKGGRFGLKQSTEKGCNDPIRCYG

SEQ ID NO: 98882 - DNA, 1130 bp, Arabidopsis thaliana
  misc_feature (1)..(1130): Ceres Seq. ID no. 13601688
  misc_feature: MA Experiment ID: 108464 Result: Down-regulated in Transcription
  misc_feature: MA Experiment 108464 PARAMETER Experiment Name: At_Germinating_Seeds_cDNA_P Parameter: Age (day) Value: 4 vs. 0
  misc_feature: MA Experiment 108464 PARAMETER Experiment Name: At_Germinating_Seeds_cDNA_P Parameter: Tissue Value: Germinating Seeds
  misc_feature: MA Experiment ID: 20000113 Result: Down-regulated in Transcription
  misc_feature: MA Experiment 20000113 PARAMETER Experiment Name: At_42deg_Heat_cDNA_P Parameter: Temperature (deg C) Value: 42 vs. 22
  misc_feature: MA Experiment 20000113 PARAMETER Experiment Name: At_42deg_Heat_cDNA_P Parameter: Timepoint (hr) Value: 8
  misc_feature: MA Experiment 20000113 PARAMETER Experiment Name: At_42deg_Heat_cDNA_P Parameter: Tissue Value: Aerial
aatcaacaattacacttattttgctatcgtttgagcatctcaaaaatttctccggggagatttgtttgtatatactcttccacaaagaagatgctcaaggtccctgaacaccaagttgctggtcacattgctagtgatgggaagctcggtccactcgtagatgaccaaggccggttcttcaagccacttcagggagattctcgtggcgaacacgaggctaagttctatgagtctttcacatcgaacatgaaggttccagatcacatccatagatacttcccggtgtatcacggcactcagctagttgaagcatctgatggatctggcaagcttcctcatcttgttcttgatgatgttgtttcagggtacgcaaacccgtcggtaatggatgttaagattggatctaggacatggtacccggatgtatcagaagaatacttcaagaaatgtattaagaaagatagacagaccaccacggtttcgttggggttcagggtttcaggttttaagatttttgatcaccaagaatcaagtttttggagagctgagaagaagcttgttcttgggtataatgcagatggtgctagattggctctgaggaagtttgtgtcatcgaactctcccgctgactctaacttgacaccaaactgtgcttttgcatcagaggtttatggcggttgtaacgggatcttagcgcagttgttggagcttaaagattggttcgaaacccaaacgctttaccatttcaattcctgctcgattctgatgatttacgagaatgaatcaatcttgatgcaaggaggagatgatgcaccggcaccacgggcacaagtgaagctggtggatttcgcgcatgttcttgatggaaacggtgtcatcgaccataatttcttgggtggactctgctctttcataaagttcatcaaagatattcttcagagcgttgaaaagcacgatgaaaccgatacttccctacttgagaacgggcgctagagaaacgtcgttcttcccggctccatttcaaataatctccaagtttttcctttcttggactagttgggttttggacatgaacgtttgtccctttcaattgtataatttcgttaactaaaccattgtactttctcatt

SEQ ID NO: 98883 - protein, 330 aa, Arabidopsis thaliana
  peptide (1)..(330): Ceres Seq. ID no. 13601689
  misc_feature (46)..(309): Pfam Name: Inositol polyphosphate kinase Pfam Description: Inositol polyphosphate kinase
  misc_feature (31)..(330): Homolog of NCBI NO: 15240350 NR Description: inositol polyphosphate 6-/3-/5-kinase 2b (IPK2b) thaliana] >gi|10176869|dbj|BAB10076.1| contains similarity to
  misc_feature (31)..(330): Homolog of NCBI NO: 21553994 NR Description: putative inositol hexaphosphate kinase
  misc_feature (32)..(317): Homolog of NCBI NO: 21592823 NR Description: putative inositol hexaphosphate kinase
  misc_feature (32)..(317): Homolog of NCBI NO: 15240776 NR Description: inositol polyphosphate 6-/3-/5-kinase 2a (IPK2a)
  misc_feature (32)..(317): Homolog of NCBI NO: 8919088 NR Description: putative inositol hexaphosphate kinase
  misc_feature (31)..(329): Homolog of NCBI NO: 13509208 NR Description: hypothetical protein [Linum usitatissimum]
  misc_feature (31)..(310): Homolog of NCBI NO: 13509210 NR Description: hypothetical protein [Linum usitatissimum]
  misc_feature (38)..(312): Homolog of NCBI NO: 21430778 NR Description: SD14726p [Drosophila melanogaster]
  misc_feature (38)..(312): Homolog of NCBI NO: 24580674 NR Description: CG13688-PA [Drosophila melanogaster]
  misc_feature (38)..(272): Homolog of NCBI NO: 31197471 NR Description: ENSANGP00000017094 [Anopheles gambiae]
NQQLHLFCYRLSISKISPGRFVCIYSSTKKMLKVPEHQVAGHIASDGKLGPLVDDQGRFFKPLQGDSRGEHEAKFYESFTSNMKVPDHIHRYFPVYHGTQLVEASDGSGKLPHLVLDDVVSGYANPSVMDVKIGSRTWYPDVSEEYFKKCIKKDRQTTTVSLGFRVSGFKIFDHQESSFWRAEKKLVLGYNADGARLALRKFVSSNSPADSNLTPNCAFASEVYGGCNGILAQLLELKDWFETQTLYHFNSCSILMIYENESILMQGGDDAPAPRAQVKLVDFAHVLDGNGVIDHNFLGGLCSFIKFIKDILQSVEKHDETDTSLLENGR

SEQ ID NO: 98884 - protein, 300 aa, Arabidopsis thaliana; identical to SEQ ID NO: 30774
  peptide (1)..(300): Ceres Seq. ID no. 13601690
  misc_feature (16)..(279): Pfam Name: Inositol polyphosphate kinase Pfam Description: Inositol polyphosphate kinase
  misc_feature (1)..(300): Homolog of NCBI NO: 15240350 NR Description: inositol polyphosphate 6-/3-/5-kinase 2b (IPK2b) thaliana] >gi|10176869|dbj|BAB10076.1| contains similarity to
  misc_feature (1)..(300): Homolog of NCBI NO: 21553994 NR Description: putative inositol hexaphosphate kinase
  misc_feature (2)..(287): Homolog of NCBI NO: 21592823 NR Description: putative inositol hexaphosphate kinase
  misc_feature (2)..(287): Homolog of NCBI NO: 15240776 NR Description: inositol polyphosphate 6-/3-/5-kinase 2a (IPK2a)
  misc_feature (2)..(287): Homolog of NCBI NO: 8919088 NR Description: putative inositol hexaphosphate kinase
  misc_feature (1)..(299): Homolog of NCBI NO: 13509208 NR Description: hypothetical protein [Linum usitatissimum]
  misc_feature (1)..(280): Homolog of NCBI NO: 13509210 NR Description: hypothetical protein [Linum usitatissimum]
  misc_feature (8)..(282): Homolog of NCBI NO: 21430778 NR Description: SD14726p [Drosophila melanogaster]
  misc_feature (8)..(282): Homolog of NCBI NO: 24580674 NR Description: CG13688-PA [Drosophila melanogaster]
  misc_feature (8)..(242): Homolog of NCBI NO: 31197471 NR Description: ENSANGP00000017094 [Anopheles gambiae]

SEQ ID NO: 98885 - protein, 248 aa, Arabidopsis thaliana; identical to SEQ ID NO: 30775
  peptide (1)..(248): Ceres Seq. ID no. 13601691
  misc_feature (1)..(227): Pfam Name: Inositol polyphosphate kinase Pfam Description: Inositol polyphosphate kinase
  misc_feature (1)..(248): Homolog of NCBI NO: 15240350 NR Description: inositol polyphosphate 6-/3-/5-kinase 2b (IPK2b) thaliana] >gi|10176869|dbj|BAB10076.1| contains similarity to
  misc_feature (1)..(248): Homolog of NCBI NO: 21553994 NR Description: putative inositol hexaphosphate kinase
  misc_feature (1)..(235): Homolog of NCBI NO: 21592823 NR Description: putative inositol hexaphosphate kinase
  misc_feature (1)..(235): Homolog of NCBI NO: 15240776 NR Description: inositol polyphosphate 6-/3-/5-kinase 2a (IPK2a)
  misc_feature (1)..(235): Homolog of NCBI NO: 8919088 NR Description: putative inositol hexaphosphate kinase
  misc_feature (1)..(247): Homolog of NCBI NO: 13509208 NR Description: hypothetical protein [Linum usitatissimum]
  misc_feature (1)..(228): Homolog of NCBI NO: 13509210 NR Description: hypothetical protein [Linum usitatissimum]
  misc_feature (1)..(230): Homolog of NCBI NO: 21430778 NR Description: SD14726p [Drosophila melanogaster]
  misc_feature (1)..(230): Homolog of NCBI NO: 24580674 NR Description: CG13688-PA [Drosophila melanogaster]
  misc_feature (1)..(190): Homolog of NCBI NO: 31197471 NR Description: ENSANGP00000017094 [Anopheles gambiae]

SEQ ID NO: 98886 - DNA, 1166 bp, Arabidopsis thaliana
  misc_feature (1)..(1166): Ceres Seq. ID no. 13601692
  misc_feature: MA Experiment ID: 108579 Result: Down-regulated in Transcription
  misc_feature: MA Experiment 108579 PARAMETER Experiment Name: At_4deg_Cold_cDNA_P Parameter: Temperature (deg C) Value: 4 vs. 22
  misc_feature: MA Experiment 108579 PARAMETER Experiment Name: At_4deg_Cold_cDNA_P Parameter: Timepoint (hr) Value: 6
  misc_feature: MA Experiment 108579 PARAMETER Experiment Name: At_4deg_Cold_cDNA_P Parameter: Tissue Value: Aerial
  misc_feature: MA Experiment ID: 20000171 Result: Up-regulated in Transcription
  misc_feature: MA Experiment 20000171 PARAMETER Experiment Name: At_42deg_Heat_P Parameter: Age (day) Value: 14
  misc_feature: MA Experiment 20000171 PARAMETER Experiment Name: At_42deg_Heat_P Parameter: Organism Value: A. thaliana
  misc_feature: MA Experiment 20000171 PARAMETER Experiment Name: At_42deg_Heat_P Parameter: Plant Line Value: WS
  misc_feature: MA Experiment 20000171 PARAMETER Experiment Name: At_42deg_Heat_P Parameter: Temperature (deg C) Value: 42 vs. 22
  misc_feature: MA Experiment 20000171 PARAMETER Experiment Name: At_42deg_Heat_P Parameter: Timepoint (hr) Value: 1
  misc_feature: MA Experiment 20000171 PARAMETER Experiment Name: At_42deg_Heat_P Parameter: Tissue Value: Aerial
  misc_feature: MA Experiment ID: 20000173 Result: Up-regulated in Transcription
  misc_feature: MA Experiment 20000173 PARAMETER Experiment Name: At_42deg_Heat_P Parameter: Age (day) Value: 14
  misc_feature: MA Experiment 20000173 PARAMETER Experiment Name: At_42deg_Heat_P Parameter: Organism Value: A. thaliana
  misc_feature: MA Experiment 20000173 PARAMETER Experiment Name: At_42deg_Heat_P Parameter: Plant Line Value: WS
  misc_feature: MA Experiment 20000173 PARAMETER Experiment Name: At_42deg_Heat_P Parameter: Temperature (deg C) Value: 42 vs. 22
  misc_feature: MA Experiment 20000173 PARAMETER Experiment Name: At_42deg_Heat_P Parameter: Timepoint (hr) Value: 6
  misc_feature: MA Experiment 20000173 PARAMETER Experiment Name: At_42deg_Heat_P Parameter: Tissue Value: Aerial
  misc_feature: MA Experiment ID: 20000234 Result: Up-regulated in Transcription
  misc_feature: MA Experiment 20000234 PARAMETER Experiment Name: At_Siliques_P Parameter: Age (day) Value: 21
  misc_feature: MA Experiment 20000234 PARAMETER Experiment Name: At_Siliques_P Parameter: Organism Value: A. thaliana
  misc_feature: MA Experiment 20000234 PARAMETER Experiment Name: At_Siliques_P Parameter: Plant Line Value: WS
  misc_feature: MA Experiment 20000234 PARAMETER Experiment Name: At_Siliques_P Parameter: Tissue Value: Less Than 5mm Siliques vs. Whole Plant
  misc_feature: MA Experiment ID: 20000264 Result: Up-regulated in Transcription
  misc_feature: MA Experiment 20000264 PARAMETER Experiment Name: At_Open_Flower_P Parameter: Age (day) Value: 21
  misc_feature: MA Experiment 20000264 PARAMETER Experiment Name: At_Open_Flower_P Parameter: Plant Line Value: WS
  misc_feature: MA Experiment 20000264 PARAMETER Experiment Name: At_Open_Flower_P Parameter: Tissue Value: Open Flower vs. Whole Plant
  misc_feature: MA Experiment ID: 20000265 Result: Up-regulated in Transcription
  misc_feature: MA Experiment 20000265 PARAMETER Experiment Name: At_Open_Flower_P Parameter: Age (day) Value: 21
  misc_feature: MA Experiment 20000265 PARAMETER Experiment Name: At_Open_Flower_P Parameter: Plant Line Value: WS
  misc_feature: MA Experiment 20000265 PARAMETER Experiment Name: At_Open_Flower_P Parameter: Tissue Value: Closed Flower vs. Whole Plant
  misc_feature: MA Experiment ID: 20000286 Result: Up-regulated in Transcription
  misc_feature: MA Experiment 20000286 PARAMETER Experiment Name: At_Open_Flower_P Parameter: Age (day) Value: 21
  misc_feature: MA Experiment 20000286 PARAMETER Experiment Name: At_Open_Flower_P Parameter: Plant Line Value: WS
  misc_feature: MA Experiment 20000286 PARAMETER Experiment Name: At_Open_Flower_P Parameter: Tissue Value: Half Open vs. Whole Plant
  misc_feature: MA Experiment ID: 20000794 Result: Up-regulated in Transcription
  misc_feature: MA Experiment 20000794 PARAMETER Experiment Name: At_Petals_P Parameter: Age (day) Value: 23-25 days
  misc_feature: MA Experiment 20000794 PARAMETER Experiment Name: At_Petals_P Parameter: Plant Line Value: WS
  misc_feature: MA Experiment 20000794 PARAMETER Experiment Name: At_Petals_P Parameter: Tissue Value: Petals vs. Whole plant
acacccaaacacgcgacgcgagcgaagaagacgatgacgaacaaggagaaagctcgagagagaagggagaaaagaatgcaggagatctctctccttcgaactattccttactctgaccaccataggtggtggtcttgtgaaaatgtagcagtagtgactggttcaaaccgcgggattggattcgagattgcaagacagcttgcggttcacggattgacggttgttcttacagctagaaacgtgaatgctggtcttgaagcagttaaatctttgaggcaccaagaagaaggtctcaaggtttattttcatcaacttgatgtcacagactcttcgtcgattagagagtttggttgctggcttaagcaaacatttggaggtttagatattctcgtgaataatgcaggtgttaactacaatctcggctcagataatacggttgaatttgctgaaacagttatatctactaactaccaaggaaccaaaaacatgacaaaagctatgatacccttgatgagaccatctcctcatggcgctcgtgtagtcaatgttagttctcggctaggtagagtaaatggaagacgtaatagactggcaaatgtagagttgagagatcagctaagcagtccagatttgctgaccgaggaacttatagacagaactgtctctaaattcatcaaccaagtaaaagacggaacttgggaatcaggcgggtggcctcagacattcactgactactccatgtctaagcttgcagtcaatgcttacacgagactaatggcaaaagaacttgagagacgaggagaggaagagaagatttatgttaacagcttttgccctggttgggtgaagactgcgatgactggctacgccggaaatatgccacctgaagatgcagctgatactggagtttggcttagcctggtcctttccgaagaggcagtaaccggaaaattcttcgcagagagacgtgagatcaacttctgagggttgttgaatgtttgtaaacgttggaatagattgtgtcgtcttcgtttagtgccatagttttagtcaaaggtttacaaaatcaattgtaattggtaagtgaatggttgtagtcatgatacgcgtcagatttgccacaaaactaggagtttataatttaaatataattaatttttaattgc

SEQ ID NO: 98887 - protein, 327 aa, Arabidopsis thaliana
  peptide (1)..(327): Ceres Seq. ID no. 13601693
  misc_feature (12)..(327): Homolog of NCBI NO: 15240361 NR Description: short-chain dehydrogenase/reductase family
  misc_feature (26)..(327): Homolog of NCBI NO: 10176876 NR Description: carbonyl reductase-like protein [Arabidopsis
  misc_feature (14)..(327): Homolog of NCBI NO: 15241346 NR Description: short-chain dehydrogenase/reductase family protein
  misc_feature (15)..(327): Homolog of NCBI NO: 34907100 NR Description: putative carbonyl reductase-like protein [Oryza
  misc_feature (38)..(319): Homolog of NCBI NO: 21740778 NR Description: OSJNBa0067K08.19 [Oryza sativa (japonica
  misc_feature (37)..(319): Homolog of NCBI NO: 15231739 NR Description: short-chain dehydrogenase/reductase family [Arabidopsis thaliana] >gi|11358058|pir||T49312 hypothetical
  misc_feature (145)..(327): Homolog of NCBI NO: 38346768 NR Description: OSJNBa0081C01.19 [Oryza sativa (japonica
  misc_feature (47)..(137): Homolog of NCBI NO: 38346768 NR Description: OSJNBa0081C01.19 [Oryza sativa (japonica
  misc_feature (145)..(319): Homolog of NCBI NO: 33146492 NR Description: carbonyl reductase -like protein [Oryza sativa
  misc_feature (26)..(136): Homolog of NCBI NO: 33146492 NR Description: carbonyl reductase -like protein [Oryza sativa
TPKHATRAKKTMTNKEKARERREKRMQEISLLRTIPYSDHHRWWSCENVAVVTGSNRGIGFEIARQLAVHGLTVVLTARNVNAGLEAVKSLRHQEEGLKVYFHQLDVTDSSSIREFGCWLKQTFGGLDILVNNAGVNYNLGSDNTVEFAETVISTNYQGTKNMTKAMIPLMRPSPHGARVVNVSSRLGRVNGRRNRLANVELRDQLSSPDLLTEELIDRTVSKFINQVKDGTWESGGWPQTFTDYSMSKLAVNAYTRLMAKELERRGEEEKIYVNSFCPGWVKTAMTGYAGNMPPEDAADTGVWLSLVLSEEAVTGKFFAERREINF

SEQ ID NO: 98888 - protein, 316 aa, Arabidopsis thaliana
  peptide (1)..(316): Ceres Seq. ID no. 13601694
  misc_feature (1)..(316): Homolog of NCBI NO: 15240361 NR Description: short-chain dehydrogenase/reductase family
  misc_feature (15)..(316): Homolog of NCBI NO: 10176876 NR Description: carbonyl reductase-like protein [Arabidopsis
  misc_feature (3)..(316): Homolog of NCBI NO: 15241346 NR Description: short-chain dehydrogenase/reductase family protein
  misc_feature (4)..(316): Homolog of NCBI NO: 34907100 NR Description: putative carbonyl reductase-like protein [Oryza
  misc_feature (27)..(308): Homolog of NCBI NO: 21740778 NR Description: OSJNBa0067K08.19 [Oryza sativa (japonica
  misc_feature (26)..(308): Homolog of NCBI NO: 15231739 NR Description: short-chain dehydrogenase/reductase family [Arabidopsis thaliana] >gi|11358058|pir||T49312 hypothetical
  misc_feature (134)..(316): Homolog of NCBI NO: 38346768 NR Description: OSJNBa0081C01.19 [Oryza sativa (japonica
  misc_feature (36)..(126): Homolog of NCBI NO: 38346768 NR Description: OSJNBa0081C01.19 [Oryza sativa (japonica
  misc_feature (134)..(308): Homolog of NCBI NO: 33146492 NR Description: carbonyl reductase -like protein [Oryza sativa
  misc_feature (15)..(125): Homolog of NCBI NO: 33146492 NR Description: carbonyl reductase -like protein [Oryza sativa
MTNKEKARERREKRMQEISLLRTIPYSDHHRWWSCENVAVVTGSNRGIGFEIARQLAVHGLTVVLTARNVNAGLEAVKSLRHQEEGLKVYFHQLDVTDSSSIREFGCWLKQTFGGLDILVNNAGVNYNLGSDNTVEFAETVISTNYQGTKNMTKAMIPLMRPSPHGARVVNVSSRLGRVNGRRNRLANVELRDQLSSPDLLTEELIDRTVSKFINQVKDGTWESGGWPQTFTDYSMSKLAVNAYTRLMAKELERRGEEEKIYVNSFCPGWVKTAMTGYAGNMPPEDAADTGVWLSLVLSEEAVTGKFFAERREINF

SEQ ID NO: 98889 - protein, 302 aa, Arabidopsis thaliana
  peptide (1)..(302): Ceres Seq. ID no. 13601695
  misc_feature (1)..(302): Homolog of NCBI NO: 15240361 NR Description: short-chain dehydrogenase/reductase family
  misc_feature (1)..(302): Homolog of NCBI NO: 10176876 NR Description: carbonyl reductase-like protein [Arabidopsis
  misc_feature (1)..(302): Homolog of NCBI NO: 15241346 NR Description: short-chain dehydrogenase/reductase family protein
  misc_feature (1)..(302): Homolog of NCBI NO: 34907100 NR Description: putative carbonyl reductase-like protein [Oryza
  misc_feature (13)..(294): Homolog of NCBI NO: 21740778 NR Description: OSJNBa0067K08.19 [Oryza sativa (japonica
  misc_feature (12)..(294): Homolog of NCBI NO: 15231739 NR Description: short-chain dehydrogenase/reductase family [Arabidopsis thaliana] >gi|11358058|pir||T49312 hypothetical
  misc_feature (120)..(302): Homolog of NCBI NO: 38346768 NR Description: OSJNBa0081C01.19 [Oryza sativa (japonica
  misc_feature (22)..(112): Homolog of NCBI NO: 38346768 NR Description: OSJNBa0081C01.19 [Oryza sativa (japonica
  misc_feature (120)..(294): Homolog of NCBI NO: 33146492 NR Description: carbonyl reductase -like protein [Oryza sativa
  misc_feature (1)..(111): Homolog of NCBI NO: 33146492 NR Description: carbonyl reductase -like protein [Oryza sativa
MQEISLLRTIPYSDHHRWWSCENVAVVTGSNRGIGFEIARQLAVHGLTVVLTARNVNAGLEAVKSLRHQEEGLKVYFHQLDVTDSSSIREFGCWLKQTFGGLDILVNNAGVNYNLGSDNTVEFAETVISTNYQGTKNMTKAMIPLMRPSPHGARVVNVSSRLGRVNGRRNRLANVELRDQLSSPDLLTEELIDRTVSKFINQVKDGTWESGGWPQTFTDYSMSKLAVNAYTRLMAKELERRGEEEKIYVNSFCPGWVKTAMTGYAGNMPPEDAADTGVWLSLVLSEEAVTGKFFAERREINF

SEQ ID NO: 98890 - DNA, 1669 bp, Arabidopsis thaliana
  misc_feature (1)..(1669): Ceres Seq. ID no. 13601696
  misc_feature: MA Experiment ID: 108569 Result: Up-regulated in Transcription
  misc_feature: MA Experiment 108569 PARAMETER Experiment Name: At_0.001%_MeJA__cDNA_P Parameter: Timepoint (hr) Value: 6
  misc_feature: MA Experiment 108569 PARAMETER Experiment Name: At_0.001%_MeJA__cDNA_P Parameter: Tissue Value: Aerial
  misc_feature: MA Experiment 108569 PARAMETER Experiment Name: At_0.001%_MeJA__cDNA_P Parameter: Treatment Value: 0.001% MeJA vs. No Treatment
  misc_feature: MA Experiment ID: 20000111 Result: Up-regulated in Transcription
  misc_feature: MA Experiment 20000111 PARAMETER Experiment Name: At_42deg_Heat_cDNA_P Parameter: Temperature (deg C) Value: 42 vs. 22
  misc_feature: MA Experiment 20000111 PARAMETER Experiment Name: At_42deg_Heat_cDNA_P Parameter: Timepoint (hr) Value: 6
  misc_feature: MA Experiment 20000111 PARAMETER Experiment Name: At_42deg_Heat_cDNA_P Parameter: Tissue Value: Aerial
  misc_feature: MA Experiment ID: 20000112 Result: Up-regulated in Transcription
  misc_feature: MA Experiment 20000112 PARAMETER Experiment Name: At_42deg_Heat_cDNA_P Parameter: Temperature (deg C) Value: 42 vs. 22
  misc_feature: MA Experiment 20000112 PARAMETER Experiment Name: At_42deg_Heat_cDNA_P Parameter: Timepoint (hr) Value: 2
  misc_feature: MA Experiment 20000112 PARAMETER Experiment Name: At_42deg_Heat_cDNA_P Parameter: Tissue Value: Aerial
  misc_feature: MA Experiment ID: 20000180 Result: Up-regulated in Transcription
  misc_feature: MA Experiment 20000180 PARAMETER Experiment Name: At_Germinating_Seeds_P Parameter: Age (hr) Value: 24 vs. 0
  misc_feature: MA Experiment 20000180 PARAMETER Experiment Name: At_Germinating_Seeds_P Parameter: Tissue Value: Germinating Seeds
  misc_feature: MA Experiment ID: 20000495 Result: Up-regulated in Transcription
  misc_feature: MA Experiment 20000495 PARAMETER Experiment Name: At_Guard_Cells_P Parameter: Harvest Date Value: 8/2/2002
  misc_feature: MA Experiment 20000495 PARAMETER Experiment Name: At_Guard_Cells_P Parameter: Organism Value: A. thaliana
  misc_feature: MA Experiment 20000495 PARAMETER Experiment Name: At_Guard_Cells_P Parameter: Tissue Value: Guard Cells vs. Leaves
atcttcaaatgaaaatcgctgggctctcgctgtcaacgctgggcgtgagtgagatctaacaatcggtagcgaattttgtaaattttgttccggttttgaagtctcaatctcggggttccggttttagcaactacttcttctgacatttcagctgttctagttgatctttatatactttatatgatctgggattttgaagagtttttagggaggaaccaaaatttctgagagagaaaaatgaagttatcgagctgcgttttgatcttccttctatgtaacacattctcctcgatttctgctttccgtctgagtcggagtcaaccaactgagcgaatttcaggtagtgctggtgatgtgttggaagatgatcccgtgggaagactgaaagtctttgtttatgagcttccaagtaaatacaacaagaagatacttcagaaggatccgagatgtctaaaccacatgtttgctgctgagatatatatgcaacggtttcttttatctagcccagttcgaacacttaatcccgaggaagctgattggttctacgtacctgtgtacaccacttgtgatctcacgcctaatgggcttcctcttccttttaaatctccacgaatgatgagaagtgccattcagcttattgcttccaattggccatactggaatcgcacagaaggagcagaccacttctttgttgtgcctcatgactttggagcctgtttccattatcaagaagagaaggcaataggaagaggaatactacccttgcttcaacgagctacactggtgcagacatttggacaaaggaatcatgtttgcttgaaagaaggttcaatcactgttcctccatatgctccaccacagaagatgcagtcacacttaattcccgaaaaaactcctcgatccatcttcgtttatttcagaggattgttttatgatgtgggaaatgaccctgagggtggttattatgcgaggggtgcaagagcagctgtatgggaaaacttcaaagacaatccgctgtttgacatctcaacagagcacccaacaacatattatgaggacatgcagagagcaatcttctgcctatgcccacttggatgggccccatggagtccaagactggtggaagcagtgatattcggttgcatccctgtgatcatagcagacgacatcgtgttaccttttgcagatgcaatcccttgggaagatattggtgtgtttgtggatgagaaagatgtcccttacctggacacaatactcacatcgatcccaccagaggttatactgagaaaacagaggttgttggcaaacccgtcgatgaaacaagccatgctgttcccgcaaccggctcaaccaggggatgcgtttcatcaagtattgaatgggttggctcgtaagctgcctcatgagaggagtgtgtatctgagaccaggtgagaagctgttgaactggacggcaggaccggtcgctgatctgaaaccttggtaaggaccagtgttggaatttgattgaatgagctattgtttggttggtttctgtcttctcgtgtctgtattttgtagaatcataacttttttttgctatgtagaagggaaaaagctttgtcattgtaatgtaactagaatccttttgacatctcacgagaaagacaagtaaaagaaaaattattgtt

SEQ ID NO: 98891 - protein, 415 aa, Arabidopsis thaliana; identical to SEQ ID NO: 22908
  peptide (1)..(415): Ceres Seq. ID no. 13601697
  misc_feature (51)..(355): Pfam Name: Exostosin family Pfam Description: Exostosin family
  misc_feature (1)..(415): Homolog of NCBI NO: 18424516 NR Description: (AtGUT1) NpGUT1 homolog [Arabidopsis thaliana] AT5g61840/mac9_140 [Arabidopsis thaliana]
  misc_feature (1)..(415): Homolog of NCBI NO: 21592991 NR Description: unknown [Arabidopsis thaliana]
  misc_feature (1)..(415): Homolog of NCBI NO: 15223522 NR Description: hypothetical protein [Arabidopsis thaliana]
  misc_feature (1)..(415): Homolog of NCBI NO: 34907048 NR Description: contains EST D24978(R2878)~similar to Arabidopsis
  misc_feature (1)..(415): Homolog of NCBI NO: 34907046 NR Description: contains EST D39982(S1682)~similar to Arabidopsis
  misc_feature (75)..(415): Homolog of NCBI NO: 10176877 NR Description: gb|AAC80624.1~gene_id:MAC9.17~strong similarity unknown protein [Arabidopsis thaliana]
  misc_feature (75)..(415): Homolog of NCBI NO: 23821292 NR Description: pectin-glucuronyltransferase [Nicotiana
  misc_feature (3)..(415): Homolog of NCBI NO: 34907044 NR Description: hypothetical protein~similar to Arabidopsis
  misc_feature (7)..(415): Homolog of NCBI NO: 37531708 NR Description: unknown protein [Oryza sativa (japonica
  misc_feature (7)..(415): Homolog of NCBI NO: 18642697 NR Description: Unknown protein [Oryza sativa]

SEQ ID NO: 98892 - protein, 341 aa, Arabidopsis thaliana; identical to SEQ ID NO: 22909
  peptide (1)..(341): Ceres Seq. ID no. 13601698
  misc_feature (1)..(281): Pfam Name: Exostosin family Pfam Description: Exostosin family
  misc_feature (1)..(341): Homolog of NCBI NO: 18424516 NR Description: (AtGUT1) NpGUT1 homolog [Arabidopsis thaliana] AT5g61840/mac9_140 [Arabidopsis thaliana]
  misc_feature (1)..(341): Homolog of NCBI NO: 21592991 NR Description: unknown [Arabidopsis thaliana]
  misc_feature (1)..(341): Homolog of NCBI NO: 15223522 NR Description: hypothetical protein [Arabidopsis thaliana]
  misc_feature (1)..(341): Homolog of NCBI NO: 34907048 NR Description: contains EST D24978(R2878)~similar to Arabidopsis
  misc_feature (1)..(341): Homolog of NCBI NO: 34907046 NR Description: contains EST D39982(S1682)~similar to Arabidopsis
  misc_feature (1)..(341): Homolog of NCBI NO: 10176877 NR Description: gb|AAC80624.1~gene_id:MAC9.17~strong similarity unknown protein [Arabidopsis thaliana]
  misc_feature (1)..(341): Homolog of NCBI NO: 23821292 NR Description: pectin-glucuronyltransferase [Nicotiana
  misc_feature (1)..(341): Homolog of NCBI NO: 34907044 NR Description: hypothetical protein~similar to Arabidopsis
  misc_feature (1)..(341): Homolog of NCBI NO: 37531708 NR Description: unknown protein [Oryza sativa (japonica
  misc_feature (1)..(341): Homolog of NCBI NO: 18642697 NR Description: Unknown protein [Oryza sativa]

SEQ ID NO: 98893 - protein, 334 aa, Arabidopsis thaliana; identical to SEQ ID NO: 22910
  peptide (1)..(334): Ceres Seq. ID no. 13601699
  misc_feature (1)..(274): Pfam Name: Exostosin family Pfam Description: Exostosin family
  misc_feature (1)..(334): Homolog of NCBI NO: 18424516 NR Description: (AtGUT1) NpGUT1 homolog [Arabidopsis thaliana] AT5g61840/mac9_140 [Arabidopsis thaliana]
  misc_feature (1)..(334): Homolog of NCBI NO: 21592991 NR Description: unknown [Arabidopsis thaliana]
  misc_feature (1)..(334): Homolog of NCBI NO: 15223522 NR Description: hypothetical protein [Arabidopsis thaliana]
  misc_feature (1)..(334): Homolog of NCBI NO: 34907048 NR Description: contains EST D24978(R2878)~similar to Arabidopsis
  misc_feature (1)..(334): Homolog of NCBI NO: 34907046 NR Description: contains EST D39982(S1682)~similar to Arabidopsis
  misc_feature (1)..(334): Homolog of NCBI NO: 10176877 NR Description: gb|AAC80624.1~gene_id:MAC9.17~strong similarity unknown protein [Arabidopsis thaliana]
  misc_feature (1)..(334): Homolog of NCBI NO: 23821292 NR Description: pectin-glucuronyltransferase [Nicotiana
  misc_feature (1)..(334): Homolog of NCBI NO: 34907044 NR Description: hypothetical protein~similar to Arabidopsis
  misc_feature (1)..(334): Homolog of NCBI NO: 37531708 NR Description: unknown protein [Oryza sativa (japonica
  misc_feature (1)..(334): Homolog of NCBI NO: 18642697 NR Description: Unknown protein [Oryza sativa]

SEQ ID NO: 98894 - DNA, 1136 bp, Arabidopsis thaliana
  misc_feature (1)..(1136): Ceres Seq. ID no. 13601700
  misc_feature: MA Experiment ID: 108463 Result: Up-regulated in Transcription
  misc_feature: MA Experiment 108463 PARAMETER Experiment Name: At_Germinating_Seeds_cDNA_P Parameter: Age (day) Value: 3 vs. 0
  misc_feature: MA Experiment 108463 PARAMETER Experiment Name: At_Germinating_Seeds_cDNA_P Parameter: Tissue Value: Germinating Seeds
  misc_feature: MA Experiment ID: 108488 Result: Down-regulated in Transcription
  misc_feature: MA Experiment ID: 108561 Result: Up-regulated in Transcription
  misc_feature: MA Experiment 108561 PARAMETER Experiment Name: At_100uM_ABA_cDNA_P Parameter: Timepoint (hr) Value: 6
  misc_feature: MA Experiment 108561 PARAMETER Experiment Name: At_100uM_ABA_cDNA_P Parameter: Tissue Value: Aerial
  misc_feature: MA Experiment 108561 PARAMETER Experiment Name: At_100uM_ABA_cDNA_P Parameter: Treatment Value: 100uM ABA vs. No Treatment
  misc_feature: MA Experiment ID: 108572 Result: Up-regulated in Transcription
  misc_feature: MA Experiment 108572 PARAMETER Experiment Name: At_Drought_cDNA_P Parameter: Timepoint (hr) Value: 1
  misc_feature: MA Experiment 108572 PARAMETER Experiment Name: At_Drought_cDNA_P Parameter: Tissue Value: Aerial
  misc_feature: MA Experiment 108572 PARAMETER Experiment Name: At_Drought_cDNA_P Parameter: Treatment Value: Drought vs. No Drought
  misc_feature: MA Experiment ID: 108573 Result: Up-regulated in Transcription
  misc_feature: MA Experiment 108573 PARAMETER Experiment Name: At_Drought_cDNA_P Parameter: Timepoint (hr) Value: 6
  misc_feature: MA Experiment 108573 PARAMETER Experiment Name: At_Drought_cDNA_P Parameter: Tissue Value: Aerial
  misc_feature: MA Experiment 108573 PARAMETER Experiment Name: At_Drought_cDNA_P Parameter: Treatment Value: Drought vs. No Drought
  misc_feature: MA Experiment ID: 108576 Result: Up-regulated in Transcription
  misc_feature: MA Experiment 108576 PARAMETER Experiment Name: At_42deg_Heat_cDNA_P Parameter: Temperature (deg C) Value: 42 vs. 22
  misc_feature: MA Experiment 108576 PARAMETER Experiment Name: At_42deg_Heat_cDNA_P Parameter: Timepoint (hr) Value: 1
  misc_feature: MA Experiment 108576 PARAMETER Experiment Name: At_42deg_Heat_cDNA_P Parameter: Tissue Value: Aerial
  misc_feature: MA Experiment ID: 108595 Result: Up-regulated in Transcription
  misc_feature: MA Experiment 108595 PARAMETER Experiment Name: At_Ler-pi_Ovule_cDNA_P Parameter: Plant Line Value: null
  misc_feature: MA Experiment ID: 108607 Result: Up-regulated in Transcription
  misc_feature: MA Experiment 108607 PARAMETER Experiment Name: At_100uM_ABA_cDNA_P Parameter: Timepoint (hr) Value: 4
  misc_feature: MA Experiment 108607 PARAMETER Experiment Name: At_100uM_ABA_cDNA_P Parameter: Tissue Value: Aerial
  misc_feature: MA Experiment 108607 PARAMETER Experiment Name: At_100uM_ABA_cDNA_P Parameter: Treatment Value: 100uM ABA vs. No Treatment
  misc_feature: MA Experiment ID: 20000093 Result: Up-regulated in Transcription
  misc_feature: MA Experiment 20000093 PARAMETER Experiment Name: At_42deg_Heat_cDNA_P Parameter: Temperature (deg C) Value: 42 vs. 22
  misc_feature: MA Experiment 20000093 PARAMETER Experiment Name: At_42deg_Heat_cDNA_P Parameter: Timepoint (hr) Value: 0.5
  misc_feature: MA Experiment 20000093 PARAMETER Experiment Name: At_42deg_Heat_cDNA_P Parameter: Tissue Value: Aerial
  misc_feature: MA Experiment ID: 20000111 Result: Up-regulated in Transcription
  misc_feature: MA Experiment 20000111 PARAMETER Experiment Name: At_42deg_Heat_cDNA_P Parameter: Temperature (deg C) Value: 42 vs. 22
  misc_feature: MA Experiment 20000111 PARAMETER Experiment Name: At_42deg_Heat_cDNA_P Parameter: Timepoint (hr) Value: 6
  misc_feature: MA Experiment 20000111 PARAMETER Experiment Name: At_42deg_Heat_cDNA_P Parameter: Tissue Value: Aerial
  misc_feature: MA Experiment ID: 20000112 Result: Up-regulated in Transcription
  misc_feature: MA Experiment 20000112 PARAMETER Experiment Name: At_42deg_Heat_cDNA_P Parameter: Temperature (deg C) Value: 42 vs. 22
  misc_feature: MA Experiment 20000112 PARAMETER Experiment Name: At_42deg_Heat_cDNA_P Parameter: Timepoint (hr) Value: 2
  misc_feature: MA Experiment 20000112 PARAMETER Experiment Name: At_42deg_Heat_cDNA_P Parameter: Tissue Value: Aerial
  misc_feature: MA Experiment ID: 20000113 Result: Up-regulated in Transcription
  misc_feature: MA Experiment 20000113 PARAMETER Experiment Name: At_42deg_Heat_cDNA_P Parameter: Temperature (deg C) Value: 42 vs. 22
  misc_feature: MA Experiment 20000113 PARAMETER Experiment Name: At_42deg_Heat_cDNA_P Parameter: Timepoint (hr) Value: 8
  misc_feature: MA Experiment 20000113 PARAMETER Experiment Name: At_42deg_Heat_cDNA_P Parameter: Tissue Value: Aerial
  misc_feature: MA Experiment ID: 20000171 Result: Up-regulated in Transcription
  misc_feature: MA Experiment 20000171 PARAMETER Experiment Name: At_42deg_Heat_P Parameter: Age (day) Value: 14
  misc_feature: MA Experiment 20000171 PARAMETER Experiment Name: At_42deg_Heat_P Parameter: Organism Value: A. thaliana
  misc_feature: MA Experiment 20000171 PARAMETER Experiment Name: At_42deg_Heat_P Parameter: Plant Line Value: WS
  misc_feature: MA Experiment 20000171 PARAMETER Experiment Name: At_42deg_Heat_P Parameter: Temperature (deg C) Value: 42 vs. 22
  misc_feature: MA Experiment 20000171 PARAMETER Experiment Name: At_42deg_Heat_P Parameter: Timepoint (hr) Value: 1
  misc_feature: MA Experiment 20000171 PARAMETER Experiment Name: At_42deg_Heat_P Parameter: Tissue Value: Aerial
  misc_feature: MA Experiment ID: 20000173 Result: Up-regulated in Transcription
  misc_feature: MA Experiment 20000173 PARAMETER Experiment Name: At_42deg_Heat_P Parameter: Age (day) Value: 14
  misc_feature: MA Experiment 20000173 PARAMETER Experiment Name: At_42deg_Heat_P Parameter: Organism Value: A. thaliana
  misc_feature: MA Experiment 20000173 PARAMETER Experiment Name: At_42deg_Heat_P Parameter: Plant Line Value: WS
  misc_feature: MA Experiment 20000173 PARAMETER Experiment Name: At_42deg_Heat_P Parameter: Temperature (deg C) Value: 42 vs. 22
  misc_feature: MA Experiment 20000173 PARAMETER Experiment Name: At_42deg_Heat_P Parameter: Timepoint (hr) Value: 6
  misc_feature: MA Experiment 20000173 PARAMETER Experiment Name: At_42deg_Heat_P Parameter: Tissue Value: Aerial
  misc_feature: MA Experiment ID: 20000179 Result: Up-regulated in Transcription
  misc_feature: MA Experiment 20000179 PARAMETER Experiment Name: At_Germinating_Seeds_P Parameter: Age (hr) Value: 6 vs. 0
  misc_feature: MA Experiment 20000179 PARAMETER Experiment Name: At_Germinating_Seeds_P Parameter: Tissue Value: Germinating Seeds
  misc_feature: MA Experiment ID: 20000234 Result: Down-regulated in Transcription
  misc_feature: MA Experiment 20000234 PARAMETER Experiment Name: At_Siliques_P Parameter: Age (day) Value: 21
  misc_feature: MA Experiment 20000234 PARAMETER Experiment Name: At_Siliques_P Parameter: Organism Value: A. thaliana
  misc_feature: MA Experiment 20000234 PARAMETER Experiment Name: At_Siliques_P Parameter: Plant Line Value: WS
  misc_feature: MA Experiment 20000234 PARAMETER Experiment Name: At_Siliques_P Parameter: Tissue Value: Less Than 5mm Siliques vs. Whole Plant
  misc_feature: MA Experiment ID: 20000235 Result: Down-regulated in Transcription
  misc_feature: MA Experiment 20000235 PARAMETER Experiment Name: At_Siliques_P Parameter: Age (day) Value: 21
  misc_feature: MA Experiment 20000235 PARAMETER Experiment Name: At_Siliques_P Parameter: Organism Value: A. thaliana
  misc_feature: MA Experiment 20000235 PARAMETER Experiment Name: At_Siliques_P Parameter: Plant Line Value: WS
  misc_feature: MA Experiment 20000235 PARAMETER Experiment Name: At_Siliques_P Parameter: Tissue Value: 5-10mm Siliques vs. Whole Plant
  misc_feature: MA Experiment ID: 20000436 Result: Up-regulated in Transcription
  misc_feature: MA Experiment 20000436 PARAMETER Experiment Name: At_Drought_P Parameter: Age (day) Value: 7
  misc_feature: MA Experiment 20000436 PARAMETER Experiment Name: At_Drought_P Parameter: Organism Value: A. thaliana
  misc_feature: MA Experiment 20000436 PARAMETER Experiment Name: At_Drought_P Parameter: Plant Line Value: WS
  misc_feature: MA Experiment 20000436 PARAMETER Experiment Name: At_Drought_P Parameter: Timepoint (hr) Value: 12
  misc_feature: MA Experiment 20000436 PARAMETER Experiment Name: At_Drought_P Parameter: Tissue Value: Whole Plant
  misc_feature: MA Experiment 20000436 PARAMETER Experiment Name: At_Drought_P Parameter: Treatment Value: Drought vs. No Drought
  misc_feature: MA Experiment ID: 20000437 Result: Up-regulated in Transcription
  misc_feature: MA Experiment 20000437 PARAMETER Experiment Name: At_Drought_P Parameter: Age (day) Value: 8
  misc_feature: MA Experiment 20000437 PARAMETER Experiment Name: At_Drought_P Parameter: Organism Value: A. thaliana
  misc_feature: MA Experiment 20000437 PARAMETER Experiment Name: At_Drought_P Parameter: Plant Line Value: WS
  misc_feature: MA Experiment 20000437 PARAMETER Experiment Name: At_Drought_P Parameter: Timepoint (hr) Value: 24
  misc_feature: MA Experiment 20000437 PARAMETER Experiment Name: At_Drought_P Parameter: Tissue Value: Whole Plant
  misc_feature: MA Experiment 20000437 PARAMETER Experiment Name: At_Drought_P Parameter: Treatment Value: Drought vs. No Drought
  misc_feature: MA Experiment ID: 20000441 Result: Up-regulated in Transcription
  misc_feature: MA Experiment 20000441 PARAMETER Experiment Name: At_1uM_BR-BRZ__P Parameter: Tissue Value: Shoot Apices
  misc_feature: MA Experiment 20000441 PARAMETER Experiment Name: At_1uM_BR-BRZ__P Parameter: Treatment Value: 1uM BR vs. No Treatment
  misc_feature: MA Experiment ID: 20000460 Result: Up-regulated in Transcription
  misc_feature: MA Experiment 20000460 PARAMETER Experiment Name: At_10percent_PEG_P Parameter: Age (day) Value: 12
  misc_feature: MA Experiment 20000460 PARAMETER Experiment Name: At_10percent_PEG_P Parameter: Organism Value: A. thaliana
  misc_feature: MA Experiment 20000460 PARAMETER Experiment Name: At_10percent_PEG_P Parameter: Plant Line Value: WS
  misc_feature: MA Experiment 20000460 PARAMETER Experiment Name: At_10percent_PEG_P Parameter: Timepoint (day) Value: 12
  misc_feature: MA Experiment 20000460 PARAMETER Experiment Name: At_10percent_PEG_P Parameter: Tissue Value: Whole Plant
  misc_feature: MA Experiment 20000460 PARAMETER Experiment Name: At_10percent_PEG_P Parameter: Treatment Value: 10percent PEG vs. No Treatment
  misc_feature: MA Experiment ID: 20000573 Result: Down-regulated in Transcription
  misc_feature: MA Experiment 20000573 PARAMETER Experiment Name: At_100uM_ABA_Mutants__P Parameter: Organism Value: A. thaliana
  misc_feature: MA Experiment 20000573 PARAMETER Experiment Name: At_100uM_ABA_Mutants__P Parameter: Plant Line Value: CS22 vs. Ler wt
  misc_feature: MA Experiment 20000573 PARAMETER Experiment Name: At_100uM_ABA_Mutants__P Parameter: Timepoint (hr) Value: N/A
  misc_feature: MA Experiment 20000573 PARAMETER Experiment Name: At_100uM_ABA_Mutants__P Parameter: Tissue Value: Whole Plant
  misc_feature: MA Experiment 20000573 PARAMETER Experiment Name: At_100uM_ABA_Mutants__P Parameter: Treatment Value: None
  misc_feature: MA Experiment ID: 20000574 Result: Down-regulated in Transcription
  misc_feature: MA Experiment 20000574 PARAMETER Experiment Name: At_100uM_ABA_Mutants__P Parameter: Organism Value: A. thaliana
  misc_feature: MA Experiment 20000574 PARAMETER Experiment Name: At_100uM_ABA_Mutants__P Parameter: Plant Line Value: CS23 vs. Ler wt
  misc_feature: MA Experiment 20000574 PARAMETER Experiment Name: At_100uM_ABA_Mutants__P Parameter: Timepoint (hr) Value: N/A
  misc_feature: MA Experiment 20000574 PARAMETER Experiment Name: At_100uM_ABA_Mutants__P Parameter: Tissue Value: Whole Plant
  misc_feature: MA Experiment 20000574 PARAMETER Experiment Name: At_100uM_ABA_Mutants__P Parameter: Treatment Value: None
  misc_feature: MA Experiment ID: 20001248 Result: Down-regulated in Transcription
  misc_feature: MA Experiment 20001248 PARAMETER Experiment Name: At_Far-red-induction_P Parameter: Age (day) Value: 7
  misc_feature: MA Experiment 20001248 PARAMETER Experiment Name: At_Far-red-induction_P Parameter: Light Value: Far-red vs. White
  misc_feature: MA Experiment 20001248 PARAMETER Experiment Name: At_Far-red-induction_P Parameter: Organism Value: A. thaliana
  misc_feature: MA Experiment 20001248 PARAMETER Experiment Name: At_Far-red-induction_P Parameter: Plant Line Value: Columbia
  misc_feature: MA Experiment 20001248 PARAMETER Experiment Name: At_Far-red-induction_P Parameter: Timepoint (hr) Value: 4
  misc_feature: MA Experiment 20001248 PARAMETER Experiment Name: At_Far-red-induction_P Parameter: Tissue Value: Whole Plant
  misc_feature: MA Experiment ID: 20001451 Result: Up-regulated in Transcription
  misc_feature: MA Experiment 20001451 PARAMETER Experiment Name: At_Far-red-induction_P Parameter: Age (day) Value: 7
  misc_feature: MA Experiment 20001451 PARAMETER Experiment Name: At_Far-red-induction_P Parameter: Light Value: Far-red vs. White
  misc_feature: MA Experiment 20001451 PARAMETER Experiment Name: At_Far-red-induction_P Parameter: Organism Value: A. thaliana
  misc_feature: MA Experiment 20001451 PARAMETER Experiment Name: At_Far-red-induction_P Parameter: Plant Line Value: Columbia
  misc_feature: MA Experiment 20001451 PARAMETER Experiment Name: At_Far-red-induction_P Parameter: Timepoint (hr) Value: 24
  misc_feature: MA Experiment 20001451 PARAMETER Experiment Name: At_Far-red-induction_P Parameter: Tissue Value: Whole Plant
  misc_feature: MA Experiment ID: 20001554 Result: Up-regulated in Transcription
  misc_feature: MA Experiment 20001554 PARAMETER Experiment Name: At_Drought_Soil_Dry_P Parameter: Age (day) Value: 21
  misc_feature: MA Experiment 20001554 PARAMETER Experiment Name: At_Drought_Soil_Dry_P Parameter: Organism Value: A. thaliana
  misc_feature: MA Experiment 20001554 PARAMETER Experiment Name: At_Drought_Soil_Dry_P Parameter: Plant Line Value: WS
  misc_feature: MA Experiment 20001554 PARAMETER Experiment Name: At_Drought_Soil_Dry_P Parameter: Post Timepoint (hr) Value: None
  misc_feature: MA Experiment 20001554 PARAMETER Experiment Name: At_Drought_Soil_Dry_P Parameter: Post-Treatment Value: None
  misc_feature: MA Experiment 20001554 PARAMETER Experiment Name: At_Drought_Soil_Dry_P Parameter: Timepoint (day) Value: 7
  misc_feature: MA Experiment 20001554 PARAMETER Experiment Name: At_Drought_Soil_Dry_P Parameter: Treatment Value: Drought vs. No Drought
  misc_feature: MA Experiment ID: 20001905 Result: Up-regulated in Transcription
  misc_feature: MA Experiment 20001905 PARAMETER Experiment Name: At_Drought_Reproduction_P Parameter: Age (day) Value: 40
  misc_feature: MA Experiment 20001905 PARAMETER Experiment Name: At_Drought_Reproduction_P Parameter: Organism Value: A. thaliana
  misc_feature: MA Experiment 20001905 PARAMETER Experiment Name: At_Drought_Reproduction_P Parameter: Plant Line Value: WS
  misc_feature: MA Experiment 20001905 PARAMETER Experiment Name: At_Drought_Reproduction_P Parameter: Timepoint (day) Value: 10
  misc_feature: MA Experiment 20001905 PARAMETER Experiment Name: At_Drought_Reproduction_P Parameter: Tissue Value: Rosettes
  misc_feature: MA Experiment 20001905 PARAMETER Experiment Name: At_Drought_Reproduction_P Parameter: Treatment Value: Drought vs. No Drought
  misc_feature: MA Experiment ID: 20001906 Result: Up-regulated in Transcription
  misc_feature: MA Experiment 20001906 PARAMETER Experiment Name: At_Drought_Reproduction_P Parameter: Age (day) Value: 35
  misc_feature: MA Experiment 20001906 PARAMETER Experiment Name: At_Drought_Reproduction_P Parameter: Organism Value: A. thaliana
  misc_feature: MA Experiment 20001906 PARAMETER Experiment Name: At_Drought_Reproduction_P Parameter: Plant Line Value: WS
  misc_feature: MA Experiment 20001906 PARAMETER Experiment Name: At_Drought_Reproduction_P Parameter: Timepoint (day) Value: 5
  misc_feature: MA Experiment 20001906 PARAMETER Experiment Name: At_Drought_Reproduction_P Parameter: Tissue Value: Siliques
  misc_feature: MA Experiment 20001906 PARAMETER Experiment Name: At_Drought_Reproduction_P Parameter: Treatment Value: Drought vs. No Drought
  misc_feature: MA Experiment ID: 20001911 Result: Up-regulated in Transcription
  misc_feature: MA Experiment 20001911 PARAMETER Experiment Name: At_Drought_Reproduction_P Parameter: Age (day) Value: 40
  misc_feature: MA Experiment 20001911 PARAMETER Experiment Name: At_Drought_Reproduction_P Parameter: Organism Value: A. thaliana
  misc_feature: MA Experiment 20001911 PARAMETER Experiment Name: At_Drought_Reproduction_P Parameter: Plant Line Value: WS
  misc_feature: MA Experiment 20001911 PARAMETER Experiment Name: At_Drought_Reproduction_P Parameter: Timepoint (day) Value: 10
  misc_feature: MA Experiment 20001911 PARAMETER Experiment Name: At_Drought_Reproduction_P Parameter: Tissue Value: Flowers
  misc_feature: MA Experiment 20001911 PARAMETER Experiment Name: At_Drought_Reproduction_P Parameter: Treatment Value: Drought vs. No Drought
ttcttctgctttcgtgactttcaggggacacttttgtttttataacttacgcttaaaatcctatgaattcgccgccggttgacgcaatgattaccggagaatcatcgtcacaaagatctatcccaacgccgtttctcacaaaaacgtttaacctcgttgaagatagttccatcgacgatgttatctcatggaacgaagatggttcctctttcatcgtatggaatccgacagatttcgctaaagatttgcttcctaaacacttcaaacacaacaatttctctagtttcgttcgtcagctcaacacttacggattcaaaaaagttgtaccggatcgatgggagttttcaaacgatttctttaagagaggagaaaaacgtcttctccgtgagatccaacgtcggaaaataacaacgacgcatcaaacagttgttgctccttcgtcggaacaacgaaaccagacgatggttgtatcaccgtcaaattccggggaagataataataataatcaggtgatgtcttcgtctccgtcgtcgtggtattgtcatcaaacgaagacgactgggaatggtggtttatcagtggagttattggaagagaacgagaagcttcggagtcaaaacattcagctaaaccgtgagcttactcagatgaaatctatctgcgataatatctatagtctcatgtcgaattacgtcggatctcagcccactgatcggagttattctcccggaggtagtagtagtcaaccgatggagtttttaccggcgaagcggttttcggagatggagattgaagaagaagaagaagcgagtccgaggttgtttggtgttccgattgggttaaaacggacgagaagtgaaggtgttcaggtgaagacgacggcggtggttggggaaaattccgatgaggagacgccgtggttgagacattataatcgaaccaatcagagagtttgtaattaaaaacgaacggtttagatttgtggtgtagatatgtgcgcgaagtagacgattacagctttttaagacaagcagagcacgtgtcccatctgtttcaagaagtttctgcaatcttgacttcttcttttaacactttgtgttttttattatttaattaataacaataaatgttctttt

SEQ ID NO: 98895 - protein, 299 aa, Arabidopsis thaliana; identical to SEQ ID NO: 21940
  peptide (1)..(299): Ceres Seq. ID no. 13601701
  misc_feature (22)..(233): Pfam Name: HSF-type DNA-binding Pfam Description: HSF-type DNA-binding
  misc_feature (1)..(299): Homolog of NCBI NO: 30697614 NR Description: heat shock transcription factor 6 (HSF6) thaliana] >gi|11386851|sp|Q9SCW4|HSF6_ARATH Heat shock factor
  misc_feature (1)..(217): Homolog of NCBI NO: 33591098 NR Description: heat shock factor RHSF2 [Oryza sativa (japonica
  misc_feature (16)..(299): Homolog of NCBI NO: 5821136 NR Description: heat shock factor [Nicotiana tabacum]
  misc_feature (16)..(299): Homolog of NCBI NO: 123684 NR Description: HEAT SHOCK FACTOR PROTEIN HSF24 (HEAT SHOCK FACTOR 24) (HSTF 24) (HEAT STRESS TRANSCRIPTION FACTOR)

SEQ ID NO: 98896 - protein, 291 aa, Arabidopsis thaliana; identical to SEQ ID NO: 21941
  peptide (1)..(291): Ceres Seq. ID no. 13601702
  misc_feature (14)..(225): Pfam Name: HSF-type DNA-binding Pfam Description: HSF-type DNA-binding
  misc_feature (1)..(291): Homolog of NCBI NO: 30697614 NR Description: heat shock transcription factor 6 (HSF6) thaliana] >gi|11386851|sp|Q9SCW4|HSF6_ARATH Heat shock factor
  misc_feature (1)..(209): Homolog of NCBI NO: 33591098 NR Description: heat shock factor RHSF2 [Oryza sativa (japonica
  misc_feature (8)..(291): Homolog of NCBI NO: 5821136 NR Description: heat shock factor [Nicotiana tabacum]
  misc_feature (8)..(291): Homolog of NCBI NO: 123684 NR Description: HEAT SHOCK FACTOR PROTEIN HSF24 (HEAT SHOCK FACTOR 24) (HSTF 24) (HEAT STRESS TRANSCRIPTION FACTOR)

SEQ ID NO: 98897 - protein, 166 aa, Arabidopsis thaliana; identical to SEQ ID NO: 21942
  peptide (1)..(166): Ceres Seq. ID no. 13601703
  misc_feature (1)..(100): Pfam Name: HSF-type DNA-binding Pfam Description: HSF-type DNA-binding
  misc_feature (1)..(166): Homolog of NCBI NO: 30697614 NR Description: heat shock transcription factor 6 (HSF6) thaliana] >gi|11386851|sp|Q9SCW4|HSF6_ARATH Heat shock factor
  misc_feature (1)..(84): Homolog of NCBI NO: 33591098 NR Description: heat shock factor RHSF2 [Oryza sativa (japonica
  misc_feature (1)..(166): Homolog of NCBI NO: 5821136 NR Description: heat shock factor [Nicotiana tabacum]
  misc_feature (1)..(166): Homolog of NCBI NO: 123684 NR Description: HEAT SHOCK FACTOR PROTEIN HSF24 (HEAT SHOCK FACTOR 24) (HSTF 24) (HEAT STRESS TRANSCRIPTION FACTOR)

SEQ ID NO: 98898 - DNA, 1668 bp, Arabidopsis thaliana
  misc_feature (1)..(1668): Ceres Seq. ID no. 13601704
  misc_feature: MA Experiment ID: 108434 Result: Up-regulated in Transcription
  misc_feature: MA Experiment 108434 PARAMETER Experiment Name: At_Root_Tips_cDNA_P Parameter: Tissue Value: Root Tips
  misc_feature: MA Experiment ID: 108462 Result: Down-regulated in Transcription
  misc_feature: MA Experiment 108462 PARAMETER Experiment Name: At_Germinating_Seeds_cDNA_P Parameter: Age (day) Value: 2 vs. 0
  misc_feature: MA Experiment 108462 PARAMETER Experiment Name: At_Germinating_Seeds_cDNA_P Parameter: Tissue Value: Germinating Seeds
  misc_feature: MA Experiment ID: 108463 Result: Down-regulated in Transcription
  misc_feature: MA Experiment 108463 PARAMETER Experiment Name: At_Germinating_Seeds_cDNA_P Parameter: Age (day) Value: 3 vs. 0
  misc_feature: MA Experiment 108463 PARAMETER Experiment Name: At_Germinating_Seeds_cDNA_P Parameter: Tissue Value: Germinating Seeds
  misc_feature: MA Experiment ID: 108464 Result: Down-regulated in Transcription
  misc_feature: MA Experiment 108464 PARAMETER Experiment Name: At_Germinating_Seeds_cDNA_P Parameter: Age (day) Value: 4 vs. 0
  misc_feature: MA Experiment 108464 PARAMETER Experiment Name: At_Germinating_Seeds_cDNA_P Parameter: Tissue Value: Germinating Seeds
  misc_feature: MA Experiment ID: 20000184 Result: Down-regulated in Transcription
  misc_feature: MA Experiment 20000184 PARAMETER Experiment Name: At_Shoots__P Parameter: Age (day) Value: 7
  misc_feature: MA Experiment 20000184 PARAMETER Experiment Name: At_Shoots__P Parameter: Tissue Value: Shoots vs. Whole Plant
gatctcataacttagccattctaaaacccattcaccgtctctgtttcgttcgccgtgattcatagtcgtctcgtctcaccgtcaccatcaccgtcttcttcttccattgacaggatcttgtttagattctgcaatggctttcaggcaaactttatctataaggtccaggcttttcgctcgtcgtaaccaaccagtttatcatattatccctcgtgagagtgatcatgaaagggattcattctgtcaagaaacatctcagagaagttaccatagctttcttcaccaaagatccgttaacaattctgatttctccaaagtttctggaggaagcttacatttgcctcttgctcccacgtctggttttgctttctatcgttatatgtcaagtgcacctggtgttggttcagagaagattggtgtgatgtctgacattgcagaagtcataaccgactcaacattgcaagatgtgccagctcaggctgctgctgctgtcagtgaagttacacttgcagctgctgactctttcttccctatcgcggcccttcagcagtgcattgatatggtgcatacattcacaggctttgagtggtgggcatccattgttgtagcaaccattttgatccgatcatcaacagttcctctcttgatcaaacaaatgaaagacacaaccaagttagcgctgatgaggccacggttggagtccatccgggaggaaatgcaaaacaagggaatggactcggttacgatggcagaaggtcaaaaaaagatgaagaatttgtttaaagaatatggtgtcactccattcaccccaatgaaagggatgtttattcagggaccgctgttcatctgctttttccttgctattcgaaatatggcagagaaggtaccttcattccaaacaggaggtgcattatggtttaccgatctaacaactcccgacagcttatacatcttgccggttataacaggattgacattcttgataaccgttgagtgtaatgcacaagaaggcatggaagggaatccgatggctggcactgtaaaaactgtttgtcgggtttttgctctcctcacagtcccgatgacaatgagttttccacaggccatattttgttactggatcacatccaacctgttctctctcatgtatggacttgtgataaagcgtcctcaagtgaagaagatgttacgcatacctgatctgcctccacctcctccaggtcaacaaccttcatttgacctgttttcagctctcaagaaaatgaaagccatgacacaggaccatacacagaaccagatagaaccaccttcgccagtaaacccgaggctttcctcaacatcgctgagtcctgttagtaagaggctcaaggctttggagagccaagtaaagggaaggaagaagaatagcagcaagaagaagtgatttaaaacggtgcatactatttttgttaagagggccaaacgaaaaaaataataaagcttttgagtcgaaagtgaacacagaattttctcactgatgaaactactctgtgagctaaaaagctggaggcagctattgtaagtttgttttgaccaattatagaatagaagattgtttttatagaaacattttggataacatatacttttttatcttgttaagtaacagaacttgaacaacattggatc

SEQ ID NO: 98899 - protein, 429 aa, Arabidopsis thaliana; identical to SEQ ID NO: 38335
  peptide (1)..(429): Ceres Seq. ID no. 13601705
  misc_feature (151)..(348): Pfam Name: 60Kd inner membrane protein Pfam Description: 60Kd inner membrane protein
  misc_feature (1)..(429): Homolog of NCBI NO: 15241690 NR Description: OXA1 protein (OXA1p) [Arabidopsis thaliana] Oxa1 protein [Arabidopsis thaliana] >gi|6624207|dbj|BAA88473.1| [Arabidopsis thaliana] >gi|10176922|dbj|BAB10166.1| Oxa1 protein
  misc_feature (10)..(422): Homolog of NCBI NO: 15225991 NR Description: OXA1 protein (OXA1p), putative [Arabidopsis >gi|25409004|pir||C84903 probable cytochrome oxidase biogenesis
  misc_feature (1)..(429): Homolog of NCBI NO: 37536158 NR Description: putative Oxa1 protein [Oryza sativa (japonica group)] >gi|10122033|gb|AAG13422.1| putative Oxa1 protein [Oryza
  misc_feature (1)..(428): Homolog of NCBI NO: 22122905 NR Description: putative cytochrome oxidase assembly protein
  misc_feature (74)..(390): Homolog of NCBI NO: 4826880 NR Description: oxidase (cytochrome c) assembly 1-like [Homo >gi|13124380|sp|Q15070|OXA1_HUMAN Cytochrome oxidase biogenesis
  misc_feature (74)..(390): Homolog of NCBI NO: 28193182 NR Description: unnamed protein product [Homo sapiens]
  misc_feature (124)..(368): Homolog of NCBI NO: 11359300 NR Description: respiratory protein oxa1-2 - fission yeast pombe) >gi|2739285|emb|CAA63844.1| complements mutations in
  misc_feature (124)..(368): Homolog of NCBI NO: 19112969 NR Description: oxa1sp2 protein [Schizosaccharomyces pombe]
  misc_feature (74)..(390): Homolog of NCBI NO: 37589026 NR Description: Oxidase (cytochrome c) assembly 1-like [Homo
  misc_feature (74)..(390): Homolog of NCBI NO: 38372882 NR Description: Inner membrane protein OXA1L, mitochondrial

SEQ ID NO: 98900 - protein, 347 aa, Arabidopsis thaliana; identical to SEQ ID NO: 38336
  peptide (1)..(347): Ceres Seq. ID no. 13601706
  misc_feature (69)..(266): Pfam Name: 60Kd inner membrane protein Pfam Description: 60Kd inner membrane protein
  misc_feature (1)..(347): Homolog of NCBI NO: 15241690 NR Description: OXA1 protein (OXA1p) [Arabidopsis thaliana] Oxa1 protein [Arabidopsis thaliana] >gi|6624207|dbj|BAA88473.1| [Arabidopsis thaliana] >gi|10176922|dbj|BAB10166.1| Oxa1 protein
  misc_feature (1)..(340): Homolog of NCBI NO: 15225991 NR Description: OXA1 protein (OXA1p), putative [Arabidopsis >gi|25409004|pir||C84903 probable cytochrome oxidase biogenesis
  misc_feature (1)..(347): Homolog of NCBI NO: 37536158 NR Description: putative Oxa1 protein [Oryza sativa (japonica group)] >gi|10122033|gb|AAG13422.1| putative Oxa1 protein [Oryza
  misc_feature (1)..(346): Homolog of NCBI NO: 22122905 NR Description: putative cytochrome oxidase assembly protein
  misc_feature (1)..(308): Homolog of NCBI NO: 4826880 NR Description: oxidase (cytochrome c) assembly 1-like [Homo >gi|13124380|sp|Q15070|OXA1_HUMAN Cytochrome oxidase biogenesis
  misc_feature (1)..(308): Homolog of NCBI NO: 28193182 NR Description: unnamed protein product [Homo sapiens]
  misc_feature (42)..(286): Homolog of NCBI NO: 11359300 NR Description: respiratory protein oxa1-2 - fission yeast pombe) >gi|2739285|emb|CAA63844.1| complements mutations in
  misc_feature (42)..(286): Homolog of NCBI NO: 19112969 NR Description: oxa1sp2 protein [Schizosaccharomyces pombe]
  misc_feature (1)..(308): Homolog of NCBI NO: 37589026 NR Description: Oxidase (cytochrome c) assembly 1-like [Homo
  misc_feature (1)..(308): Homolog of NCBI NO: 38372882 NR Description: Inner membrane protein OXA1L, mitochondrial

SEQ ID NO: 98901 - protein, 333 aa, Arabidopsis thaliana; identical to SEQ ID NO: 38337
  peptide (1)..(333): Ceres Seq. ID no. 13601707
  misc_feature (55)..(252): Pfam Name: 60Kd inner membrane protein Pfam Description: 60Kd inner membrane protein
  misc_feature (1)..(333): Homolog of NCBI NO: 15241690 NR Description: OXA1 protein (OXA1p) [Arabidopsis thaliana] Oxa1 protein [Arabidopsis thaliana] >gi|6624207|dbj|BAA88473.1| [Arabidopsis thaliana] >gi|10176922|dbj|BAB10166.1| Oxa1 protein
  misc_feature (1)..(326): Homolog of NCBI NO: 15225991 NR Description: OXA1 protein (OXA1p), putative [Arabidopsis >gi|25409004|pir||C84903 probable cytochrome oxidase biogenesis
  misc_feature (1)..(333): Homolog of NCBI NO: 37536158 NR Description: putative Oxa1 protein [Oryza sativa (japonica group)] >gi|10122033|gb|AAG13422.1| putative Oxa1 protein [Oryza
  misc_feature (1)..(332): Homolog of NCBI NO: 22122905 NR Description: putative cytochrome oxidase assembly protein
  misc_feature (1)..(294): Homolog of NCBI NO: 4826880 NR Description: oxidase (cytochrome c) assembly 1-like [Homo >gi|13124380|sp|Q15070|OXA1_HUMAN Cytochrome oxidase biogenesis
  misc_feature (1)..(294): Homolog of NCBI NO: 28193182 NR Description: unnamed protein product [Homo sapiens]
  misc_feature (28)..(272): Homolog of NCBI NO: 11359300 NR Description: respiratory protein oxa1-2 - fission yeast pombe) >gi|2739285|emb|CAA63844.1| complements mutations in
  misc_feature (28)..(272): Homolog of NCBI NO: 19112969 NR Description: oxa1sp2 protein [Schizosaccharomyces pombe]
  misc_feature (1)..(294): Homolog of NCBI NO: 37589026 NR Description: Oxidase (cytochrome c) assembly 1-like [Homo
  misc_feature (1)..(294): Homolog of NCBI NO: 38372882 NR Description: Inner membrane protein OXA1L, mitochondrial

SEQ ID NO: 98902 - DNA, 486 bp, Arabidopsis thaliana
  misc_feature (1)..(486): Ceres Seq. ID no. 13601724
  misc_feature: MA Experiment ID: 20000069 Result: Up-regulated in Transcription
  misc_feature: MA Experiment 20000069 PARAMETER Experiment Name: At_100uM_ABA_Mutants_cDNA_P Parameter: Plant Line Value: CS23
  misc_feature: MA Experiment 20000069 PARAMETER Experiment Name: At_100uM_ABA_Mutants_cDNA_P Parameter: Timepoint (hr) Value: 6
  misc_feature: MA Experiment 20000069 PARAMETER Experiment Name: At_100uM_ABA_Mutants_cDNA_P Parameter: Tissue Value: Aerial
  misc_feature: MA Experiment 20000069 PARAMETER Experiment Name: At_100uM_ABA_Mutants_cDNA_P Parameter: Treatment Value: 100uM ABA vs. No Treatment
  misc_feature: MA Experiment ID: 20000071 Result: Up-regulated in Transcription
  misc_feature: MA Experiment 20000071 PARAMETER Experiment Name: At_100uM_ABA_Mutants_cDNA_P Parameter: Plant Line Value: CS8104
  misc_feature: MA Experiment 20000071 PARAMETER Experiment Name: At_100uM_ABA_Mutants_cDNA_P Parameter: Timepoint (hr) Value: 6
  misc_feature: MA Experiment 20000071 PARAMETER Experiment Name: At_100uM_ABA_Mutants_cDNA_P Parameter: Tissue Value: Aerial
  misc_feature: MA Experiment 20000071 PARAMETER Experiment Name: At_100uM_ABA_Mutants_cDNA_P Parameter: Treatment Value: 100uM ABA vs. No Treatment
  misc_feature: MA Experiment ID: 20000117 Result: Up-regulated in Transcription
  misc_feature: MA Experiment 20000117 PARAMETER Experiment Name: At_100uM_ABA_Mutants_cDNA_P Parameter: Plant Line Value: Columbia
  misc_feature: MA Experiment 20000117 PARAMETER Experiment Name: At_100uM_ABA_Mutants_cDNA_P Parameter: Timepoint (hr) Value: 6
  misc_feature: MA Experiment 20000117 PARAMETER Experiment Name: At_100uM_ABA_Mutants_cDNA_P Parameter: Tissue Value: Aerial
  misc_feature: MA Experiment 20000117 PARAMETER Experiment Name: At_100uM_ABA_Mutants_cDNA_P Parameter: Treatment Value: 100uM ABA vs. No Treatment
  misc_feature: MA Experiment ID: 20000235 Result: Down-regulated in Transcription
  misc_feature: MA Experiment 20000235 PARAMETER Experiment Name: At_Siliques_P Parameter: Age (day) Value: 21
  misc_feature: MA Experiment 20000235 PARAMETER Experiment Name: At_Siliques_P Parameter: Organism Value: A. thaliana
  misc_feature: MA Experiment 20000235 PARAMETER Experiment Name: At_Siliques_P Parameter: Plant Line Value: WS
  misc_feature: MA Experiment 20000235 PARAMETER Experiment Name: At_Siliques_P Parameter: Tissue Value: 5-10mm Siliques vs. Whole Plant
  misc_feature: MA Experiment ID: 20000438 Result: Down-regulated in Transcription
  misc_feature: MA Experiment 20000438 PARAMETER Experiment Name: At_Shoots__P Parameter: Age (day) Value: 14
  misc_feature: MA Experiment 20000438 PARAMETER Experiment Name: At_Shoots__P Parameter: Tissue Value: Shoots vs. Whole Plant
  misc_feature: MA Experiment ID: 20001557 Result: Down-regulated in Transcription
  misc_feature: MA Experiment 20001557 PARAMETER Experiment Name: At_Drought_Soil_Dry_P Parameter: Age (day) Value: 27
  misc_feature: MA Experiment 20001557 PARAMETER Experiment Name: At_Drought_Soil_Dry_P Parameter: Organism Value: A. thaliana
  misc_feature: MA Experiment 20001557 PARAMETER Experiment Name: At_Drought_Soil_Dry_P Parameter: Plant Line Value: WS
  misc_feature: MA Experiment 20001557 PARAMETER Experiment Name: At_Drought_Soil_Dry_P Parameter: Post Timepoint (hr) Value: 3
  misc_feature: MA Experiment 20001557 PARAMETER Experiment Name: At_Drought_Soil_Dry_P Parameter: Post-Treatment Value: Re-Water vs. No Drought
  misc_feature: MA Experiment 20001557 PARAMETER Experiment Name: At_Drought_Soil_Dry_P Parameter: Timepoint (day) Value: 13
  misc_feature: MA Experiment 20001557 PARAMETER Experiment Name: At_Drought_Soil_Dry_P Parameter: Treatment Value: Drought vs. No Drought
  misc_feature: MA Experiment ID: 20001905 Result: Down-regulated in Transcription
  misc_feature: MA Experiment 20001905 PARAMETER Experiment Name: At_Drought_Reproduction_P Parameter: Age (day) Value: 40
  misc_feature: MA Experiment 20001905 PARAMETER Experiment Name: At_Drought_Reproduction_P Parameter: Organism Value: A. thaliana
  misc_feature: MA Experiment 20001905 PARAMETER Experiment Name: At_Drought_Reproduction_P Parameter: Plant Line Value: WS
  misc_feature: MA Experiment 20001905 PARAMETER Experiment Name: At_Drought_Reproduction_P Parameter: Timepoint (day) Value: 10
  misc_feature: MA Experiment 20001905 PARAMETER Experiment Name: At_Drought_Reproduction_P Parameter: Tissue Value: Rosettes
  misc_feature: MA Experiment 20001905 PARAMETER Experiment Name: At_Drought_Reproduction_P Parameter: Treatment Value: Drought vs. No Drought
atatcctgatttccccactcgacgctgatttcttctctgcttctgtaatttctccaattcattgatcagatcagccatggaagacgagattgaattgaaaactgctcctgctgatttccggtttcctacaacaaatcaaactaggcactgcttcactcggtacatcgagtttcacaggtgtacaactgcaaagggagaggagtctaatgactgtgaaaggtttgccaagtattaccgtgccctctgtcctggagaatgggttgacaagtggaacgagcagagggagagtggaacttttccaggtcctctttgaaccaagccttcaatcttgatgaagaggcaatcaagtccgtaataatacatggtttcaaagttaatttcttgcttgcgtgtgtatgttttggccttattatttcctctctagtgtaagtgttttattgggatgtctaagaaaggccaatcaaattataatatgaaaacattcgc

SEQ ID NO: 98903 - protein, 78 aa, Arabidopsis thaliana; identical to SEQ ID NO: 35309
  peptide (1)..(78): Ceres Seq. ID no. 13601725
  misc_feature (3)..(77): Pfam Name: Cytochrome oxidase c subunit VIb Pfam Description: Cytochrome oxidase c subunit VIb
  misc_feature (1)..(78): Homolog of NCBI NO: 18424030 NR Description: expressed protein [Arabidopsis thaliana] AT4g28060/T13J8_170 [Arabidopsis thaliana]
  misc_feature (1)..(78): Homolog of NCBI NO: 21592329 NR Description: cytochrome c oxidase subunit 6b [Arabidopsis
  misc_feature (1)..(78): Homolog of NCBI NO: 15234375 NR Description: hypothetical protein [Arabidopsis thaliana]
  misc_feature (4)..(78): Homolog of NCBI NO: 9967162 NR Description: cytochrome c oxidase subunit 6b [Oryza sativa
  misc_feature (4)..(78): Homolog of NCBI NO: 4586449 NR Description: cytochrome c oxidase subunit 6b-1 [Oryza sativa
  misc_feature (3)..(78): Homolog of NCBI NO: 15219886 NR Description: cytochrome c oxidase subunit -related
  misc_feature (3)..(78): Homolog of NCBI NO: 21554378 NR Description: cytochrome c oxidase subunit, putative
  misc_feature (4)..(78): Homolog of NCBI NO: 34906824 NR Description: putative cytochrome c oxidase subunit 6b-1 [Oryza
  misc_feature (4)..(78): Homolog of NCBI NO: 22204116 NR Description: putative cytochrome c oxidase subunit [Triticum
  misc_feature (2)..(77): Homolog of NCBI NO: 32401320 NR Description: cytochrome c oxidase subunit 6b-1 [Griffithsia

SEQ ID NO: 98904 - protein, 41 aa, Arabidopsis thaliana; identical to SEQ ID NO: 35310
  peptide (1)..(41): Ceres Seq. ID no. 13601726

SEQ ID NO: 98905 - DNA, 1120 bp, Arabidopsis thaliana
  misc_feature (1)..(1120): Ceres Seq. ID no. 13601727
  misc_feature: MA Experiment ID: 108434 Result: Down-regulated in Transcription
  misc_feature: MA Experiment 108434 PARAMETER Experiment Name: At_Root_Tips_cDNA_P Parameter: Tissue Value: Root Tips
  misc_feature: MA Experiment ID: 108462 Result: Down-regulated in Transcription
  misc_feature: MA Experiment 108462 PARAMETER Experiment Name: At_Germinating_Seeds_cDNA_P Parameter: Age (day) Value: 2 vs. 0
  misc_feature: MA Experiment 108462 PARAMETER Experiment Name: At_Germinating_Seeds_cDNA_P Parameter: Tissue Value: Germinating Seeds
  misc_feature: MA Experiment ID: 108463 Result: Down-regulated in Transcription
  misc_feature: MA Experiment 108463 PARAMETER Experiment Name: At_Germinating_Seeds_cDNA_P Parameter: Age (day) Value: 3 vs. 0
  misc_feature: MA Experiment 108463 PARAMETER Experiment Name: At_Germinating_Seeds_cDNA_P Parameter: Tissue Value: Germinating Seeds
  misc_feature: MA Experiment ID: 108464 Result: Down-regulated in Transcription
  misc_feature: MA Experiment 108464 PARAMETER Experiment Name: At_Germinating_Seeds_cDNA_P Parameter: Age (day) Value: 4 vs. 0
  misc_feature: MA Experiment 108464 PARAMETER Experiment Name: At_Germinating_Seeds_cDNA_P Parameter: Tissue Value: Germinating Seeds
  misc_feature: MA Experiment ID: 20000437 Result: Up-regulated in Transcription
  misc_feature: MA Experiment 20000437 PARAMETER Experiment Name: At_Drought_P Parameter: Age (day) Value: 8
  misc_feature: MA Experiment 20000437 PARAMETER Experiment Name: At_Drought_P Parameter: Organism Value: A. thaliana
  misc_feature: MA Experiment 20000437 PARAMETER Experiment Name: At_Drought_P Parameter: Plant Line Value: WS
  misc_feature: MA Experiment 20000437 PARAMETER Experiment Name: At_Drought_P Parameter: Timepoint (hr) Value: 24
  misc_feature: MA Experiment 20000437 PARAMETER Experiment Name: At_Drought_P Parameter: Tissue Value: Whole Plant
  misc_feature: MA Experiment 20000437 PARAMETER Experiment Name: At_Drought_P Parameter: Treatment Value: Drought vs. No Drought
  misc_feature: MA Experiment ID: 20001248 Result: Up-regulated in Transcription
  misc_feature: MA Experiment 20001248 PARAMETER Experiment Name: At_Far-red-induction_P Parameter: Age (day) Value: 7
  misc_feature: MA Experiment 20001248 PARAMETER Experiment Name: At_Far-red-induction_P Parameter: Light Value: Far-red vs. White
  misc_feature: MA Experiment 20001248 PARAMETER Experiment Name: At_Far-red-induction_P Parameter: Organism Value: A. thaliana
  misc_feature: MA Experiment 20001248 PARAMETER Experiment Name: At_Far-red-induction_P Parameter: Plant Line Value: Columbia
  misc_feature: MA Experiment 20001248 PARAMETER Experiment Name: At_Far-red-induction_P Parameter: Timepoint (hr) Value: 4
  misc_feature: MA Experiment 20001248 PARAMETER Experiment Name: At_Far-red-induction_P Parameter: Tissue Value: Whole Plant
aacgttacgagttcttcagtttctcagttctccaaacgacaacttcgagccaaaacaatggcggctactacattgtacaattcctgtcttcttcaaccgaagtatggcttcaccactcgccgcctaaaccagtctctcgttaactctcttacgaacccaacaagagtttcggttttgtggaagagtcgtagagatgttattgcgaaagcttcgattgaaatggcggaatcgaattcgatatcttccgttgttgtcaattcctctggtcctatcatcgtgattgataattacgacagcttcacttacaatctctgccagtatatgggagagctagggtgccattttgaagtttaccgcaatgatgaacttacagttgaggagctgaaaagaaaaaagccaagaggattgttgatttctcctggacctggtacccctcaagactctgggatttccttgcaaactgttttggaactcggaccacttgttcctttatttggagtatgtatgggtttgcagtgtataggagaagcatttggaggaaagattgtgcggtcaccatttggtgttatgcatgggaaaagctcaatggttcactatgatgagaaaggagaagaaggcttgttctctggattatccaaccctttccttgtaggtagatatcacagtctcgtgatcgaaaaagattcatttcctagtgatgaactcgaggttacagcatggacagaagatggtctggttatggctgcccgtcacagaaagtacaagcatatacagggagttcaatttcatccggagagtattataacaaccgaaggcaagacaattgttcgcaatttcatcaaactcgtagagaaaaaggaatctgagaagctggcataggcttagcctgaatgagaaaatcagctgtgttcgattagtgcttccctgtaataatgtctgccaatgcaaaatgttccttggcatcttaccattgtttctacccggaatgtgtctagttctttcagttcaggacgaatctggaaaggctcgatagtattcagtgctgttggaacataacagtacatgagataagatctaatcagatctcactttcttattgtcatactggctttccttggtc

SEQ ID NO: 98906 - protein, 292 aa, Arabidopsis thaliana
  peptide (1)..(292): Ceres Seq. ID no. 13601728
  misc_feature (92)..(282): Pfam Name: Glutamine amidotransferase class-I Pfam Description: Glutamine amidotransferase class-I
  misc_feature (20)..(292): Homolog of NCBI NO: 15242893 NR Description: anthranilate synthase, beta subunit (ASB), [Arabidopsis thaliana] >gi|9758358|dbj|BAB08859.1| anthranilate
  misc_feature (20)..(292): Homolog of NCBI NO: 21594026 NR Description: anthranilate synthase beta chain [Arabidopsis
  misc_feature (20)..(291): Homolog of NCBI NO: 15222532 NR Description: anthranilate synthase, beta subunit (ASB) thaliana] >gi|541849|pir||JQ2340 anthranilate synthase (EC
  misc_feature (59)..(291): Homolog of NCBI NO: 25403004 NR Description: probable anthranilate synthase beta subunit
  misc_feature (74)..(291): Homolog of NCBI NO: 15221840 NR Description: anthranilate synthase, beta subunit (ASB) thaliana] >gi|18395568|ref|NP_564224.1| anthranilate synthase, subunit (ASB) [Arabidopsis thaliana]
  misc_feature (74)..(291): Homolog of NCBI NO: 15221810 NR Description: anthranilate synthase, beta subunit (ASB), [Arabidopsis thaliana] >gi|9945079|gb|AAG03116.1|AC004133_10
  misc_feature (63)..(288): Homolog of NCBI NO: 28301926 NR Description: putative anthranilate synthase beta subunit
  misc_feature (90)..(290): Homolog of NCBI NO: 21741992 NR Description: OSJNBa0060P14.13 [Oryza sativa (japonica
  misc_feature (91)..(281): Homolog of NCBI NO: 37520452 NR Description: anthranilate synthase component II [Gloeobacter >gi|35211446|dbj|BAC88824.1| anthranilate synthase component II
  misc_feature (91)..(280): Homolog of NCBI NO: 11467408 NR Description: anthranilate synthase component II [Cyanophora >gi|1351304|sp|P48261|TRPG_CYAPA Anthranilate synthase component
NVTSSSVSQFSKRQLRAKTMAATTLYNSCLLQPKYGFTTRRLNQSLVNSLTNPTRVSVLWKSRRDVIAKASIEMAESNSISSVVVNSSGPIIVIDNYDSFTYNLCQYMGELGCHFEVYRNDELTVEELKRKKPRGLLISPGPGTPQDSGISLQTVLELGPLVPLFGVCMGLQCIGEAFGGKIVRSPFGVMHGKSSMVHYDEKGEEGLFSGLSNPFLVGRYHSLVIEKDSFPSDELEVTAWTEDGLVMAARHRKYKHIQGVQFHPESIITTEGKTIVRNFIKLVEKKESEKLA

SEQ ID NO: 98907 - protein, 273 aa, Arabidopsis thaliana
  peptide (1)..(273): Ceres Seq. ID no. 13601729
  misc_feature (73)..(263): Pfam Name: Glutamine amidotransferase class-I Pfam Description: Glutamine amidotransferase class-I
  misc_feature (1)..(273): Homolog of NCBI NO: 15242893 NR Description: anthranilate synthase, beta subunit (ASB), [Arabidopsis thaliana] >gi|9758358|dbj|BAB08859.1| anthranilate
  misc_feature (1)..(273): Homolog of NCBI NO: 21594026 NR Description: anthranilate synthase beta chain [Arabidopsis
  misc_feature (1)..(272): Homolog of NCBI NO: 15222532 NR Description: anthranilate synthase, beta subunit (ASB) thaliana] >gi|541849|pir||JQ2340 anthranilate synthase (EC
  misc_feature (40)..(272): Homolog of NCBI NO: 25403004 NR Description: probable anthranilate synthase beta subunit
  misc_feature (55)..(272): Homolog of NCBI NO: 15221840 NR Description: anthranilate synthase, beta subunit (ASB) thaliana] >gi|18395568|ref|NP_564224.1| anthranilate synthase, subunit (ASB) [Arabidopsis thaliana]
  misc_feature (55)..(272): Homolog of NCBI NO: 15221810 NR Description: anthranilate synthase, beta subunit (ASB), [Arabidopsis thaliana] >gi|9945079|gb|AAG03116.1|AC004133_10
  misc_feature (44)..(269): Homolog of NCBI NO: 28301926 NR Description: putative anthranilate synthase beta subunit
  misc_feature (71)..(271): Homolog of NCBI NO: 21741992 NR Description: OSJNBa0060P14.13 [Oryza sativa (japonica
  misc_feature (72)..(262): Homolog of NCBI NO: 37520452 NR Description: anthranilate synthase component II [Gloeobacter >gi|35211446|dbj|BAC88824.1| anthranilate synthase component II
  misc_feature (72)..(261): Homolog of NCBI NO: 11467408 NR Description: anthranilate synthase component II [Cyanophora >gi|1351304|sp|P48261|TRPG_CYAPA Anthranilate synthase component
MAATTLYNSCLLQPKYGFTTRRLNQSLVNSLTNPTRVSVLWKSRRDVIAKASIEMAESNSISSVVVNSSGPIIVIDNYDSFTYNLCQYMGELGCHFEVYRNDELTVEELKRKKPRGLLISPGPGTPQDSGISLQTVLELGPLVPLFGVCMGLQCIGEAFGGKIVRSPFGVMHGKSSMVHYDEKGEEGLFSGLSNPFLVGRYHSLVIEKDSFPSDELEVTAWTEDGLVMAARHRKYKHIQGVQFHPESIITTEGKTIVRNFIKLVEKKESEKLA

SEQ ID NO: 98908 - protein, 219 aa, Arabidopsis thaliana; identical to SEQ ID NO: 27453
  peptide (1)..(219): Ceres Seq. ID no. 13601730
  misc_feature (19)..(209): Pfam Name: Glutamine amidotransferase class-I Pfam Description: Glutamine amidotransferase class-I
  misc_feature (1)..(219): Homolog of NCBI NO: 15242893 NR Description: anthranilate synthase, beta subunit (ASB), [Arabidopsis thaliana] >gi|9758358|dbj|BAB08859.1| anthranilate
  misc_feature (1)..(219): Homolog of NCBI NO: 21594026 NR Description: anthranilate synthase beta chain [Arabidopsis
  misc_feature (1)..(218): Homolog of NCBI NO: 15222532 NR Description: anthranilate synthase, beta subunit (ASB) thaliana] >gi|541849|pir||JQ2340 anthranilate synthase (EC
  misc_feature (1)..(218): Homolog of NCBI NO: 25403004 NR Description: probable anthranilate synthase beta subunit
  misc_feature (1)..(218): Homolog of NCBI NO: 15221840 NR Description: anthranilate synthase, beta subunit (ASB) thaliana] >gi|18395568|ref|NP_564224.1| anthranilate synthase, subunit (ASB) [Arabidopsis thaliana]
  misc_feature (1)..(218): Homolog of NCBI NO: 15221810 NR Description: anthranilate synthase, beta subunit (ASB), [Arabidopsis thaliana] >gi|9945079|gb|AAG03116.1|AC004133_10
  misc_feature (1)..(215): Homolog of NCBI NO: 28301926 NR Description: putative anthranilate synthase beta subunit
  misc_feature (17)..(217): Homolog of NCBI NO: 21741992 NR Description: OSJNBa0060P14.13 [Oryza sativa (japonica
  misc_feature (18)..(208): Homolog of NCBI NO: 37520452 NR Description: anthranilate synthase component II [Gloeobacter >gi|35211446|dbj|BAC88824.1| anthranilate synthase component II
  misc_feature (18)..(207): Homolog of NCBI NO: 11467408 NR Description: anthranilate synthase component II [Cyanophora >gi|1351304|sp|P48261|TRPG_CYAPA Anthranilate synthase component

SEQ ID NO: 98909 - DNA, 1498 bp, Arabidopsis thaliana
  misc_feature (1)..(1498): Ceres Seq. ID no. 13601739
  misc_feature: MA Experiment ID: 20000173 Result: Down-regulated in Transcription
  misc_feature: MA Experiment 20000173 PARAMETER Experiment Name: At_42deg_Heat_P Parameter: Age (day) Value: 14
  misc_feature: MA Experiment 20000173 PARAMETER Experiment Name: At_42deg_Heat_P Parameter: Organism Value: A. thaliana
  misc_feature: MA Experiment 20000173 PARAMETER Experiment Name: At_42deg_Heat_P Parameter: Plant Line Value: WS
  misc_feature: MA Experiment 20000173 PARAMETER Experiment Name: At_42deg_Heat_P Parameter: Temperature (deg C) Value: 42 vs. 22
  misc_feature: MA Experiment 20000173 PARAMETER Experiment Name: At_42deg_Heat_P Parameter: Timepoint (hr) Value: 6
  misc_feature: MA Experiment 20000173 PARAMETER Experiment Name: At_42deg_Heat_P Parameter: Tissue Value: Aerial
  misc_feature: MA Experiment ID: 20000185 Result: Up-regulated in Transcription
  misc_feature: MA Experiment 20000185 PARAMETER Experiment Name: At_Roots__P Parameter: Age (day) Value: 7 vs. 21
  misc_feature: MA Experiment 20000185 PARAMETER Experiment Name: At_Roots__P Parameter: Organism Value: A. thaliana
  misc_feature: MA Experiment 20000185 PARAMETER Experiment Name: At_Roots__P Parameter: Tissue Value: Roots vs. Whole Plant
  misc_feature: MA Experiment ID: 20000234 Result: Up-regulated in Transcription
  misc_feature: MA Experiment 20000234 PARAMETER Experiment Name: At_Siliques_P Parameter: Age (day) Value: 21
  misc_feature: MA Experiment 20000234 PARAMETER Experiment Name: At_Siliques_P Parameter: Organism Value: A. thaliana
  misc_feature: MA Experiment 20000234 PARAMETER Experiment Name: At_Siliques_P Parameter: Plant Line Value: WS
  misc_feature: MA Experiment 20000234 PARAMETER Experiment Name: At_Siliques_P Parameter: Tissue Value: Less Than 5mm Siliques vs. Whole Plant
  misc_feature: MA Experiment ID: 20000235 Result: Up-regulated in Transcription
  misc_feature: MA Experiment 20000235 PARAMETER Experiment Name: At_Siliques_P Parameter: Age (day) Value: 21
  misc_feature: MA Experiment 20000235 PARAMETER Experiment Name: At_Siliques_P Parameter: Organism Value: A. thaliana
  misc_feature: MA Experiment 20000235 PARAMETER Experiment Name: At_Siliques_P Parameter: Plant Line Value: WS
  misc_feature: MA Experiment 20000235 PARAMETER Experiment Name: At_Siliques_P Parameter: Tissue Value: 5-10mm Siliques vs. Whole Plant
  misc_feature: MA Experiment ID: 20000264 Result: Up-regulated in Transcription
  misc_feature: MA Experiment 20000264 PARAMETER Experiment Name: At_Open_Flower_P Parameter: Age (day) Value: 21
  misc_feature: MA Experiment 20000264 PARAMETER Experiment Name: At_Open_Flower_P Parameter: Plant Line Value: WS
  misc_feature: MA Experiment 20000264 PARAMETER Experiment Name: At_Open_Flower_P Parameter: Tissue Value: Open Flower vs. Whole Plant
  misc_feature: MA Experiment ID: 20000265 Result: Up-regulated in Transcription
  misc_feature: MA Experiment 20000265 PARAMETER Experiment Name: At_Open_Flower_P Parameter: Age (day) Value: 21
  misc_feature: MA Experiment 20000265 PARAMETER Experiment Name: At_Open_Flower_P Parameter: Plant Line Value: WS
  misc_feature: MA Experiment 20000265 PARAMETER Experiment Name: At_Open_Flower_P Parameter: Tissue Value: Closed Flower vs. Whole Plant
  misc_feature: MA Experiment ID: 20000286 Result: Up-regulated in Transcription
  misc_feature: MA Experiment 20000286 PARAMETER Experiment Name: At_Open_Flower_P Parameter: Age (day) Value: 21
  misc_feature: MA Experiment 20000286 PARAMETER Experiment Name: At_Open_Flower_P Parameter: Plant Line Value: WS
  misc_feature: MA Experiment 20000286 PARAMETER Experiment Name: At_Open_Flower_P Parameter: Tissue Value: Half Open vs. Whole Plant
  misc_feature: MA Experiment ID: 20000438 Result: Up-regulated in Transcription
  misc_feature: MA Experiment 20000438 PARAMETER Experiment Name: At_Shoots__P Parameter: Age (day) Value: 14
  misc_feature: MA Experiment 20000438 PARAMETER Experiment Name: At_Shoots__P Parameter: Tissue Value: Shoots vs. Whole Plant
  misc_feature: MA Experiment ID: 20000439 Result: Up-regulated in Transcription
  misc_feature: MA Experiment 20000439 PARAMETER Experiment Name: At_Roots__P Parameter: Age (day) Value: 14 vs. 21
  misc_feature: MA Experiment 20000439 PARAMETER Experiment Name: At_Roots__P Parameter: Organism Value: A. thaliana
  misc_feature: MA Experiment 20000439 PARAMETER Experiment Name: At_Roots__P Parameter: Tissue Value: Roots vs. Whole Plant
ctctcgatttttcttgggaagaagaaactcatgggaattttcaggaattttgtcagccattttctctcatttgagaaaccactaaattagagcttcaaaaaacttctaaaggaatgaatgtttctttgatttccaagagagttttggttcgttgactgagtttagttttggagatctagcaactgaaagctggttaaatacttaaatggacgtagcaggctactgtttgtgaatcctctcgatggcgatgttgtttgtgtggaaaaagtatggcctgtttcagatgtttctctgttgattcaagttttaaacgagagccaagagtcagaaatcaggtcacaggctcgtgaaagctgctttgagtcaaacccatgtcaggtgctcctagagttcagtccatgaatgtggctgaagcagagaccaggtcaactctggggtctactgctaaaaaggctagtcctttcatcacacacaaagctgtatcaaagtcactgcgaaagcttgaaagatcctcatctgggcgtactggatcagatgagaaaacatcttatgctacaccaacagaaactgtgtcttcttcttctcagaagcatactcttaatgcggcttctatactacgacggcatgagcagaacctgaattctaatctgtcacttaatgcatcgttttcatctgatgcctccatggactcgttccacagccgagcatcaactggtcgcttgattaggtcgtacagtgttggaagtagaagtaagtcttacccttccaagccaagaagtgttgtctctgaaggtgctttggattcaccacctaatggttcagagactaagaagaggtgtacttgggtgacaccaaactccgatccatgttatatagttttccatgatgaagaatggggtgtgccagttcacgatgacaagaggttgtttgaactccttgtgctttcgggtgctttggccgaacacacatggcctacgatactgagcaagagacaggctttcagggaagtttttgctgattttgaccccaatgccattgtgaaaatcaatgagaagaagataattggtccaggaagcccggcaagcactttattgtctgatcttaagctaagggcagtcattgagaatgcacgccagatacttaaggtgatagaagaatacggatcatttgacaagtatatatggagttttgtgaagaataaggcgattgtgagcaagttcaggtaccagcgacaagtacctgcaaaaactccaaaagcagaagtgataagtaaagatctagtgagaagagggttccgcagcgtcggaccaacggtggtttactccttcatgcaggcagcagggataacaaacgatcatcttaccagttgtttcaggttccaccattgtatattcgaacatgaaaggtatgtctgaaaagaaggacttcctaaaacttgttaaagtccttttatgttttgtaaagcctccaatttgagtctattattagtattcaaaac

SEQ ID NO: 98910 - protein, 347 aa, Arabidopsis thaliana
  peptide (1)..(347): Ceres Seq. ID no. 13601740
  misc_feature (158)..(338): Pfam Name: Methyladenine glycosylase Pfam Description: Methyladenine glycosylase
  misc_feature (1)..(347): Homolog of NCBI NO: 15242914 NR Description: expressed protein [Arabidopsis thaliana]
  misc_feature (46)..(339): Homolog of NCBI NO: 38345034 NR Description: OSJNBa0029H02.18 [Oryza sativa (japonica
  misc_feature (1)..(344): Homolog of NCBI NO: 15218379 NR Description: expressed protein [Arabidopsis thaliana]
  misc_feature (56)..(344): Homolog of NCBI NO: 15220860 NR Description: DNA-3-methyladenine glycosidase -related
  misc_feature (66)..(345): Homolog of NCBI NO: 18410766 NR Description: DNA-3-methyladenine glycosylase I -related
  misc_feature (159)..(345): Homolog of NCBI NO: 25406407 NR Description: hypothetical protein F9E10.6 [imported] -
  misc_feature (151)..(339): Homolog of NCBI NO: 15241554 NR Description: expressed protein [Arabidopsis thaliana]
  misc_feature (46)..(345): Homolog of NCBI NO: 25518014 NR Description: F21F23.7 protein - Arabidopsis thaliana
  misc_feature (151)..(339): Homolog of NCBI NO: 21592537 NR Description: unknown [Arabidopsis thaliana]
  misc_feature (147)..(339): Homolog of NCBI NO: 18399721 NR Description: expressed protein [Arabidopsis thaliana]
MSGAPRVQSMNVAEAETRSTLGSTAKKASPFITHKAVSKSLRKLERSSSGRTGSDEKTSYATPTETVSSSSQKHTLNAASILRRHEQNLNSNLSLNASFSSDASMDSFHSRASTGRLIRSYSVGSRSKSYPSKPRSVVSEGALDSPPNGSETKKRCTWVTPNSDPCYIVFHDEEWGVPVHDDKRLFELLVLSGALAEHTWPTILSKRQAFREVFADFDPNAIVKINEKKIIGPGSPASTLLSDLKLRAVIENARQILKVIEEYGSFDKYIWSFVKNKAIVSKFRYQRQVPAKTPKAEVISKDLVRRGFRSVGPTVVYSFMQAAGITNDHLTSCFRFHHCIFEHERYV

SEQ ID NO: 98911 - protein, 338 aa, Arabidopsis thaliana
  peptide (1)..(338): Ceres Seq. ID no. 13601741
  misc_feature (149)..(329): Pfam Name: Methyladenine glycosylase Pfam Description: Methyladenine glycosylase
  misc_feature (1)..(338): Homolog of NCBI NO: 15242914 NR Description: expressed protein [Arabidopsis thaliana]
  misc_feature (37)..(330): Homolog of NCBI NO: 38345034 NR Description: OSJNBa0029H02.18 [Oryza sativa (japonica
  misc_feature (1)..(335): Homolog of NCBI NO: 15218379 NR Description: expressed protein [Arabidopsis thaliana]
  misc_feature (47)..(335): Homolog of NCBI NO: 15220860 NR Description: DNA-3-methyladenine glycosidase -related
  misc_feature (57)..(336): Homolog of NCBI NO: 18410766 NR Description: DNA-3-methyladenine glycosylase I -related
  misc_feature (150)..(336): Homolog of NCBI NO: 25406407 NR Description: hypothetical protein F9E10.6 [imported] -
  misc_feature (142)..(330): Homolog of NCBI NO: 15241554 NR Description: expressed protein [Arabidopsis thaliana]
  misc_feature (37)..(336): Homolog of NCBI NO: 25518014 NR Description: F21F23.7 protein - Arabidopsis thaliana
  misc_feature (142)..(330): Homolog of NCBI NO: 21592537 NR Description: unknown [Arabidopsis thaliana]
  misc_feature (138)..(330): Homolog of NCBI NO: 18399721 NR Description: expressed protein [Arabidopsis thaliana]
MNVAEAETRSTLGSTAKKASPFITHKAVSKSLRKLERSSSGRTGSDEKTSYATPTETVSSSSQKHTLNAASILRRHEQNLNSNLSLNASFSSDASMDSFHSRASTGRLIRSYSVGSRSKSYPSKPRSVVSEGALDSPPNGSETKKRCTWVTPNSDPCYIVFHDEEWGVPVHDDKRLFELLVLSGALAEHTWPTILSKRQAFREVFADFDPNAIVKINEKKIIGPGSPASTLLSDLKLRAVIENARQILKVIEEYGSFDKYIWSFVKNKAIVSKFRYQRQVPAKTPKAEVISKDLVRRGFRSVGPTVVYSFMQAAGITNDHLTSCFRFHHCIFEHERYV

SEQ ID NO: 98912 - protein, 243 aa, Arabidopsis thaliana
  peptide (1)..(243): Ceres Seq. ID no. 13601742
  misc_feature (54)..(234): Pfam Name: Methyladenine glycosylase Pfam Description: Methyladenine glycosylase
  misc_feature (1)..(243): Homolog of NCBI NO: 15242914 NR Description: expressed protein [Arabidopsis thaliana]
  misc_feature (1)..(235): Homolog of NCBI NO: 38345034 NR Description: OSJNBa0029H02.18 [Oryza sativa (japonica
  misc_feature (1)..(240): Homolog of NCBI NO: 15218379 NR Description: expressed protein [Arabidopsis thaliana]
  misc_feature (1)..(240): Homolog of NCBI NO: 15220860 NR Description: DNA-3-methyladenine glycosidase -related
  misc_feature (1)..(241): Homolog of NCBI NO: 18410766 NR Description: DNA-3-methyladenine glycosylase I -related
  misc_feature (55)..(241): Homolog of NCBI NO: 25406407 NR Description: hypothetical protein F9E10.6 [imported] -
  misc_feature (47)..(235): Homolog of NCBI NO: 15241554 NR Description: expressed protein [Arabidopsis thaliana]
  misc_feature (1)..(241): Homolog of NCBI NO: 25518014 NR Description: F21F23.7 protein - Arabidopsis thaliana
  misc_feature (47)..(235): Homolog of NCBI NO: 21592537 NR Description: unknown [Arabidopsis thaliana]
  misc_feature (43)..(235): Homolog of NCBI NO: 18399721 NR Description: expressed protein [Arabidopsis thaliana]
MDSFHSRASTGRLIRSYSVGSRSKSYPSKPRSVVSEGALDSPPNGSETKKRCTWVTPNSDPCYIVFHDEEWGVPVHDDKRLFELLVLSGALAEHTWPTILSKRQAFREVFADFDPNAIVKINEKKIIGPGSPASTLLSDLKLRAVIENARQILKVIEEYGSFDKYIWSFVKNKAIVSKFRYQRQVPAKTPKAEVISKDLVRRGFRSVGPTVVYSFMQAAGITNDHLTSCFRFHHCIFEHERYV

SEQ ID NO: 98913 - DNA, 1382 bp, Arabidopsis thaliana
  misc_feature (1)..(1382): Ceres Seq. ID no. 13601745
  misc_feature: MA Experiment ID: 108488 Result: Down-regulated in Transcription
  misc_feature: MA Experiment ID: 108573 Result: Up-regulated in Transcription
  misc_feature: MA Experiment 108573 PARAMETER Experiment Name: At_Drought_cDNA_P Parameter: Timepoint (hr) Value: 6
  misc_feature: MA Experiment 108573 PARAMETER Experiment Name: At_Drought_cDNA_P Parameter: Tissue Value: Aerial
  misc_feature: MA Experiment 108573 PARAMETER Experiment Name: At_Drought_cDNA_P Parameter: Treatment Value: Drought vs. No Drought
  misc_feature: MA Experiment ID: 20000171 Result: Up-regulated in Transcription
  misc_feature: MA Experiment 20000171 PARAMETER Experiment Name: At_42deg_Heat_P Parameter: Age (day) Value: 14
  misc_feature: MA Experiment 20000171 PARAMETER Experiment Name: At_42deg_Heat_P Parameter: Organism Value: A. thaliana
  misc_feature: MA Experiment 20000171 PARAMETER Experiment Name: At_42deg_Heat_P Parameter: Plant Line Value: WS
  misc_feature: MA Experiment 20000171 PARAMETER Experiment Name: At_42deg_Heat_P Parameter: Temperature (deg C) Value: 42 vs. 22
  misc_feature: MA Experiment 20000171 PARAMETER Experiment Name: At_42deg_Heat_P Parameter: Timepoint (hr) Value: 1
  misc_feature: MA Experiment 20000171 PARAMETER Experiment Name: At_42deg_Heat_P Parameter: Tissue Value: Aerial
  misc_feature: MA Experiment ID: 20000173 Result: Up-regulated in Transcription
  misc_feature: MA Experiment 20000173 PARAMETER Experiment Name: At_42deg_Heat_P Parameter: Age (day) Value: 14
  misc_feature: MA Experiment 20000173 PARAMETER Experiment Name: At_42deg_Heat_P Parameter: Organism Value: A. thaliana
  misc_feature: MA Experiment 20000173 PARAMETER Experiment Name: At_42deg_Heat_P Parameter: Plant Line Value: WS
  misc_feature: MA Experiment 20000173 PARAMETER Experiment Name: At_42deg_Heat_P Parameter: Temperature (deg C) Value: 42 vs. 22
  misc_feature: MA Experiment 20000173 PARAMETER Experiment Name: At_42deg_Heat_P Parameter: Timepoint (hr) Value: 6
  misc_feature: MA Experiment 20000173 PARAMETER Experiment Name: At_42deg_Heat_P Parameter: Tissue Value: Aerial
  misc_feature: MA Experiment ID: 20000224 Result: Down-regulated in Transcription
aaacctctctcctcgaccctttaatttctaatcaccgaccaaaattgatcggaaacctagagctcttcgtattgctccgccaccatgcatatccggcgccagatcttcgttaaatctcctgactgtcaaaaagtcgtcgctctgcaattggatcctgcgcaatctctattaactctttcgggtatcacttccttactcgaatcgtcgcagcgtatatcgttttcggcttgctcgattactctagatgggaagcttttgaatggctctacacggatccaagtatcgaagcttccttctgtatccatgctcactcttttccctcgcctccgtggaggtggaggagatggtggggcaacgggagccgagtctcgcgattgctatctcaatatgtacgcggagaagaaacctgacaaggttgatcctaatgagcagaggctctccaaatggttgaattgtgctttgtctaacgagcctttggctgagccgtgcgtgattgatctccttgggaatttgttcaataaagaagttttggtgcacgctttgttgtctaagaggttgcctaaacaattctcgtacattaagggtttgaaagatatggtgaatattaagcttacgcctgttgctggttctgatggttcatcgcaagatacgactagtgcacagtttcagtgtccggtctcagggcttgaattcaatggaaagtacaagtttttcgctttgaggggatgtggacatgtgatgagcgcaaaggcgttgaaggaagtgaagtcttcttcttgtttggtgtgtcatgcggatgtcaaagattctgataagattgtgatcaatggtactgaggaggaagtagatttgttgagggagaggatggaggaggagaaagctaagctgagagagaagaaaggtgtctcaaagaagagtaagaacggtgctgctgtggtggctgatacaggtgcgaaggtcgcaaagagacagatagaggatgggaatgtcaatggcaatggtataactgtgaagaaattcaaggcggcggataaagtgccggttaatgctactaaggaagtctatgcttctctctttacttcctctaagaagaagtctgatttcagggagacttactcttgcaggtcacttcctctcggcaggaattgatttgttggatcaatgttgtttacctgctcgcttcatttgctctgtaatctgttttgattatattgatatatcaacttgcttttgtaatttcgcctactggataatataatgtttttcttttccttttgcaattggtaaaaacagtaaacatgtttgcatccactatgctaaaactagtaaaagtgttgtatcataagctgcaattgtaacaagaggatatgtatgttgtttac

SEQ ID NO: 98914 - protein, 354 aa, Arabidopsis thaliana
  peptide (1)..(354): Ceres Seq. ID no. 13601746
  misc_feature (84)..(338): Pfam Name: Protein of unknown function, DUF602 Pfam Description: Protein of unknown function, DUF602
  misc_feature (1)..(354): Homolog of NCBI NO: 15242923 NR Description: expressed protein [Arabidopsis thaliana]
  misc_feature (74)..(354): Homolog of NCBI NO: 9759527 NR Description: gene_id:F2C19.3~ref|NP_057491.1~similar to
  misc_feature (106)..(345): Homolog of NCBI NO: 32484231 NR Description: Unknown (protein for MGC:64388) [Xenopus laevis]
  misc_feature (85)..(294): Homolog of NCBI NO: 31197425 NR Description: ENSANGP00000002198 [Anopheles gambiae] ENSANGP00000006158 [Anopheles gambiae] ENSANGP00000002198 [Anopheles gambiae str. PEST]
  misc_feature (106)..(272): Homolog of NCBI NO: 27735473 NR Description: Similar to chromosome 20 open reading frame 43
  misc_feature (106)..(284): Homolog of NCBI NO: 6563236 NR Description: protein x 0001 [Homo sapiens]
  misc_feature (106)..(284): Homolog of NCBI NO: 23813888 NR Description: Protein C20orf43 (HSPC164/HSPC169) (AD-007) >gi|6841560|gb|AAF29133.1|AF161518_1 HSPC169 [Homo sapiens]
  misc_feature (106)..(283): Homolog of NCBI NO: 7705483 NR Description: chromosome 20 open reading frame 43 [Homo
  misc_feature (106)..(284): Homolog of NCBI NO: 7020598 NR Description: unnamed protein product [Homo sapiens]
  misc_feature (106)..(284): Homolog of NCBI NO: 13182767 NR Description: CDA05 [Homo sapiens]
MHIRRQIFVKSPDCQKVVALQLDPAQSLLTLSGITSLLESSQRISFSACSITLDGKLLNGSTRIQVSKLPSVSMLTLFPRLRGGGGDGGATGAESRDCYLNMYAEKKPDKVDPNEQRLSKWLNCALSNEPLAEPCVIDLLGNLFNKEVLVHALLSKRLPKQFSYIKGLKDMVNIKLTPVAGSDGSSQDTTSAQFQCPVSGLEFNGKYKFFALRGCGHVMSAKALKEVKSSSCLVCHADVKDSDKIVINGTEEEVDLLRERMEEEKAKLREKKGVSKKSKNGAAVVADTGAKVAKRQIEDGNVNGNGITVKKFKAADKVPVNATKEVYASLFTSSKKKSDFRETYSCRSLPLGRN

SEQ ID NO: 98915 - protein, 281 aa, Arabidopsis thaliana
  peptide (1)..(281): Ceres Seq. ID no. 13601747
  misc_feature (11)..(265): Pfam Name: Protein of unknown function, DUF602 Pfam Description: Protein of unknown function, DUF602
  misc_feature (1)..(281): Homolog of NCBI NO: 15242923 NR Description: expressed protein [Arabidopsis thaliana]
  misc_feature (1)..(281): Homolog of NCBI NO: 9759527 NR Description: gene_id:F2C19.3~ref|NP_057491.1~similar to
  misc_feature (33)..(272): Homolog of NCBI NO: 32484231 NR Description: Unknown (protein for MGC:64388) [Xenopus laevis]
  misc_feature (12)..(221): Homolog of NCBI NO: 31197425 NR Description: ENSANGP00000002198 [Anopheles gambiae] ENSANGP00000006158 [Anopheles gambiae] ENSANGP00000002198 [Anopheles gambiae str. PEST]
  misc_feature (33)..(199): Homolog of NCBI NO: 27735473 NR Description: Similar to chromosome 20 open reading frame 43
  misc_feature (33)..(211): Homolog of NCBI NO: 6563236 NR Description: protein x 0001 [Homo sapiens]
  misc_feature (33)..(211): Homolog of NCBI NO: 23813888 NR Description: Protein C20orf43 (HSPC164/HSPC169) (AD-007) >gi|6841560|gb|AAF29133.1|AF161518_1 HSPC169 [Homo sapiens]
  misc_feature (33)..(210): Homolog of NCBI NO: 7705483 NR Description: chromosome 20 open reading frame 43 [Homo
  misc_feature (33)..(211): Homolog of NCBI NO: 7020598 NR Description: unnamed protein product [Homo sapiens]
  misc_feature (33)..(211): Homolog of NCBI NO: 13182767 NR Description: CDA05 [Homo sapiens]
MLTLFPRLRGGGGDGGATGAESRDCYLNMYAEKKPDKVDPNEQRLSKWLNCALSNEPLAEPCVIDLLGNLFNKEVLVHALLSKRLPKQFSYIKGLKDMVNIKLTPVAGSDGSSQDTTSAQFQCPVSGLEFNGKYKFFALRGCGHVMSAKALKEVKSSSCLVCHADVKDSDKIVINGTEEEVDLLRERMEEEKAKLREKKGVSKKSKNGAAVVADTGAKVAKRQIEDGNVNGNGITVKKFKAADKVPVNATKEVYASLFTSSKKKSDFRETYSCRSLPLGRN

SEQ ID NO: 98916 - protein, 253 aa, Arabidopsis thaliana
  peptide (1)..(253): Ceres Seq. ID no. 13601748
  misc_feature (1)..(237): Pfam Name: Protein of unknown function, DUF602 Pfam Description: Protein of unknown function, DUF602
  misc_feature (1)..(253): Homolog of NCBI NO: 15242923 NR Description: expressed protein [Arabidopsis thaliana]
  misc_feature (1)..(253): Homolog of NCBI NO: 9759527 NR Description: gene_id:F2C19.3~ref|NP_057491.1~similar to
  misc_feature (5)..(244): Homolog of NCBI NO: 32484231 NR Description: Unknown (protein for MGC:64388) [Xenopus laevis]
  misc_feature (1)..(193): Homolog of NCBI NO: 31197425 NR Description: ENSANGP00000002198 [Anopheles gambiae] ENSANGP00000006158 [Anopheles gambiae] ENSANGP00000002198 [Anopheles gambiae str. PEST]
  misc_feature (5)..(171): Homolog of NCBI NO: 27735473 NR Description: Similar to chromosome 20 open reading frame 43
  misc_feature (5)..(183): Homolog of NCBI NO: 6563236 NR Description: protein x 0001 [Homo sapiens]
  misc_feature (5)..(183): Homolog of NCBI NO: 23813888 NR Description: Protein C20orf43 (HSPC164/HSPC169) (AD-007) >gi|6841560|gb|AAF29133.1|AF161518_1 HSPC169 [Homo sapiens]
  misc_feature (5)..(182): Homolog of NCBI NO: 7705483 NR Description: chromosome 20 open reading frame 43 [Homo
  misc_feature (5)..(183): Homolog of NCBI NO: 7020598 NR Description: unnamed protein product [Homo sapiens]
  misc_feature (5)..(183): Homolog of NCBI NO: 13182767 NR Description: CDA05 [Homo sapiens]
MYAEKKPDKVDPNEQRLSKWLNCALSNEPLAEPCVIDLLGNLFNKEVLVHALLSKRLPKQFSYIKGLKDMVNIKLTPVAGSDGSSQDTTSAQFQCPVSGLEFNGKYKFFALRGCGHVMSAKALKEVKSSSCLVCHADVKDSDKIVINGTEEEVDLLRERMEEEKAKLREKKGVSKKSKNGAAVVADTGAKVAKRQIEDGNVNGNGITVKKFKAADKVPVNATKEVYASLFTSSKKKSDFRETYSCRSLPLGRN

SEQ ID NO: 98917 - DNA, 957 bp, Arabidopsis thaliana
  misc_feature (1)..(957): Ceres Seq. ID no. 13601753
  misc_feature: MA Experiment ID: 20000307 Result: Down-regulated in Transcription
  misc_feature: MA Experiment 20000307 PARAMETER Experiment Name: At_Germinating_Seeds_Sub_P Parameter: Age (hr) Value: 24 vs. 0
  misc_feature: MA Experiment 20000307 PARAMETER Experiment Name: At_Germinating_Seeds_Sub_P Parameter: Organism Value: A. thaliana
  misc_feature: MA Experiment 20000307 PARAMETER Experiment Name: At_Germinating_Seeds_Sub_P Parameter: Plant Line Value: WS
  misc_feature: MA Experiment 20000307 PARAMETER Experiment Name: At_Germinating_Seeds_Sub_P Parameter: Tissue Value: Germinating Seeds
  misc_feature: MA Experiment ID: 20000440 Result: Up-regulated in Transcription
  misc_feature: MA Experiment 20000440 PARAMETER Experiment Name: At_Closed-Flower__Sub_P Parameter: Tissue Value: Closed Flower vs. Whole Plant
ctctttgcaattactctgttttttgcttgtttaaaagtttttgaagaggaagagcaaatcattgattaggaaaatggagaaagcagttcactcgtcgaccacgtctggaccggcggttccaggggagacaacaaagaccggaacctccataattgacactgcagcctccgctgttcaaagttttgcaccggttaaccaaatccaccaacatctctgcgcgttccatttctatgctgacgacatggcacgacaagtagaggctcaccatttctgcagtcacgtgaacgaagagatgcgtcagtgtttgatctacgacggtccggatgcaaacgctcgtctaattggattggagtacatagtgtcagagaagctgttcatgactttgcctgacgaagagaagaagctttggcactcgcacgagtgggaagtgaaaggagggttcttgttcatgcctggtgttccaggtgccattcagcgtaaagatcttgataaagtcgctaagacttatgggaaagttttccatttttggcaagttgatttgggccatgagcttcccattggtttacctaatgtcatgatggctgttacacgcgatggccagcttttccacgagatgattcaggaggcagagaagcggtttggggtatcggtagagggggagagggactcacgggcgtatatgtctggacctgagctcgggatccatccattggcgaatggaggaggcaaagggatgaaactagagctacgagaggtcgatatcaagccggttgagtctgtcggcagcgtctttgtctgagtttacttaaaacctctaataatgccctcaaagcaagcaatgtatgttttggtaaacacaaaacgtacggaactagacaacaagattacttaaaatagtttggattatttctttgtggatcatatttataattagtaataagataagaaataatatct

SEQ ID NO: 98918 - protein, 241 aa, Arabidopsis thaliana
  peptide (1)..(241): Ceres Seq. ID no. 13601754
  misc_feature (1)..(241): Homolog of NCBI NO: 30685146 NR Description: expressed protein [Arabidopsis thaliana] unknown protein [Arabidopsis thaliana]
  misc_feature (1)..(241): Homolog of NCBI NO: 26451037 NR Description: unknown protein [Arabidopsis thaliana]
  misc_feature (1)..(241): Homolog of NCBI NO: 15220526 NR Description: expressed protein [Arabidopsis thaliana] T25N20.16 [Arabidopsis thaliana] >gi|17979351|gb|AAL49901.1| protein [Arabidopsis thaliana] >gi|20466017|gb|AAM20230.1|
  misc_feature (15)..(240): Homolog of NCBI NO: 4105683 NR Description: unknown [Oryza sativa] >gi|4105692|gb|AAD02496.1|
  misc_feature (13)..(224): Homolog of NCBI NO: 40740423 NR Description: hypothetical protein AN7959.2 [Aspergillus
  misc_feature (7)..(228): Homolog of NCBI NO: 16760314 NR Description: putative secreted protein [Salmonella enterica enterica serovar Typhi] >gi|29141921|ref|NP_805263.1| putative protein [Salmonella enterica subsp. enterica serovar Typhi Ty2]
  misc_feature (7)..(228): Homolog of NCBI NO: 16764905 NR Description: putative outer membrane or secreted lipoprotein typhimurium LT2] >gi|16420083|gb|AAL20479.1| putative outer
  misc_feature (11)..(215): Homolog of NCBI NO: 32413853 NR Description: hypothetical protein [Neurospora crassa]
  misc_feature (10)..(231): Homolog of NCBI NO: 34910820 NR Description: P0456A01.15 [Oryza sativa (japonica
  misc_feature (10)..(206): Homolog of NCBI NO: 34909516 NR Description: P0481E12.28 [Oryza sativa (japonica
MEKAVHSSTTSGPAVPGETTKTGTSIIDTAASAVQSFAPVNQIHQHLCAFHFYADDMARQVEAHHFCSHVNEEMRQCLIYDGPDANARLIGLEYIVSEKLFMTLPDEEKKLWHSHEWEVKGGFLFMPGVPGAIQRKDLDKVAKTYGKVFHFWQVDLGHELPIGLPNVMMAVTRDGQLFHEMIQEAEKRFGVSVEGERDSRAYMSGPELGIHPLANGGGKGMKLELREVDIKPVESVGSVFV

SEQ ID NO: 98919 - protein, 185 aa, Arabidopsis thaliana
  peptide (1)..(185): Ceres Seq. ID no. 13601755
  misc_feature (1)..(185): Homolog of NCBI NO: 30685146 NR Description: expressed protein [Arabidopsis thaliana] unknown protein [Arabidopsis thaliana]
  misc_feature (1)..(185): Homolog of NCBI NO: 26451037 NR Description: unknown protein [Arabidopsis thaliana]
  misc_feature (1)..(185): Homolog of NCBI NO: 15220526 NR Description: expressed protein [Arabidopsis thaliana] T25N20.16 [Arabidopsis thaliana] >gi|17979351|gb|AAL49901.1| protein [Arabidopsis thaliana] >gi|20466017|gb|AAM20230.1|
  misc_feature (1)..(184): Homolog of NCBI NO: 4105683 NR Description: unknown [Oryza sativa] >gi|4105692|gb|AAD02496.1|
  misc_feature (1)..(168): Homolog of NCBI NO: 40740423 NR Description: hypothetical protein AN7959.2 [Aspergillus
  misc_feature (1)..(172): Homolog of NCBI NO: 16760314 NR Description: putative secreted protein [Salmonella enterica enterica serovar Typhi] >gi|29141921|ref|NP_805263.1| putative protein [Salmonella enterica subsp. enterica serovar Typhi Ty2]
  misc_feature (1)..(172): Homolog of NCBI NO: 16764905 NR Description: putative outer membrane or secreted lipoprotein typhimurium LT2] >gi|16420083|gb|AAL20479.1| putative outer
  misc_feature (1)..(159): Homolog of NCBI NO: 32413853 NR Description: hypothetical protein [Neurospora crassa]
  misc_feature (1)..(175): Homolog of NCBI NO: 34910820 NR Description: P0456A01.15 [Oryza sativa (japonica
  misc_feature (1)..(150): Homolog of NCBI NO: 34909516 NR Description: P0481E12.28 [Oryza sativa (japonica
MARQVEAHHFCSHVNEEMRQCLIYDGPDANARLIGLEYIVSEKLFMTLPDEEKKLWHSHEWEVKGGFLFMPGVPGAIQRKDLDKVAKTYGKVFHFWQVDLGHELPIGLPNVMMAVTRDGQLFHEMIQEAEKRFGVSVEGERDSRAYMSGPELGIHPLANGGGKGMKLELREVDIKPVESVGSVFV

SEQ ID NO: 98920 - protein, 168 aa, Arabidopsis thaliana
  peptide (1)..(168): Ceres Seq. ID no. 13601756
  misc_feature (1)..(168): Homolog of NCBI NO: 30685146 NR Description: expressed protein [Arabidopsis thaliana] unknown protein [Arabidopsis thaliana]
  misc_feature (1)..(168): Homolog of NCBI NO: 26451037 NR Description: unknown protein [Arabidopsis thaliana]
  misc_feature (1)..(168): Homolog of NCBI NO: 15220526 NR Description: expressed protein [Arabidopsis thaliana] T25N20.16 [Arabidopsis thaliana] >gi|17979351|gb|AAL49901.1| protein [Arabidopsis thaliana] >gi|20466017|gb|AAM20230.1|
  misc_feature (1)..(167): Homolog of NCBI NO: 4105683 NR Description: unknown [Oryza sativa] >gi|4105692|gb|AAD02496.1|
  misc_feature (1)..(151): Homolog of NCBI NO: 40740423 NR Description: hypothetical protein AN7959.2 [Aspergillus
  misc_feature (1)..(155): Homolog of NCBI NO: 16760314 NR Description: putative secreted protein [Salmonella enterica enterica serovar Typhi] >gi|29141921|ref|NP_805263.1| putative protein [Salmonella enterica subsp. enterica serovar Typhi Ty2]
  misc_feature (1)..(155): Homolog of NCBI NO: 16764905 NR Description: putative outer membrane or secreted lipoprotein typhimurium LT2] >gi|16420083|gb|AAL20479.1| putative outer
  misc_feature (1)..(142): Homolog of NCBI NO: 32413853 NR Description: hypothetical protein [Neurospora crassa]
  misc_feature (1)..(158): Homolog of NCBI NO: 34910820 NR Description: P0456A01.15 [Oryza sativa (japonica
  misc_feature (1)..(133): Homolog of NCBI NO: 34909516 NR Description: P0481E12.28 [Oryza sativa (japonica
MRQCLIYDGPDANARLIGLEYIVSEKLFMTLPDEEKKLWHSHEWEVKGGFLFMPGVPGAIQRKDLDKVAKTYGKVFHFWQVDLGHELPIGLPNVMMAVTRDGQLFHEMIQEAEKRFGVSVEGERDSRAYMSGPELGIHPLANGGGKGMKLELREVDIKPVESVGSVFV

SEQ ID NO: 98921 - DNA, 2022 bp, Arabidopsis thaliana
  misc_feature (1)..(2022): Ceres Seq. ID no. 13601765
  misc_feature: MA Experiment ID: 108434 Result: Up-regulated in Transcription
  misc_feature: MA Experiment 108434 PARAMETER Experiment Name: At_Root_Tips_cDNA_P Parameter: Tissue Value: Root Tips
  misc_feature: MA Experiment ID: 108464 Result: Up-regulated in Transcription
  misc_feature: MA Experiment 108464 PARAMETER Experiment Name: At_Germinating_Seeds_cDNA_P Parameter: Age (day) Value: 4 vs. 0
  misc_feature: MA Experiment 108464 PARAMETER Experiment Name: At_Germinating_Seeds_cDNA_P Parameter: Tissue Value: Germinating Seeds
  misc_feature: MA Experiment ID: 108489 Result: Down-regulated in Transcription
  misc_feature: MA Experiment ID: 108576 Result: Up-regulated in Transcription
  misc_feature: MA Experiment 108576 PARAMETER Experiment Name: At_42deg_Heat_cDNA_P Parameter: Temperature (deg C) Value: 42 vs. 22
  misc_feature: MA Experiment 108576 PARAMETER Experiment Name: At_42deg_Heat_cDNA_P Parameter: Timepoint (hr) Value: 1
  misc_feature: MA Experiment 108576 PARAMETER Experiment Name: At_42deg_Heat_cDNA_P Parameter: Tissue Value: Aerial
  misc_feature: MA Experiment ID: 108577 Result: Up-regulated in Transcription
  misc_feature: MA Experiment 108577 PARAMETER Experiment Name: At_42deg_Heat_cDNA_P Parameter: Temperature (deg C) Value: 42 vs. 22
  misc_feature: MA Experiment 108577 PARAMETER Experiment Name: At_42deg_Heat_cDNA_P Parameter: Timepoint (hr) Value: 6
  misc_feature: MA Experiment 108577 PARAMETER Experiment Name: At_42deg_Heat_cDNA_P Parameter: Tissue Value: Aerial
  misc_feature: MA Experiment ID: 108595 Result: Up-regulated in Transcription
  misc_feature: MA Experiment 108595 PARAMETER Experiment Name: At_Ler-pi_Ovule_cDNA_P Parameter: Plant Line Value: null
  misc_feature: MA Experiment ID: 108667 Result: Up-regulated in Transcription
  misc_feature: MA Experiment 108667 PARAMETER Experiment Name: At_2mM_SA_cDNA_P Parameter: Plant Line Value: WS
  misc_feature: MA Experiment 108667 PARAMETER Experiment Name: At_2mM_SA_cDNA_P Parameter: Timepoint (hr) Value: 1
  misc_feature: MA Experiment 108667 PARAMETER Experiment Name: At_2mM_SA_cDNA_P Parameter: Treatment Value: 2mM SA vs. No Treatment
  misc_feature: MA Experiment ID: 20000093 Result: Up-regulated in Transcription
  misc_feature: MA Experiment 20000093 PARAMETER Experiment Name: At_42deg_Heat_cDNA_P Parameter: Temperature (deg C) Value: 42 vs. 22
  misc_feature: MA Experiment 20000093 PARAMETER Experiment Name: At_42deg_Heat_cDNA_P Parameter: Timepoint (hr) Value: 0.5
  misc_feature: MA Experiment 20000093 PARAMETER Experiment Name: At_42deg_Heat_cDNA_P Parameter: Tissue Value: Aerial
  misc_feature: MA Experiment ID: 20000111 Result: Up-regulated in Transcription
  misc_feature: MA Experiment 20000111 PARAMETER Experiment Name: At_42deg_Heat_cDNA_P Parameter: Temperature (deg C) Value: 42 vs. 22
  misc_feature: MA Experiment 20000111 PARAMETER Experiment Name: At_42deg_Heat_cDNA_P Parameter: Timepoint (hr) Value: 6
  misc_feature: MA Experiment 20000111 PARAMETER Experiment Name: At_42deg_Heat_cDNA_P Parameter: Tissue Value: Aerial
  misc_feature: MA Experiment ID: 20000112 Result: Up-regulated in Transcription
  misc_feature: MA Experiment 20000112 PARAMETER Experiment Name: At_42deg_Heat_cDNA_P Parameter: Temperature (deg C) Value: 42 vs. 22
  misc_feature: MA Experiment 20000112 PARAMETER Experiment Name: At_42deg_Heat_cDNA_P Parameter: Timepoint (hr) Value: 2
  misc_feature: MA Experiment 20000112 PARAMETER Experiment Name: At_42deg_Heat_cDNA_P Parameter: Tissue Value: Aerial
  misc_feature: MA Experiment ID: 20000113 Result: Up-regulated in Transcription
  misc_feature: MA Experiment 20000113 PARAMETER Experiment Name: At_42deg_Heat_cDNA_P Parameter: Temperature (deg C) Value: 42 vs. 22
  misc_feature: MA Experiment 20000113 PARAMETER Experiment Name: At_42deg_Heat_cDNA_P Parameter: Timepoint (hr) Value: 8
  misc_feature: MA Experiment 20000113 PARAMETER Experiment Name: At_42deg_Heat_cDNA_P Parameter: Tissue Value: Aerial
  misc_feature: MA Experiment ID: 20000144 Result: Up-regulated in Transcription
  misc_feature: MA Experiment 20000144 PARAMETER Experiment Name: At_42deg_Heat_cDNA_P Parameter: Temperature (deg C) Value: 42 vs. 22
  misc_feature: MA Experiment 20000144 PARAMETER Experiment Name: At_42deg_Heat_cDNA_P Parameter: Timepoint (hr) Value: 1
  misc_feature: MA Experiment 20000144 PARAMETER Experiment Name: At_42deg_Heat_cDNA_P Parameter: Tissue Value: Aerial
  misc_feature: MA Experiment ID: 20000171 Result: Up-regulated in Transcription
  misc_feature: MA Experiment 20000171 PARAMETER Experiment Name: At_42deg_Heat_P Parameter: Age (day) Value: 14
  misc_feature: MA Experiment 20000171 PARAMETER Experiment Name: At_42deg_Heat_P Parameter: Organism Value: A. thaliana
  misc_feature: MA Experiment 20000171 PARAMETER Experiment Name: At_42deg_Heat_P Parameter: Plant Line Value: WS
  misc_feature: MA Experiment 20000171 PARAMETER Experiment Name: At_42deg_Heat_P Parameter: Temperature (deg C) Value: 42 vs. 22
  misc_feature: MA Experiment 20000171 PARAMETER Experiment Name: At_42deg_Heat_P Parameter: Timepoint (hr) Value: 1
  misc_feature: MA Experiment 20000171 PARAMETER Experiment Name: At_42deg_Heat_P Parameter: Tissue Value: Aerial
  misc_feature: MA Experiment ID: 20000173 Result: Up-regulated in Transcription
  misc_feature: MA Experiment 20000173 PARAMETER Experiment Name: At_42deg_Heat_P Parameter: Age (day) Value: 14
  misc_feature: MA Experiment 20000173 PARAMETER Experiment Name: At_42deg_Heat_P Parameter: Organism Value: A. thaliana
  misc_feature: MA Experiment 20000173 PARAMETER Experiment Name: At_42deg_Heat_P Parameter: Plant Line Value: WS
  misc_feature: MA Experiment 20000173 PARAMETER Experiment Name: At_42deg_Heat_P Parameter: Temperature (deg C) Value: 42 vs. 22
  misc_feature: MA Experiment 20000173 PARAMETER Experiment Name: At_42deg_Heat_P Parameter: Timepoint (hr) Value: 6
  misc_feature: MA Experiment 20000173 PARAMETER Experiment Name: At_42deg_Heat_P Parameter: Tissue Value: Aerial
  misc_feature: MA Experiment ID: 20000437 Result: Up-regulated in Transcription
  misc_feature: MA Experiment 20000437 PARAMETER Experiment Name: At_Drought_P Parameter: Age (day) Value: 8
  misc_feature: MA Experiment 20000437 PARAMETER Experiment Name: At_Drought_P Parameter: Organism Value: A. thaliana
  misc_feature: MA Experiment 20000437 PARAMETER Experiment Name: At_Drought_P Parameter: Plant Line Value: WS
  misc_feature: MA Experiment 20000437 PARAMETER Experiment Name: At_Drought_P Parameter: Timepoint (hr) Value: 24
  misc_feature: MA Experiment 20000437 PARAMETER Experiment Name: At_Drought_P Parameter: Tissue Value: Whole Plant
  misc_feature: MA Experiment 20000437 PARAMETER Experiment Name: At_Drought_P Parameter: Treatment Value: Drought vs. No Drought
  misc_feature: MA Experiment ID: 20000441 Result: Up-regulated in Transcription
  misc_feature: MA Experiment 20000441 PARAMETER Experiment Name: At_1uM_BR-BRZ__P Parameter: Tissue Value: Shoot Apices
  misc_feature: MA Experiment 20000441 PARAMETER Experiment Name: At_1uM_BR-BRZ__P Parameter: Treatment Value: 1uM BR vs. No Treatment
  misc_feature: MA Experiment ID: 20000443 Result: Up-regulated in Transcription
  misc_feature: MA Experiment 20000443 PARAMETER Experiment Name: At_1uM_BR-BRZ__P Parameter: Tissue Value: Shoot Apices
  misc_feature: MA Experiment 20000443 PARAMETER Experiment Name: At_1uM_BR-BRZ__P Parameter: Treatment Value: 1uM BRZ vs. No Treatment
  misc_feature: MA Experiment ID: 20000709 Result: Up-regulated in Transcription
  misc_feature: MA Experiment 20000709 PARAMETER Experiment Name: At_15mM_NH4NO3_L-to-H_P Parameter: Age (hr) Value: 14
  misc_feature: MA Experiment 20000709 PARAMETER Experiment Name: At_15mM_NH4NO3_L-to-H_P Parameter: Organism Value: A. thaliana
  misc_feature: MA Experiment 20000709 PARAMETER Experiment Name: At_15mM_NH4NO3_L-to-H_P Parameter: Plant Line Value: WS
  misc_feature: MA Experiment 20000709 PARAMETER Experiment Name: At_15mM_NH4NO3_L-to-H_P Parameter: Timepoint (hr) Value: 4
  misc_feature: MA Experiment 20000709 PARAMETER Experiment Name: At_15mM_NH4NO3_L-to-H_P Parameter: Tissue Value: Aerial
  misc_feature: MA Experiment 20000709 PARAMETER Experiment Name: At_15mM_NH4NO3_L-to-H_P Parameter: Treatment Value: 15mM NH4NO3 vs. 30mM Mannitol
  misc_feature: MA Experiment ID: 20001248 Result: Down-regulated in Transcription
  misc_feature: MA Experiment 20001248 PARAMETER Experiment Name: At_Far-red-induction_P Parameter: Age (day) Value: 7
  misc_feature: MA Experiment 20001248 PARAMETER Experiment Name: At_Far-red-induction_P Parameter: Light Value: Far-red vs. White
  misc_feature: MA Experiment 20001248 PARAMETER Experiment Name: At_Far-red-induction_P Parameter: Organism Value: A. thaliana
  misc_feature: MA Experiment 20001248 PARAMETER Experiment Name: At_Far-red-induction_P Parameter: Plant Line Value: Columbia
  misc_feature: MA Experiment 20001248 PARAMETER Experiment Name: At_Far-red-induction_P Parameter: Timepoint (hr) Value: 4
  misc_feature: MA Experiment 20001248 PARAMETER Experiment Name: At_Far-red-induction_P Parameter: Tissue Value: Whole Plant
  misc_feature: MA Experiment ID: 20001554 Result: Up-regulated in Transcription
  misc_feature: MA Experiment 20001554 PARAMETER Experiment Name: At_Drought_Soil_Dry_P Parameter: Age (day) Value: 21
  misc_feature: MA Experiment 20001554 PARAMETER Experiment Name: At_Drought_Soil_Dry_P Parameter: Organism Value: A. thaliana
  misc_feature: MA Experiment 20001554 PARAMETER Experiment Name: At_Drought_Soil_Dry_P Parameter: Plant Line Value: WS
  misc_feature: MA Experiment 20001554 PARAMETER Experiment Name: At_Drought_Soil_Dry_P Parameter: Post Timepoint (hr) Value: None
  misc_feature: MA Experiment 20001554 PARAMETER Experiment Name: At_Drought_Soil_Dry_P Parameter: Post-Treatment Value: None
  misc_feature: MA Experiment 20001554 PARAMETER Experiment Name: At_Drought_Soil_Dry_P Parameter: Timepoint (day) Value: 7
  misc_feature: MA Experiment 20001554 PARAMETER Experiment Name: At_Drought_Soil_Dry_P Parameter: Treatment Value: Drought vs. No Drought
  misc_feature: MA Experiment ID: 20001555 Result: Up-regulated in Transcription
  misc_feature: MA Experiment 20001555 PARAMETER Experiment Name: At_Drought_Soil_Dry_P Parameter: Age (day) Value: 24
  misc_feature: MA Experiment 20001555 PARAMETER Experiment Name: At_Drought_Soil_Dry_P Parameter: Organism Value: A. thaliana
  misc_feature: MA Experiment 20001555 PARAMETER Experiment Name: At_Drought_Soil_Dry_P Parameter: Plant Line Value: WS
  misc_feature: MA Experiment 20001555 PARAMETER Experiment Name: At_Drought_Soil_Dry_P Parameter: Post Timepoint (hr) Value: None
  misc_feature: MA Experiment 20001555 PARAMETER Experiment Name: At_Drought_Soil_Dry_P Parameter: Post-Treatment Value: None
  misc_feature: MA Experiment 20001555 PARAMETER Experiment Name: At_Drought_Soil_Dry_P Parameter: Timepoint (day) Value: 10
  misc_feature: MA Experiment 20001555 PARAMETER Experiment Name: At_Drought_Soil_Dry_P Parameter: Treatment Value: Drought vs. No Drought
  misc_feature: MA Experiment ID: 20001556 Result: Up-regulated in Transcription
  misc_feature: MA Experiment 20001556 PARAMETER Experiment Name: At_Drought_Soil_Dry_P Parameter: Age (day) Value: 26
  misc_feature: MA Experiment 20001556 PARAMETER Experiment Name: At_Drought_Soil_Dry_P Parameter: Organism Value: A. thaliana
  misc_feature: MA Experiment 20001556 PARAMETER Experiment Name: At_Drought_Soil_Dry_P Parameter: Plant Line Value: WS
  misc_feature: MA Experiment 20001556 PARAMETER Experiment Name: At_Drought_Soil_Dry_P Parameter: Post Timepoint (hr) Value: None
  misc_feature: MA Experiment 20001556 PARAMETER Experiment Name: At_Drought_Soil_Dry_P Parameter: Post-Treatment Value: None
  misc_feature: MA Experiment 20001556 PARAMETER Experiment Name: At_Drought_Soil_Dry_P Parameter: Timepoint (day) Value: 12
  misc_feature: MA Experiment 20001556 PARAMETER Experiment Name: At_Drought_Soil_Dry_P Parameter: Treatment Value: Drought vs. No Drought
  misc_feature: MA Experiment ID: 20001905 Result: Up-regulated in Transcription
  misc_feature: MA Experiment 20001905 PARAMETER Experiment Name: At_Drought_Reproduction_P Parameter: Age (day) Value: 40
  misc_feature: MA Experiment 20001905 PARAMETER Experiment Name: At_Drought_Reproduction_P Parameter: Organism Value: A. thaliana
  misc_feature: MA Experiment 20001905 PARAMETER Experiment Name: At_Drought_Reproduction_P Parameter: Plant Line Value: WS
  misc_feature: MA Experiment 20001905 PARAMETER Experiment Name: At_Drought_Reproduction_P Parameter: Timepoint (day) Value: 10
  misc_feature: MA Experiment 20001905 PARAMETER Experiment Name: At_Drought_Reproduction_P Parameter: Tissue Value: Rosettes
  misc_feature: MA Experiment 20001905 PARAMETER Experiment Name: At_Drought_Reproduction_P Parameter: Treatment Value: Drought vs. No Drought
  misc_feature: MA Experiment ID: 20001911 Result: Up-regulated in Transcription
  misc_feature: MA Experiment 20001911 PARAMETER Experiment Name: At_Drought_Reproduction_P Parameter: Age (day) Value: 40
  misc_feature: MA Experiment 20001911 PARAMETER Experiment Name: At_Drought_Reproduction_P Parameter: Organism Value: A. thaliana
  misc_feature: MA Experiment 20001911 PARAMETER Experiment Name: At_Drought_Reproduction_P Parameter: Plant Line Value: WS
  misc_feature: MA Experiment 20001911 PARAMETER Experiment Name: At_Drought_Reproduction_P Parameter: Timepoint (day) Value: 10
  misc_feature: MA Experiment 20001911 PARAMETER Experiment Name: At_Drought_Reproduction_P Parameter: Tissue Value: Flowers
  misc_feature: MA Experiment 20001911 PARAMETER Experiment Name: At_Drought_Reproduction_P Parameter: Treatment Value: Drought vs. No Drought
acagtaacaatctctctctcgcaccttcttaaaagctgctctatttcttcgcttccctcttctcttcactcacaaaacattttgttctaatcccgcaactgctaaaaacaaacccttttgtcaaaaatctctcctttcggtggtgacagaaatctatggcaggaaatggcagaagcagcatacacagtagcatcagacagtgaaaacactggagaggagaaatcatcatcatctccttcattacccgaaatcgcccttggtatcgacattggtacttctcaatgcagtatagctgtttggaacggttctcaagttcacatcttgaggaacacaagaaaccagaagctcatcaaatcatttgtcactttcaaagatgaagttcctgctggtggtgttagcaaccagctcgcacatgagcaggaaatgctaaccggagccgctatcttcaacatgaagcggctcgttggtcgtgtagacactgatcctgtggttcacgctagcaagaaccttcctttcttggttcaaactcttgatattggagttagaccgtttattgcagctttggtgaacaatgcttggagatcaacaacaccagaggaagttttagctatatttctggtggagttacgtctgatggctgaagctcagttgaaacgtcctgtgagaaatgtagtgcttacggttccggtttcgttctctaggttccagctcacacggttcgaaagagcttgcgctatggctggacttcatgttcttcgtttgatgccggaaccaactgctattgcgttgctttatgcgcaacagcagcagatgactacccatgataacatgggaagcggaagcgagaggcttgcggttatattcaatatgggagctggttactgcgatgttgcggttactgctactgctggtggtgtttcacagataaaagctttagctggtagccccattgggggtgaagacattttgcagaacacaattcgccatatcgctccacctaatgaagaagcttcggggttgcttcgtgtagcggcacaggacgcgattcacaggctaacggatcaagaaaatgtccaaattgaagtggatttgggaaatggtaacaagatatccaaggttcttgataggttagagtttgaggaagtgaaccagaaggtatttgaggaatgtgagagacttgttgtgcagtgcctgcgagatgcgagagtcaatggtggtgatatcgatgatttgataatggttggagggtgttcgtacatcccgaaagtaagaactattatcaagaacgtatgcaagaaggatgagatatacaaaggcgtgaatcctttagaagctgcggttagaggagctgctttggaaggtgcggtgacttcagggattcatgatccttttgggagcttagatctgttaaccatacaagccacacctcttgcagttggagtaagagctaacggaaacaaattcatacccgtgattccgcgtaacacaatggttccagcgcggaaagacctcttcttcacaacggttcaagacaaccagaaggaagctctgatcattatatacgaaggagaaggagagactgttgaagagaatcatcttcttggttatttcaagctcgttgggattccgccagcaccgaaaggtgttccagagatcaatgtgtgtatggacattgatgcatcaaatgctttacgggttttcgcagctgtgttgatgccgggatcttcgagtccagtggttcctgtgattgaggtgaggatgcctacggttgatgatggacatggttggtgtgctcaagctttgaatgtgaaatatggagctactcttgatttgattactcttcagagaaagatgtaagattaaaataaaatggtgttggtgatagattttagattagatgtaagatacgaggatgcttcgtatagaaaagagtttgtaaagtttgtgtgtgttttggggtttgtcgttgaagtggtaaacaatgtttatgtgtgtaatgaagtaataatgctttgcagattg

SEQ ID NO: 98922 - protein, 563 aa, Arabidopsis thaliana; identical to SEQ ID NO: 77902
  peptide (1)..(563): Ceres Seq. ID no. 13601766
  misc_feature (319)..(505): Pfam Name: Hsp70 protein Pfam Description: Hsp70 protein
  misc_feature (1)..(563): Homolog of NCBI NO: 15225187 NR Description: heat shock protein hsp70t-2 [Arabidopsis thaliana]
  misc_feature (1)..(563): Homolog of NCBI NO: 21618151 NR Description: 70kD heat shock protein [Arabidopsis thaliana]
  misc_feature (30)..(524): Homolog of NCBI NO: 15230534 NR Description: heat shock protein hsp70 [Arabidopsis thaliana]
  misc_feature (30)..(524): Homolog of NCBI NO: 3962377 NR Description: heat shock protein 70 [Arabidopsis thaliana]
  misc_feature (17)..(514): Homolog of NCBI NO: 32699500 NR Description: 78 kDa glucose-regulated protein homolog (GRP 78) (Immunoglobulin heavy chain binding protein homolog)
  misc_feature (17)..(514): Homolog of NCBI NO: 11277118 NR Description: dnaK-type molecular chaperone BiP [imported] - awamori >gi|2648051|emb|CAA73106.1| BiP protein [Aspergillus
  misc_feature (30)..(524): Homolog of NCBI NO: 6969976 NR Description: high molecular weight heat shock protein [Malus x
  misc_feature (30)..(524): Homolog of NCBI NO: 34908140 NR Description: putative HSP70 [Oryza sativa (japonica
  misc_feature (28)..(513): Homolog of NCBI NO: 15219109 NR Description: heat shock protein hsp70b [Arabidopsis thaliana]
  misc_feature (30)..(524): Homolog of NCBI NO: 2827002 NR Description: HSP70 [Triticum aestivum]

SEQ ID NO: 98923 - protein, 477 aa, Arabidopsis thaliana; identical to SEQ ID NO: 77903
  peptide (1)..(477): Ceres Seq. ID no. 13601767
  misc_feature (233)..(419): Pfam Name: Hsp70 protein Pfam Description: Hsp70 protein
  misc_feature (1)..(477): Homolog of NCBI NO: 15225187 NR Description: heat shock protein hsp70t-2 [Arabidopsis thaliana]
  misc_feature (1)..(477): Homolog of NCBI NO: 21618151 NR Description: 70kD heat shock protein [Arabidopsis thaliana]
  misc_feature (1)..(438): Homolog of NCBI NO: 15230534 NR Description: heat shock protein hsp70 [Arabidopsis thaliana]
  misc_feature (1)..(438): Homolog of NCBI NO: 3962377 NR Description: heat shock protein 70 [Arabidopsis thaliana]
  misc_feature (1)..(428): Homolog of NCBI NO: 32699500 NR Description: 78 kDa glucose-regulated protein homolog (GRP 78) (Immunoglobulin heavy chain binding protein homolog)
  misc_feature (1)..(428): Homolog of NCBI NO: 11277118 NR Description: dnaK-type molecular chaperone BiP [imported] - awamori >gi|2648051|emb|CAA73106.1| BiP protein [Aspergillus
  misc_feature (1)..(438): Homolog of NCBI NO: 6969976 NR Description: high molecular weight heat shock protein [Malus x
  misc_feature (1)..(438): Homolog of NCBI NO: 34908140 NR Description: putative HSP70 [Oryza sativa (japonica
  misc_feature (1)..(427): Homolog of NCBI NO: 15219109 NR Description: heat shock protein hsp70b [Arabidopsis thaliana]
  misc_feature (1)..(438): Homolog of NCBI NO: 2827002 NR Description: HSP70 [Triticum aestivum]

SEQ ID NO: 98924 - protein, 468 aa, Arabidopsis thaliana; identical to SEQ ID NO: 77904
  peptide (1)..(468): Ceres Seq. ID no. 13601768
  misc_feature (224)..(410): Pfam Name: Hsp70 protein Pfam Description: Hsp70 protein
  misc_feature (1)..(468): Homolog of NCBI NO: 15225187 NR Description: heat shock protein hsp70t-2 [Arabidopsis thaliana]
  misc_feature (1)..(468): Homolog of NCBI NO: 21618151 NR Description: 70kD heat shock protein [Arabidopsis thaliana]
  misc_feature (1)..(429): Homolog of NCBI NO: 15230534 NR Description: heat shock protein hsp70 [Arabidopsis thaliana]
  misc_feature (1)..(429): Homolog of NCBI NO: 3962377 NR Description: heat shock protein 70 [Arabidopsis thaliana]
  misc_feature (1)..(419): Homolog of NCBI NO: 32699500 NR Description: 78 kDa glucose-regulated protein homolog (GRP 78) (Immunoglobulin heavy chain binding protein homolog)
  misc_feature (1)..(419): Homolog of NCBI NO: 11277118 NR Description: dnaK-type molecular chaperone BiP [imported] - awamori >gi|2648051|emb|CAA73106.1| BiP protein [Aspergillus
  misc_feature (1)..(429): Homolog of NCBI NO: 6969976 NR Description: high molecular weight heat shock protein [Malus x
  misc_feature (1)..(429): Homolog of NCBI NO: 34908140 NR Description: putative HSP70 [Oryza sativa (japonica
  misc_feature (1)..(418): Homolog of NCBI NO: 15219109 NR Description: heat shock protein hsp70b [Arabidopsis thaliana]
  misc_feature (1)..(429): Homolog of NCBI NO: 2827002 NR Description: HSP70 [Triticum aestivum]

SEQ ID NO: 98925 - DNA, 604 bp, Arabidopsis thaliana
  misc_feature (1)..(604): Ceres Seq. ID no. 13601769
  misc_feature: MA Experiment ID: 108434 Result: Up-regulated in Transcription
  misc_feature: MA Experiment 108434 PARAMETER Experiment Name: At_Root_Tips_cDNA_P Parameter: Tissue Value: Root Tips
  misc_feature: MA Experiment ID: 108462 Result: Down-regulated in Transcription
  misc_feature: MA Experiment 108462 PARAMETER Experiment Name: At_Germinating_Seeds_cDNA_P Parameter: Age (day) Value: 2 vs. 0
  misc_feature: MA Experiment 108462 PARAMETER Experiment Name: At_Germinating_Seeds_cDNA_P Parameter: Tissue Value: Germinating Seeds
  misc_feature: MA Experiment ID: 108463 Result: Down-regulated in Transcription
  misc_feature: MA Experiment 108463 PARAMETER Experiment Name: At_Germinating_Seeds_cDNA_P Parameter: Age (day) Value: 3 vs. 0
  misc_feature: MA Experiment 108463 PARAMETER Experiment Name: At_Germinating_Seeds_cDNA_P Parameter: Tissue Value: Germinating Seeds
  misc_feature: MA Experiment ID: 108488 Result: Up-regulated in Transcription
  misc_feature: MA Experiment ID: 108561 Result: Down-regulated in Transcription
  misc_feature: MA Experiment 108561 PARAMETER Experiment Name: At_100uM_ABA_cDNA_P Parameter: Timepoint (hr) Value: 6
  misc_feature: MA Experiment 108561 PARAMETER Experiment Name: At_100uM_ABA_cDNA_P Parameter: Tissue Value: Aerial
  misc_feature: MA Experiment 108561 PARAMETER Experiment Name: At_100uM_ABA_cDNA_P Parameter: Treatment Value: 100uM ABA vs. No Treatment
  misc_feature: MA Experiment ID: 108573 Result: Down-regulated in Transcription
  misc_feature: MA Experiment 108573 PARAMETER Experiment Name: At_Drought_cDNA_P Parameter: Timepoint (hr) Value: 6
  misc_feature: MA Experiment 108573 PARAMETER Experiment Name: At_Drought_cDNA_P Parameter: Tissue Value: Aerial
  misc_feature: MA Experiment 108573 PARAMETER Experiment Name: At_Drought_cDNA_P Parameter: Treatment Value: Drought vs. No Drought
  misc_feature: MA Experiment ID: 108585 Result: Down-regulated in Transcription
  misc_feature: MA Experiment 108585 PARAMETER Experiment Name: At_5mM_NaNP_cDNA_P Parameter: Timepoint (hr) Value: 6
  misc_feature: MA Experiment 108585 PARAMETER Experiment Name: At_5mM_NaNP_cDNA_P Parameter: Tissue Value: Aerial
  misc_feature: MA Experiment 108585 PARAMETER Experiment Name: At_5mM_NaNP_cDNA_P Parameter: Treatment Value: null
  misc_feature: MA Experiment ID: 108595 Result: Down-regulated in Transcription
  misc_feature: MA Experiment 108595 PARAMETER Experiment Name: At_Ler-pi_Ovule_cDNA_P Parameter: Plant Line Value: null
  misc_feature: MA Experiment ID: 108607 Result: Down-regulated in Transcription
  misc_feature: MA Experiment 108607 PARAMETER Experiment Name: At_100uM_ABA_cDNA_P Parameter: Timepoint (hr) Value: 4
  misc_feature: MA Experiment 108607 PARAMETER Experiment Name: At_100uM_ABA_cDNA_P Parameter: Tissue Value: Aerial
  misc_feature: MA Experiment 108607 PARAMETER Experiment Name: At_100uM_ABA_cDNA_P Parameter: Treatment Value: 100uM ABA vs. No Treatment
  misc_feature: MA Experiment ID: 108668 Result: Down-regulated in Transcription
  misc_feature: MA Experiment 108668 PARAMETER Experiment Name: At_2mM_SA_cDNA_P Parameter: Plant Line Value: WS
  misc_feature: MA Experiment 108668 PARAMETER Experiment Name: At_2mM_SA_cDNA_P Parameter: Timepoint (hr) Value: 6
  misc_feature: MA Experiment 108668 PARAMETER Experiment Name: At_2mM_SA_cDNA_P Parameter: Treatment Value: 2mM SA vs. No Treatment
  misc_feature: MA Experiment ID: 20000089 Result: Up-regulated in Transcription
  misc_feature: MA Experiment ID: 20000224 Result: Down-regulated in Transcription
  misc_feature: MA Experiment ID: 20000307 Result: Up-regulated in Transcription
  misc_feature: MA Experiment 20000307 PARAMETER Experiment Name: At_Germinating_Seeds_Sub_P Parameter: Age (hr) Value: 24 vs. 0
  misc_feature: MA Experiment 20000307 PARAMETER Experiment Name: At_Germinating_Seeds_Sub_P Parameter: Organism Value: A. thaliana
  misc_feature: MA Experiment 20000307 PARAMETER Experiment Name: At_Germinating_Seeds_Sub_P Parameter: Plant Line Value: WS
  misc_feature: MA Experiment 20000307 PARAMETER Experiment Name: At_Germinating_Seeds_Sub_P Parameter: Tissue Value: Germinating Seeds
  misc_feature: MA Experiment ID: 20000314 Result: Down-regulated in Transcription
  misc_feature: MA Experiment 20000314 PARAMETER Experiment Name: At_14day_Shoots-Roots_Sub_P Parameter: Age (day) Value: 14
  misc_feature: MA Experiment 20000314 PARAMETER Experiment Name: At_14day_Shoots-Roots_Sub_P Parameter: Organism Value: A. thaliana
  misc_feature: MA Experiment 20000314 PARAMETER Experiment Name: At_14day_Shoots-Roots_Sub_P Parameter: Plant Line Value: WS
  misc_feature: MA Experiment 20000314 PARAMETER Experiment Name: At_14day_Shoots-Roots_Sub_P Parameter: Tissue Value: Roots vs. Whole Plant
  misc_feature: MA Experiment ID: 20000315 Result: Up-regulated in Transcription
  misc_feature: MA Experiment 20000315 PARAMETER Experiment Name: At_14day_Shoots-Roots_Sub_P Parameter: Age (day) Value: 14
  misc_feature: MA Experiment 20000315 PARAMETER Experiment Name: At_14day_Shoots-Roots_Sub_P Parameter: Organism Value: A. thaliana
  misc_feature: MA Experiment 20000315 PARAMETER Experiment Name: At_14day_Shoots-Roots_Sub_P Parameter: Plant Line Value: WS
  misc_feature: MA Experiment 20000315 PARAMETER Experiment Name: At_14day_Shoots-Roots_Sub_P Parameter: Tissue Value: Shoots vs. Whole Plant
  misc_feature: MA Experiment ID: 20000347 Result: Down-regulated in Transcription
  misc_feature: MA Experiment 20000347 PARAMETER Experiment Name: At_2mM_SA_Sub_P Parameter: Age (day) Value: 14
  misc_feature: MA Experiment 20000347 PARAMETER Experiment Name: At_2mM_SA_Sub_P Parameter: Organism Value: A. thaliana
  misc_feature: MA Experiment 20000347 PARAMETER Experiment Name: At_2mM_SA_Sub_P Parameter: Plant Line Value: WS
  misc_feature: MA Experiment 20000347 PARAMETER Experiment Name: At_2mM_SA_Sub_P Parameter: Timepoint (hr) Value: 6
  misc_feature: MA Experiment 20000347 PARAMETER Experiment Name: At_2mM_SA_Sub_P Parameter: Tissue Value: Aerial
  misc_feature: MA Experiment 20000347 PARAMETER Experiment Name: At_2mM_SA_Sub_P Parameter: Treatment Value: 2mM SA vs. No Treatment
  misc_feature: MA Experiment ID: 20000349 Result: Down-regulated in Transcription
  misc_feature: MA Experiment 20000349 PARAMETER Experiment Name: At_100uM_ABA_Sub_P Parameter: Age (day) Value: 14
  misc_feature: MA Experiment 20000349 PARAMETER Experiment Name: At_100uM_ABA_Sub_P Parameter: Organism Value: A. thaliana
  misc_feature: MA Experiment 20000349 PARAMETER Experiment Name: At_100uM_ABA_Sub_P Parameter: Plant Line Value: WS
  misc_feature: MA Experiment 20000349 PARAMETER Experiment Name: At_100uM_ABA_Sub_P Parameter: Timepoint (hr) Value: 6
  misc_feature: MA Experiment 20000349 PARAMETER Experiment Name: At_100uM_ABA_Sub_P Parameter: Tissue Value: Aerial
  misc_feature: MA Experiment 20000349 PARAMETER Experiment Name: At_100uM_ABA_Sub_P Parameter: Treatment Value: 100uM ABA vs. No Treatment
  misc_feature: MA Experiment ID: 20000352 Result: Down-regulated in Transcription
  misc_feature: MA Experiment 20000352 PARAMETER Experiment Name: At_Drought_Sub_P Parameter: Age (day) Value: 7
  misc_feature: MA Experiment 20000352 PARAMETER Experiment Name: At_Drought_Sub_P Parameter: Organism Value: A. thaliana
  misc_feature: MA Experiment 20000352 PARAMETER Experiment Name: At_Drought_Sub_P Parameter: Plant Line Value: WS
  misc_feature: MA Experiment 20000352 PARAMETER Experiment Name: At_Drought_Sub_P Parameter: Timepoint (hr) Value: 6
  misc_feature: MA Experiment 20000352 PARAMETER Experiment Name: At_Drought_Sub_P Parameter: Tissue Value: Whole Plant
  misc_feature: MA Experiment 20000352 PARAMETER Experiment Name: At_Drought_Sub_P Parameter: Treatment Value: Drought vs. No Drought
  misc_feature: MA Experiment ID: 20000355 Result: Up-regulated in Transcription
  misc_feature: MA Experiment 20000355 PARAMETER Experiment Name: At_Siliques_Sub_P Parameter: Age (day) Value: 21
  misc_feature: MA Experiment 20000355 PARAMETER Experiment Name: At_Siliques_Sub_P Parameter: Organism Value: A. thaliana
  misc_feature: MA Experiment 20000355 PARAMETER Experiment Name: At_Siliques_Sub_P Parameter: Plant Line Value: WS
  misc_feature: MA Experiment 20000355 PARAMETER Experiment Name: At_Siliques_Sub_P Parameter: Tissue Value: Less Than 5mm Siliques vs. Whole Plant
ctgactgcttcagggtttaagggttactctcactcacacttccgctggtttgacaagattggataaaagcagccatggcaagtctgataatgactacaccattcccaggttctgtcactacatgtaagaagacaaataacctgtcagttcaaagagcctttagggtgacttgtatgcagacagagaaaccattagaggagctatacaatgttaaagtggaacggaaagtttcacagaaacggttggaggaacttggggtttcgagatggtcagtttggaagacagggaaatgcaaattgccatgggattggcaggtggatcagttggtttacattgaacaaggagaggttcgagttgttcccgaaggaagcaagaggtatatgcagtttttagctggagatcttgttcggtatccgaaatggttggaagctgatcttttctttaacgctccttatattgagcggtattgtttcaaggcctatggtgatgattgatccaactttgacttttgagtttttagtagagccaagaaactttacacttgttgtgtgttgttgtagcctgatggatctttttgtgataatataagaaaacaagttctctc

SEQ ID NO: 98926 - protein, 139 aa, Arabidopsis thaliana; identical to SEQ ID NO: 20992
  peptide (1)..(139): Ceres Seq. ID no. 13601770
  misc_feature (54)..(130): Pfam Name: Protein of unknown function (DUF861) Pfam Description: Protein of unknown function (DUF861)
  misc_feature (1)..(139): Homolog of NCBI NO: 15225202 NR Description: expressed protein [Arabidopsis thaliana]
  misc_feature (1)..(139): Homolog of NCBI NO: 18403036 NR Description: expressed protein [Arabidopsis thaliana]
  misc_feature (1)..(139): Homolog of NCBI NO: 21592432 NR Description: unknown [Arabidopsis thaliana]
  misc_feature (6)..(57): Homolog of NCBI NO: 26451964 NR Description: unknown protein [Arabidopsis thaliana]
  misc_feature (11)..(115): Homolog of NCBI NO: 38344542 NR Description: OSJNBa0027P08.10 [Oryza sativa (japonica
  misc_feature (24)..(134): Homolog of NCBI NO: 21553516 NR Description: unknown [Arabidopsis thaliana]
  misc_feature (42)..(134): Homolog of NCBI NO: 15235021 NR Description: expressed protein [Arabidopsis thaliana]
  misc_feature (46)..(114): Homolog of NCBI NO: 23127631 NR Description: hypothetical protein [Nostoc punctiforme]
  misc_feature (45)..(127): Homolog of NCBI NO: 15229267 NR Description: hypothetical protein [Arabidopsis thaliana]
  misc_feature (20)..(115): Homolog of NCBI NO: 15234988 NR Description: expressed protein [Arabidopsis thaliana]

SEQ ID NO: 98927 - protein, 134 aa, Arabidopsis thaliana; identical to SEQ ID NO: 20993
  peptide (1)..(134): Ceres Seq. ID no. 13601771
  misc_feature (49)..(125): Pfam Name: Protein of unknown function (DUF861) Pfam Description: Protein of unknown function (DUF861)
  misc_feature (1)..(134): Homolog of NCBI NO: 15225202 NR Description: expressed protein [Arabidopsis thaliana]
  misc_feature (1)..(134): Homolog of NCBI NO: 18403036 NR Description: expressed protein [Arabidopsis thaliana]
  misc_feature (1)..(134): Homolog of NCBI NO: 21592432 NR Description: unknown [Arabidopsis thaliana]
  misc_feature (1)..(52): Homolog of NCBI NO: 26451964 NR Description: unknown protein [Arabidopsis thaliana]
  misc_feature (6)..(110): Homolog of NCBI NO: 38344542 NR Description: OSJNBa0027P08.10 [Oryza sativa (japonica
  misc_feature (19)..(129): Homolog of NCBI NO: 21553516 NR Description: unknown [Arabidopsis thaliana]
  misc_feature (37)..(129): Homolog of NCBI NO: 15235021 NR Description: expressed protein [Arabidopsis thaliana]
  misc_feature (41)..(109): Homolog of NCBI NO: 23127631 NR Description: hypothetical protein [Nostoc punctiforme]
  misc_feature (40)..(122): Homolog of NCBI NO: 15229267 NR Description: hypothetical protein [Arabidopsis thaliana]
  misc_feature (15)..(110): Homolog of NCBI NO: 15234988 NR Description: expressed protein [Arabidopsis thaliana]

SEQ ID NO: 98928 - protein, 106 aa, Arabidopsis thaliana; identical to SEQ ID NO: 20994
  peptide (1)..(106): Ceres Seq. ID no. 13601772
  misc_feature (21)..(97): Pfam Name: Protein of unknown function (DUF861) Pfam Description: Protein of unknown function (DUF861)
  misc_feature (1)..(106): Homolog of NCBI NO: 15225202 NR Description: expressed protein [Arabidopsis thaliana]
  misc_feature (1)..(106): Homolog of NCBI NO: 18403036 NR Description: expressed protein [Arabidopsis thaliana]
  misc_feature (1)..(106): Homolog of NCBI NO: 21592432 NR Description: unknown [Arabidopsis thaliana]
  misc_feature (1)..(24): Homolog of NCBI NO: 26451964 NR Description: unknown protein [Arabidopsis thaliana]
  misc_feature (1)..(82): Homolog of NCBI NO: 38344542 NR Description: OSJNBa0027P08.10 [Oryza sativa (japonica
  misc_feature (1)..(101): Homolog of NCBI NO: 21553516 NR Description: unknown [Arabidopsis thaliana]
  misc_feature (9)..(101): Homolog of NCBI NO: 15235021 NR Description: expressed protein [Arabidopsis thaliana]
  misc_feature (13)..(81): Homolog of NCBI NO: 23127631 NR Description: hypothetical protein [Nostoc punctiforme]
  misc_feature (12)..(94): Homolog of NCBI NO: 15229267 NR Description: hypothetical protein [Arabidopsis thaliana]
  misc_feature (1)..(82): Homolog of NCBI NO: 15234988 NR Description: expressed protein [Arabidopsis thaliana]

SEQ ID NO: 98929 - DNA, 1526 bp, Arabidopsis thaliana
  misc_feature (1)..(1526): Ceres Seq. ID no. 13601777
  misc_feature: MA Experiment ID: 108488 Result: Down-regulated in Transcription
  misc_feature: MA Experiment ID: 20000224 Result: Up-regulated in Transcription
agaggatattcttcgtcacaaaattaaaaaaaaaaagagtaggagaagagggaagcgactagcaccttttgtagttttccgtttattttctgtataaggcgggtgatttcggctccttcatcggaaattatgagcaacgttatcggcgatcgcactgaagacggcctttccaccgccgctgcggcctctggctctacggctgtccagagttctcctcccactgatcgtcctgtccgcgtctacgccgatgggatctacgatcttttccactttggtcatgctcgatctctcgaacaagccaaattagcgtttccaaacaacacttaccttcttgttggatgttgcaatgatgagactacccataagtacaagggaaggactgtaatgactgcagaagagcgatatgaatcacttcgacattgcaagtgggtggatgaagtcatccctgatgcaccatgggtggtcaaccaggagtttcttgacaagcaccagattgactatgttgcccacgattctcttccctatgctgattcaagcggagctggaaaggatgtctatgaatttgttaagaaagttgggaggtttaaggaaacacagcgaactgaaggaatatcgacctcggatataataatgagaatagtgaaagattacaatcagtatgtcatgcgtaacttggatagaggatactcaagggaagatcttggagttagctttgtcaaggaaaagagacttagagttaatatgaggctaaagaaactccaggagagggtcaaagaacaacaagaaagagtgggagaaaagatccaaactgtaaaaatgctgcgcaacgagtgggtagagaatgcagatcgatgggtcgctggatttcttgaaatatttgaagaaggttgccataagatgggaactgcaatcgtagacagtatccaagaaaggttaatgagacaaaagtcggcagagaggctggagaacggtcaggatgatgacacagacgaccagttctatgaagaatacttcgatcatgacatgggtagtgacgatgatgaagatgaaaaattctacgacgaggaagaagtaaaggaagaagagacagagaaaactgttatgacggatgctaaagacaacaagtaagaacaaatttggcttgcagaaacctcagattagctctacttatggccacttctactaaactcccttaagcctcgcactctctctcgaaattcatctacttaacatataataccaatgtttagaaagagagagtgtgtgatgtgtttgtttgtgtgtgttgaacaaacgaacgtgcgtggttgtctttggtgagttggtctcatctttgttgatttttgaatgcgcatgtatttttttcttctttttcatgacgggcaaagtgttatgaagtacaatgcaattgtctaaaacaggataagtcaatggttcgtgtgtgccataaagtaaacatcgctgtgtacatcttccatgttccaaactcaactcgttttcttcaaatattgaaatacaaattggtc

SEQ ID NO: 98930 - protein, 332 aa, Arabidopsis thaliana; identical to SEQ ID NO: 23873
  peptide (1)..(332): Ceres Seq. ID no. 13601778
  misc_feature (1)..(332): Homolog of NCBI NO: 15225218 NR Description: cholinephosphate cytidylyltransferase transferase/CTP:phosphocholine cytidylyltransferase), putative thaliana] >gi|25288639|pir||H84730 probable
  misc_feature (1)..(332): Homolog of NCBI NO: 1236978 NR Description: CTP:phosphocholine cytidylyltransferase
  misc_feature (1)..(332): Homolog of NCBI NO: 7488484 NR Description: probable choline-phosphate cytidylyltransferase
  misc_feature (1)..(332): Homolog of NCBI NO: 7488483 NR Description: probable choline-phosphate cytidylyltransferase
  misc_feature (1)..(327): Homolog of NCBI NO: 7488446 NR Description: choline-phosphate cytidylyltransferase (EC
  misc_feature (1)..(327): Homolog of NCBI NO: 7488485 NR Description: probable choline-phosphate cytidylyltransferase
  misc_feature (32)..(292): Homolog of NCBI NO: 7488791 NR Description: choline-phosphate cytidylyltransferase (EC - garden pea >gi|1657382|emb|CAA70317.1| cholinephosphate
  misc_feature (28)..(303): Homolog of NCBI NO: 21668498 NR Description: CTP:phosphorylcholine cytidylyltransferase thaliana] >gi|21668500|dbj|BAC01277.1| CTP:phosphorylcholine
  misc_feature (28)..(322): Homolog of NCBI NO: 30683147 NR Description: cholinephosphate cytidylyltransferase transferase/CTP:phosphocholine cytidylyltransferase), putative
  misc_feature (28)..(322): Homolog of NCBI NO: 25288640 NR Description: probable phosphocholine cytidylyltransferase - Arabidopsis thaliana >gi|5280991|emb|CAB45996.1| putative cytidylyltransferase [Arabidopsis thaliana]

SEQ ID NO: 98931 - protein, 247 aa, Arabidopsis thaliana; identical to SEQ ID NO: 23874
  peptide (1)..(247): Ceres Seq. ID no. 13601779
  misc_feature (1)..(247): Homolog of NCBI NO: 15225218 NR Description: cholinephosphate cytidylyltransferase transferase/CTP:phosphocholine cytidylyltransferase), putative thaliana] >gi|25288639|pir||H84730 probable
  misc_feature (1)..(247): Homolog of NCBI NO: 1236978 NR Description: CTP:phosphocholine cytidylyltransferase
  misc_feature (1)..(247): Homolog of NCBI NO: 7488484 NR Description: probable choline-phosphate cytidylyltransferase
  misc_feature (1)..(247): Homolog of NCBI NO: 7488483 NR Description: probable choline-phosphate cytidylyltransferase
  misc_feature (1)..(242): Homolog of NCBI NO: 7488446 NR Description: choline-phosphate cytidylyltransferase (EC
  misc_feature (1)..(242): Homolog of NCBI NO: 7488485 NR Description: probable choline-phosphate cytidylyltransferase
  misc_feature (1)..(207): Homolog of NCBI NO: 7488791 NR Description: choline-phosphate cytidylyltransferase (EC - garden pea >gi|1657382|emb|CAA70317.1| cholinephosphate
  misc_feature (1)..(218): Homolog of NCBI NO: 21668498 NR Description: CTP:phosphorylcholine cytidylyltransferase thaliana] >gi|21668500|dbj|BAC01277.1| CTP:phosphorylcholine
  misc_feature (1)..(237): Homolog of NCBI NO: 30683147 NR Description: cholinephosphate cytidylyltransferase transferase/CTP:phosphocholine cytidylyltransferase), putative
  misc_feature (1)..(237): Homolog of NCBI NO: 25288640 NR Description: probable phosphocholine cytidylyltransferase - Arabidopsis thaliana >gi|5280991|emb|CAB45996.1| putative cytidylyltransferase [Arabidopsis thaliana]

SEQ ID NO: 98932 - DNA, 930 bp, Arabidopsis thaliana
  misc_feature (1)..(930): Ceres Seq. ID no. 13601780
  misc_feature: MA Experiment ID: 108434 Result: Up-regulated in Transcription
  misc_feature: MA Experiment 108434 PARAMETER Experiment Name: At_Root_Tips_cDNA_P Parameter: Tissue Value: Root Tips
  misc_feature: MA Experiment ID: 108461 Result: Up-regulated in Transcription
  misc_feature: MA Experiment 108461 PARAMETER Experiment Name: At_Germinating_Seeds_cDNA_P Parameter: Age (day) Value: 1 vs. 0
  misc_feature: MA Experiment 108461 PARAMETER Experiment Name: At_Germinating_Seeds_cDNA_P Parameter: Tissue Value: Germinating Seeds
  misc_feature: MA Experiment ID: 108579 Result: Down-regulated in Transcription
  misc_feature: MA Experiment 108579 PARAMETER Experiment Name: At_4deg_Cold_cDNA_P Parameter: Temperature (deg C) Value: 4 vs. 22
  misc_feature: MA Experiment 108579 PARAMETER Experiment Name: At_4deg_Cold_cDNA_P Parameter: Timepoint (hr) Value: 6
  misc_feature: MA Experiment 108579 PARAMETER Experiment Name: At_4deg_Cold_cDNA_P Parameter: Tissue Value: Aerial
  misc_feature: MA Experiment ID: 20000112 Result: Up-regulated in Transcription
  misc_feature: MA Experiment 20000112 PARAMETER Experiment Name: At_42deg_Heat_cDNA_P Parameter: Temperature (deg C) Value: 42 vs. 22
  misc_feature: MA Experiment 20000112 PARAMETER Experiment Name: At_42deg_Heat_cDNA_P Parameter: Timepoint (hr) Value: 2
  misc_feature: MA Experiment 20000112 PARAMETER Experiment Name: At_42deg_Heat_cDNA_P Parameter: Tissue Value: Aerial
  misc_feature: MA Experiment ID: 20000144 Result: Up-regulated in Transcription
  misc_feature: MA Experiment 20000144 PARAMETER Experiment Name: At_42deg_Heat_cDNA_P Parameter: Temperature (deg C) Value: 42 vs. 22
  misc_feature: MA Experiment 20000144 PARAMETER Experiment Name: At_42deg_Heat_cDNA_P Parameter: Timepoint (hr) Value: 1
  misc_feature: MA Experiment 20000144 PARAMETER Experiment Name: At_42deg_Heat_cDNA_P Parameter: Tissue Value: Aerial
  misc_feature: MA Experiment ID: 20000180 Result: Up-regulated in Transcription
  misc_feature: MA Experiment 20000180 PARAMETER Experiment Name: At_Germinating_Seeds_P Parameter: Age (hr) Value: 24 vs. 0
  misc_feature: MA Experiment 20000180 PARAMETER Experiment Name: At_Germinating_Seeds_P Parameter: Tissue Value: Germinating Seeds
  misc_feature: MA Experiment ID: 20001557 Result: Down-regulated in Transcription
  misc_feature: MA Experiment 20001557 PARAMETER Experiment Name: At_Drought_Soil_Dry_P Parameter: Age (day) Value: 27
  misc_feature: MA Experiment 20001557 PARAMETER Experiment Name: At_Drought_Soil_Dry_P Parameter: Organism Value: A. thaliana
  misc_feature: MA Experiment 20001557 PARAMETER Experiment Name: At_Drought_Soil_Dry_P Parameter: Plant Line Value: WS
  misc_feature: MA Experiment 20001557 PARAMETER Experiment Name: At_Drought_Soil_Dry_P Parameter: Post Timepoint (hr) Value: 3
  misc_feature: MA Experiment 20001557 PARAMETER Experiment Name: At_Drought_Soil_Dry_P Parameter: Post-Treatment Value: Re-Water vs. No Drought
  misc_feature: MA Experiment 20001557 PARAMETER Experiment Name: At_Drought_Soil_Dry_P Parameter: Timepoint (day) Value: 13
  misc_feature: MA Experiment 20001557 PARAMETER Experiment Name: At_Drought_Soil_Dry_P Parameter: Treatment Value: Drought vs. No Drought
  misc_feature: MA Experiment ID: 20001905 Result: Down-regulated in Transcription
  misc_feature: MA Experiment 20001905 PARAMETER Experiment Name: At_Drought_Reproduction_P Parameter: Age (day) Value: 40
  misc_feature: MA Experiment 20001905 PARAMETER Experiment Name: At_Drought_Reproduction_P Parameter: Organism Value: A. thaliana
  misc_feature: MA Experiment 20001905 PARAMETER Experiment Name: At_Drought_Reproduction_P Parameter: Plant Line Value: WS
  misc_feature: MA Experiment 20001905 PARAMETER Experiment Name: At_Drought_Reproduction_P Parameter: Timepoint (day) Value: 10
  misc_feature: MA Experiment 20001905 PARAMETER Experiment Name: At_Drought_Reproduction_P Parameter: Tissue Value: Rosettes
  misc_feature: MA Experiment 20001905 PARAMETER Experiment Name: At_Drought_Reproduction_P Parameter: Treatment Value: Drought vs. No Drought
agatcctcgattccttcgttttctcgcttatcagtgcgatcaatggcggattcagctttcaggaaaattcagatccaaagagatgacactacatttgatgcctatgtggtcggtaaagatgatgcgcctgggattgtggtgattcaagaatggtggggtgttgactttgagatcaagaaccatgctattaaaatctcacaacttgagcctggattcaaagcccttatacctgacttgtatcgaggaaaggttggtttggatactgcagaggcacagcatctaatggatggccttgattggccaggtgctatcaaagatatccgcgcttctgttaattggctaaaatccaatggctcaaaaaaggttggtgtcactggaatgtgcatgggaggtgcattagctatagctagctctgtattggttcctgaggtggatgctgttgttggattctatggaaccccttcctcagagctcgcagatccagcacaagctaaggcacctattcaggctcattttggagagctcgacaattttgtcggtttttctgatgtcacggcagcaaagaatctcgaagagaagctgaaagcgtctggagtagcacatgaagttcacatctatccaggtaatggacacgcgttcttgaacaggagtccagaaggagtgagcagaaggaaaagcatgggactttctgatgaagatgaagccgcagtggagcttgcttggtctcgcttcacctcctggatgaaacagtacttggcttaagctttcttccatcaggcagcaatggttgatgtaagtcccaaaacgttgtgtgatgcccaatcatctttaaataaggacattgctcttagaacttttaatctgaaccaaataaagaggtttgtttacttgtgaatcagtattgagtggaaatgttcgaagccttttttg

SEQ ID NO: 98933 - protein, 253 aa, Arabidopsis thaliana
  peptide (1)..(253): Ceres Seq. ID no. 13601781
  misc_feature (32)..(252): Pfam Name: Dienelactone hydrolase family Pfam Description: Dienelactone hydrolase family
  misc_feature (15)..(253): Homolog of NCBI NO: 15225693 NR Description: carboxymethylenebutenolidase -related
  misc_feature (15)..(253): Homolog of NCBI NO: 21554208 NR Description: putative carboxymethylenebutenolidase
  misc_feature (1)..(252): Homolog of NCBI NO: 34913460 NR Description: putative carboxymethylenebutenolidase [Oryza
  misc_feature (15)..(243): Homolog of NCBI NO: 22988407 NR Description: hypothetical protein [Burkholderia fungorum]
  misc_feature (42)..(243): Homolog of NCBI NO: 17549527 NR Description: PUTATIVE TRANSMEMBRANE PROTEIN [Ralstonia >gi|17549558|ref|NP_522898.1| PUTATIVE TRANSMEMBRANE PROTEIN solanacearum] >gi|17431781|emb|CAD18459.1| PUTATIVE TRANSMEMBRANE
  misc_feature (39)..(252): Homolog of NCBI NO: 27377598 NR Description: blr2487 [Bradyrhizobium japonicum]
  misc_feature (42)..(253): Homolog of NCBI NO: 22963172 NR Description: hypothetical protein [Rhodopseudomonas palustris]
  misc_feature (34)..(252): Homolog of NCBI NO: 28869992 NR Description: dienelactone hydrolase family protein syringae pv. tomato str. DC3000] >gi|28853237|gb|AAO56306.1| hydrolase family protein [Pseudomonas syringae pv. tomato str.
  misc_feature (34)..(252): Homolog of NCBI NO: 23472687 NR Description: hypothetical protein [Pseudomonas syringae pv.
  misc_feature (43)..(253): Homolog of NCBI NO: 23105000 NR Description: hypothetical protein [Azotobacter vinelandii]
RSSIPSFSRLSVRSMADSAFRKIQIQRDDTTFDAYVVGKDDAPGIVVIQEWWGVDFEIKNHAIKISQLEPGFKALIPDLYRGKVGLDTAEAQHLMDGLDWPGAIKDIRASVNWLKSNGSKKVGVTGMCMGGALAIASSVLVPEVDAVVGFYGTPSSELADPAQAKAPIQAHFGELDNFVGFSDVTAAKNLEEKLKASGVAHEVHIYPGNGHAFLNRSPEGVSRRKSMGLSDEDEAAVELAWSRFTSWMKQYLA

SEQ ID NO: 98934 - protein, 239 aa, Arabidopsis thaliana
  peptide (1)..(239): Ceres Seq. ID no. 13601782
  misc_feature (18)..(238): Pfam Name: Dienelactone hydrolase family Pfam Description: Dienelactone hydrolase family
  misc_feature (1)..(239): Homolog of NCBI NO: 15225693 NR Description: carboxymethylenebutenolidase -related
  misc_feature (1)..(239): Homolog of NCBI NO: 21554208 NR Description: putative carboxymethylenebutenolidase
  misc_feature (1)..(238): Homolog of NCBI NO: 34913460 NR Description: putative carboxymethylenebutenolidase [Oryza
  misc_feature (1)..(229): Homolog of NCBI NO: 22988407 NR Description: hypothetical protein [Burkholderia fungorum]
  misc_feature (28)..(229): Homolog of NCBI NO: 17549527 NR Description: PUTATIVE TRANSMEMBRANE PROTEIN [Ralstonia >gi|17549558|ref|NP_522898.1| PUTATIVE TRANSMEMBRANE PROTEIN solanacearum] >gi|17431781|emb|CAD18459.1| PUTATIVE TRANSMEMBRANE
  misc_feature (25)..(238): Homolog of NCBI NO: 27377598 NR Description: blr2487 [Bradyrhizobium japonicum]
  misc_feature (28)..(239): Homolog of NCBI NO: 22963172 NR Description: hypothetical protein [Rhodopseudomonas palustris]
  misc_feature (20)..(238): Homolog of NCBI NO: 28869992 NR Description: dienelactone hydrolase family protein syringae pv. tomato str. DC3000] >gi|28853237|gb|AAO56306.1| hydrolase family protein [Pseudomonas syringae pv. tomato str.
  misc_feature (20)..(238): Homolog of NCBI NO: 23472687 NR Description: hypothetical protein [Pseudomonas syringae pv.
  misc_feature (29)..(239): Homolog of NCBI NO: 23105000 NR Description: hypothetical protein [Azotobacter vinelandii]
MADSAFRKIQIQRDDTTFDAYVVGKDDAPGIVVIQEWWGVDFEIKNHAIKISQLEPGFKALIPDLYRGKVGLDTAEAQHLMDGLDWPGAIKDIRASVNWLKSNGSKKVGVTGMCMGGALAIASSVLVPEVDAVVGFYGTPSSELADPAQAKAPIQAHFGELDNFVGFSDVTAAKNLEEKLKASGVAHEVHIYPGNGHAFLNRSPEGVSRRKSMGLSDEDEAAVELAWSRFTSWMKQYLA

SEQ ID NO: 98935 - protein, 159 aa, Arabidopsis thaliana
  peptide (1)..(159): Ceres Seq. ID no. 13601783
  misc_feature (1)..(158): Pfam Name: Dienelactone hydrolase family Pfam Description: Dienelactone hydrolase family
  misc_feature (1)..(159): Homolog of NCBI NO: 15225693 NR Description: carboxymethylenebutenolidase -related
  misc_feature (1)..(159): Homolog of NCBI NO: 21554208 NR Description: putative carboxymethylenebutenolidase
  misc_feature (1)..(158): Homolog of NCBI NO: 34913460 NR Description: putative carboxymethylenebutenolidase [Oryza
  misc_feature (1)..(149): Homolog of NCBI NO: 22988407 NR Description: hypothetical protein [Burkholderia fungorum]
  misc_feature (1)..(149): Homolog of NCBI NO: 17549527 NR Description: PUTATIVE TRANSMEMBRANE PROTEIN [Ralstonia >gi|17549558|ref|NP_522898.1| PUTATIVE TRANSMEMBRANE PROTEIN solanacearum] >gi|17431781|emb|CAD18459.1| PUTATIVE TRANSMEMBRANE
  misc_feature (1)..(158): Homolog of NCBI NO: 27377598 NR Description: blr2487 [Bradyrhizobium japonicum]
  misc_feature (1)..(159): Homolog of NCBI NO: 22963172 NR Description: hypothetical protein [Rhodopseudomonas palustris]
  misc_feature (1)..(158): Homolog of NCBI NO: 28869992 NR Description: dienelactone hydrolase family protein syringae pv. tomato str. DC3000] >gi|28853237|gb|AAO56306.1| hydrolase family protein [Pseudomonas syringae pv. tomato str.
  misc_feature (1)..(158): Homolog of NCBI NO: 23472687 NR Description: hypothetical protein [Pseudomonas syringae pv.
  misc_feature (1)..(159): Homolog of NCBI NO: 23105000 NR Description: hypothetical protein [Azotobacter vinelandii]
MDGLDWPGAIKDIRASVNWLKSNGSKKVGVTGMCMGGALAIASSVLVPEVDAVVGFYGTPSSELADPAQAKAPIQAHFGELDNFVGFSDVTAAKNLEEKLKASGVAHEVHIYPGNGHAFLNRSPEGVSRRKSMGLSDEDEAAVELAWSRFTSWMKQYLA

SEQ ID NO: 98936 - DNA, 2801 bp, Arabidopsis thaliana
  misc_feature (1)..(2801): Ceres Seq. ID no. 13601800
  misc_feature: MA Experiment ID: 20000185 Result: Up-regulated in Transcription
  misc_feature: MA Experiment 20000185 PARAMETER Experiment Name: At_Roots__P Parameter: Age (day) Value: 7 vs. 21
  misc_feature: MA Experiment 20000185 PARAMETER Experiment Name: At_Roots__P Parameter: Organism Value: A. thaliana
  misc_feature: MA Experiment 20000185 PARAMETER Experiment Name: At_Roots__P Parameter: Tissue Value: Roots vs. Whole Plant
  misc_feature: MA Experiment ID: 20000264 Result: Up-regulated in Transcription
  misc_feature: MA Experiment 20000264 PARAMETER Experiment Name: At_Open_Flower_P Parameter: Age (day) Value: 21
  misc_feature: MA Experiment 20000264 PARAMETER Experiment Name: At_Open_Flower_P Parameter: Plant Line Value: WS
  misc_feature: MA Experiment 20000264 PARAMETER Experiment Name: At_Open_Flower_P Parameter: Tissue Value: Open Flower vs. Whole Plant
  misc_feature: MA Experiment ID: 20000286 Result: Up-regulated in Transcription
  misc_feature: MA Experiment 20000286 PARAMETER Experiment Name: At_Open_Flower_P Parameter: Age (day) Value: 21
  misc_feature: MA Experiment 20000286 PARAMETER Experiment Name: At_Open_Flower_P Parameter: Plant Line Value: WS
  misc_feature: MA Experiment 20000286 PARAMETER Experiment Name: At_Open_Flower_P Parameter: Tissue Value: Half Open vs. Whole Plant
  misc_feature: MA Experiment ID: 20000439 Result: Up-regulated in Transcription
  misc_feature: MA Experiment 20000439 PARAMETER Experiment Name: At_Roots__P Parameter: Age (day) Value: 14 vs. 21
  misc_feature: MA Experiment 20000439 PARAMETER Experiment Name: At_Roots__P Parameter: Organism Value: A. thaliana
  misc_feature: MA Experiment 20000439 PARAMETER Experiment Name: At_Roots__P Parameter: Tissue Value: Roots vs. Whole Plant
  misc_feature: MA Experiment ID: 20000794 Result: Up-regulated in Transcription
  misc_feature: MA Experiment 20000794 PARAMETER Experiment Name: At_Petals_P Parameter: Age (day) Value: 23-25 days
  misc_feature: MA Experiment 20000794 PARAMETER Experiment Name: At_Petals_P Parameter: Plant Line Value: WS
  misc_feature: MA Experiment 20000794 PARAMETER Experiment Name: At_Petals_P Parameter: Tissue Value: Petals vs. Whole plant
gttttcttctctcaatctgatgaaagttgttgtttttaggttttggggttatttctcaaatcgattcctgtcaccaaaatcaaaatctgaaagcaaatggttgatgaggatcacttggaagattttgtctgtgtttgactatggagttgcacataaatggttagggatcagaggaataagttgactcaggaagtttcttctgctttcagcggcaagctcaacatccttcctcctacactacaagacaggaagagctaaaagcatgcttaaatgattgcaaatccagtggtttagtggtgtctggttcggttagagatcagagggataagttgattcagtggcaagctcaacattcttaaatccaaggcatcggatgcaagtgaggaaactatcaatactacattcgatatcaatgtctttgggacgataactcttataaagttggtcactcctcatatgctaaaacaaggaggcggtcattttgttgtgataagcagtgctgcaggaaaggtaccatcacctggacaggctatatattctgcttcaaaacatgctctgcacggctacttccacagcttgcgttctgagttctgtcaggagggaatcaaagtgaccgtcgttattcctggtccaatagaaacgttgaatggtacaggaacatcaacttcggaagacaagaagtctcatgagaagcgtgtgtcatctgaatgatatgcagaactgactataatcgccgcgtctcatagcttgaaggaagcttggatttcatatcagccagtactgcttgtgatgtatctagtgcagtacatgccttcccttggcttttgctatttagtttctttgcgctcaagaggttttcagatgcagctacgagataaatcggactactgtatatagtaatccaacaggcttttgagcccagtggacttgagttcctagaaaagaaaaaccgaaaagaaagttatgtgatgcgtatattgaagactaatgaaaagcttttggggattcacttgctgccagaaactcacagacaacactcctgccaaagctgtcacaaggctgatcactgttcattctttccttctctgcagatatgtgccggcagtaatttaatttttgatgtcaatagatctaaaagtttatacaagaagaaaaggtgaactcggaaaccgaaaagatggagaaggaaagtcaggaaaactcgaccagacccgatgcttcgtctactgttttctcttcctctaagagtacatgcgcaagccctagctatctcaaagaagctggagacttgatcagtaggttgcctgatgatattctccaactaattctctcctatcttccaaccagattggcgatcaaaacttccgttttatccaggcgatggaggcatgtatggtctgatacatggtccctctccttccatagggacagaccggatgctccttgtattaacagaatcctagatcgctacagggctcccaagatgatgagttttcgtatctgttcttgttgcagggcagcctgtatcagcagacccgacacgcatgctgacatcgacagttggatcaacttcgccatgtcccgaaacgtggagaatctgtccctgtatctcgatgaggataaatatgatatccctgaattcctttacatcaattcctctctcaagcaactctaccttgatttcggctgcaaaaaggattttatatctctgaatcccaaatgttctgtgtcttggacatccctgaagaacctgtcattgtatcattgcaacatctctgatgaatccattgctattattctatctggttgtcccattctcgaaagcttattgttgtttttctgcaagaaactgaaggtccttgatctcagcaaatcaccgcgtctgataacattagaaatcactcgtagatgtcgaatggagccaacacagctcgttgcaccacatatccgttgtctcagattgataaactctgagaaaccatgtgctttagttgatgtctcctctttatcccaagctgaactagacattaccgcttacgcaatagttgataataaactggaggctgattttcatcagaccatggtggtaaagatgttagaaaagtgtcagaatgtggagaagcttactttgggggcaaactttcttaagatgttatctcttgccgagctccgtggtgtttcttttccaaagttgaaggctaaagctctgatacttgagacaatgatctctcgatatgttattcatggtatagtaaaggtgctacaaaactcgcctgacttgaagaagctaaccatacacccaatggggtctgccggctcatatcccataccggtaattatgaatattccttgaccccgaattttgaatcatcatattgaaatatacttgcattacaggaagagcatattgacatatacttggattctcatggcttgaattgggatccatcctggagctcggagtttaagaacacttcccgcaggaatgtagagtcaaagcaagtggcttcgtttctgcaacttgtgcttaaaaccatatcaacattagagttgattgtcgcaaggttggaaggttatatcaaaggaagacgttttgtagagttgcgtcagatggttccaatgcttcctcgcaacaacgatgtctccattgtgctcagctcaagaagaaaacgattcagagtgacttaagtcattttacatttaagtagtacactagatgaaaatctcttgtttgtttttcttactgaaataatcgaattctgttaaattgattttaagttgtgaaattgtttttacgtttt

SEQ ID NO: 98937 - protein, 391 aa, Arabidopsis thaliana
  peptide (1)..(391): Ceres Seq. ID no. 13601801
  misc_feature (1)..(385): Homolog of NCBI NO: 15228527 NR Description: F-box protein family [Arabidopsis thaliana]
  misc_feature (1)..(391): Homolog of NCBI NO: 28393463 NR Description: unknown protein [Arabidopsis thaliana]
  misc_feature (37)..(374): Homolog of NCBI NO: 15242566 NR Description: F-box protein family [Arabidopsis thaliana]
  misc_feature (37)..(374): Homolog of NCBI NO: 21536638 NR Description: unknown [Arabidopsis thaliana]
  misc_feature (37)..(374): Homolog of NCBI NO: 15242568 NR Description: F-box protein family [Arabidopsis thaliana]
  misc_feature (34)..(376): Homolog of NCBI NO: 9294576 NR Description: gb|AAF01596.1~gene_id:MFJ20.9~similar to unknown
  misc_feature (34)..(376): Homolog of NCBI NO: 15232980 NR Description: F-box protein family [Arabidopsis thaliana]
  misc_feature (34)..(383): Homolog of NCBI NO: 15241919 NR Description: F-box protein family [Arabidopsis thaliana]
  misc_feature (37)..(165): Homolog of NCBI NO: 15222785 NR Description: F-box protein family [Arabidopsis thaliana]
  misc_feature (271)..(355): Homolog of NCBI NO: 15222785 NR Description: F-box protein family [Arabidopsis thaliana]
MEKESQENSTRPDASSTVFSSSKSTCASPSYLKEAGDLISRLPDDILQLILSYLPTRLAIKTSVLSRRWRHVWSDTWSLSFHRDRPDAPCINRILDRYRAPKMMSFRICSCCRAACISRPDTHADIDSWINFAMSRNVENLSLYLDEDKYDIPEFLYINSSLKQLYLDFGCKKDFISLNPKCSVSWTSLKNLSLYHCNISDESIAIILSGCPILESLLLFFCKKLKVLDLSKSPRLITLEITRRCRMEPTQLVAPHIRCLRLINSEKPCALVDVSSLSQAELDITAYAIVDNKLEADFHQTMVVKMLEKCQNVEKLTLGANFLKMLSLAELRGVSFPKLKAKALILETMISRYVIHGIVKVLQNSPDLKKLTIHPMGSAGSYPIPVIMNIP

SEQ ID NO: 98938 - protein, 289 aa, Arabidopsis thaliana
  peptide (1)..(289): Ceres Seq. ID no. 13601802
  misc_feature (1)..(283): Homolog of NCBI NO: 15228527 NR Description: F-box protein family [Arabidopsis thaliana]
  misc_feature (1)..(289): Homolog of NCBI NO: 28393463 NR Description: unknown protein [Arabidopsis thaliana]
  misc_feature (1)..(272): Homolog of NCBI NO: 15242566 NR Description: F-box protein family [Arabidopsis thaliana]
  misc_feature (1)..(272): Homolog of NCBI NO: 21536638 NR Description: unknown [Arabidopsis thaliana]
  misc_feature (1)..(272): Homolog of NCBI NO: 15242568 NR Description: F-box protein family [Arabidopsis thaliana]
  misc_feature (1)..(274): Homolog of NCBI NO: 9294576 NR Description: gb|AAF01596.1~gene_id:MFJ20.9~similar to unknown
  misc_feature (1)..(274): Homolog of NCBI NO: 15232980 NR Description: F-box protein family [Arabidopsis thaliana]
  misc_feature (1)..(281): Homolog of NCBI NO: 15241919 NR Description: F-box protein family [Arabidopsis thaliana]
  misc_feature (1)..(63): Homolog of NCBI NO: 15222785 NR Description: F-box protein family [Arabidopsis thaliana]
  misc_feature (169)..(253): Homolog of NCBI NO: 15222785 NR Description: F-box protein family [Arabidopsis thaliana]
MMSFRICSCCRAACISRPDTHADIDSWINFAMSRNVENLSLYLDEDKYDIPEFLYINSSLKQLYLDFGCKKDFISLNPKCSVSWTSLKNLSLYHCNISDESIAIILSGCPILESLLLFFCKKLKVLDLSKSPRLITLEITRRCRMEPTQLVAPHIRCLRLINSEKPCALVDVSSLSQAELDITAYAIVDNKLEADFHQTMVVKMLEKCQNVEKLTLGANFLKMLSLAELRGVSFPKLKAKALILETMISRYVIHGIVKVLQNSPDLKKLTIHPMGSAGSYPIPVIMNIP

SEQ ID NO: 98939 - protein, 288 aa, Arabidopsis thaliana
  peptide (1)..(288): Ceres Seq. ID no. 13601803
  misc_feature (1)..(282): Homolog of NCBI NO: 15228527 NR Description: F-box protein family [Arabidopsis thaliana]
  misc_feature (1)..(288): Homolog of NCBI NO: 28393463 NR Description: unknown protein [Arabidopsis thaliana]
  misc_feature (1)..(271): Homolog of NCBI NO: 15242566 NR Description: F-box protein family [Arabidopsis thaliana]
  misc_feature (1)..(271): Homolog of NCBI NO: 21536638 NR Description: unknown [Arabidopsis thaliana]
  misc_feature (1)..(271): Homolog of NCBI NO: 15242568 NR Description: F-box protein family [Arabidopsis thaliana]
  misc_feature (1)..(273): Homolog of NCBI NO: 9294576 NR Description: gb|AAF01596.1~gene_id:MFJ20.9~similar to unknown
  misc_feature (1)..(273): Homolog of NCBI NO: 15232980 NR Description: F-box protein family [Arabidopsis thaliana]
  misc_feature (1)..(280): Homolog of NCBI NO: 15241919 NR Description: F-box protein family [Arabidopsis thaliana]
  misc_feature (1)..(62): Homolog of NCBI NO: 15222785 NR Description: F-box protein family [Arabidopsis thaliana]
  misc_feature (168)..(252): Homolog of NCBI NO: 15222785 NR Description: F-box protein family [Arabidopsis thaliana]
MSFRICSCCRAACISRPDTHADIDSWINFAMSRNVENLSLYLDEDKYDIPEFLYINSSLKQLYLDFGCKKDFISLNPKCSVSWTSLKNLSLYHCNISDESIAIILSGCPILESLLLFFCKKLKVLDLSKSPRLITLEITRRCRMEPTQLVAPHIRCLRLINSEKPCALVDVSSLSQAELDITAYAIVDNKLEADFHQTMVVKMLEKCQNVEKLTLGANFLKMLSLAELRGVSFPKLKAKALILETMISRYVIHGIVKVLQNSPDLKKLTIHPMGSAGSYPIPVIMNIP

SEQ ID NO: 98940 - DNA, 1799 bp, Arabidopsis thaliana
  misc_feature (1)..(1799): Ceres Seq. ID no. 13601804
  misc_feature: MA Experiment ID: 108464 Result: Down-regulated in Transcription
  misc_feature: MA Experiment 108464 PARAMETER Experiment Name: At_Germinating_Seeds_cDNA_P Parameter: Age (day) Value: 4 vs. 0
  misc_feature: MA Experiment 108464 PARAMETER Experiment Name: At_Germinating_Seeds_cDNA_P Parameter: Tissue Value: Germinating Seeds
  misc_feature: MA Experiment ID: 108488 Result: Down-regulated in Transcription
  misc_feature: MA Experiment ID: 108561 Result: Up-regulated in Transcription
  misc_feature: MA Experiment 108561 PARAMETER Experiment Name: At_100uM_ABA_cDNA_P Parameter: Timepoint (hr) Value: 6
  misc_feature: MA Experiment 108561 PARAMETER Experiment Name: At_100uM_ABA_cDNA_P Parameter: Tissue Value: Aerial
  misc_feature: MA Experiment 108561 PARAMETER Experiment Name: At_100uM_ABA_cDNA_P Parameter: Treatment Value: 100uM ABA vs. No Treatment
  misc_feature: MA Experiment ID: 108569 Result: Up-regulated in Transcription
  misc_feature: MA Experiment 108569 PARAMETER Experiment Name: At_0.001%_MeJA__cDNA_P Parameter: Timepoint (hr) Value: 6
  misc_feature: MA Experiment 108569 PARAMETER Experiment Name: At_0.001%_MeJA__cDNA_P Parameter: Tissue Value: Aerial
  misc_feature: MA Experiment 108569 PARAMETER Experiment Name: At_0.001%_MeJA__cDNA_P Parameter: Treatment Value: 0.001% MeJA vs. No Treatment
  misc_feature: MA Experiment ID: 108572 Result: Up-regulated in Transcription
  misc_feature: MA Experiment 108572 PARAMETER Experiment Name: At_Drought_cDNA_P Parameter: Timepoint (hr) Value: 1
  misc_feature: MA Experiment 108572 PARAMETER Experiment Name: At_Drought_cDNA_P Parameter: Tissue Value: Aerial
  misc_feature: MA Experiment 108572 PARAMETER Experiment Name: At_Drought_cDNA_P Parameter: Treatment Value: Drought vs. No Drought
  misc_feature: MA Experiment ID: 108573 Result: Up-regulated in Transcription
  misc_feature: MA Experiment 108573 PARAMETER Experiment Name: At_Drought_cDNA_P Parameter: Timepoint (hr) Value: 6
  misc_feature: MA Experiment 108573 PARAMETER Experiment Name: At_Drought_cDNA_P Parameter: Tissue Value: Aerial
  misc_feature: MA Experiment 108573 PARAMETER Experiment Name: At_Drought_cDNA_P Parameter: Treatment Value: Drought vs. No Drought
  misc_feature: MA Experiment ID: 108585 Result: Up-regulated in Transcription
  misc_feature: MA Experiment 108585 PARAMETER Experiment Name: At_5mM_NaNP_cDNA_P Parameter: Timepoint (hr) Value: 6
  misc_feature: MA Experiment 108585 PARAMETER Experiment Name: At_5mM_NaNP_cDNA_P Parameter: Tissue Value: Aerial
  misc_feature: MA Experiment 108585 PARAMETER Experiment Name: At_5mM_NaNP_cDNA_P Parameter: Treatment Value: null
  misc_feature: MA Experiment ID: 108595 Result: Up-regulated in Transcription
  misc_feature: MA Experiment 108595 PARAMETER Experiment Name: At_Ler-pi_Ovule_cDNA_P Parameter: Plant Line Value: null
  misc_feature: MA Experiment ID: 108605 Result: Up-regulated in Transcription
  misc_feature: MA Experiment 108605 PARAMETER Experiment Name: At_100uM_ABA_cDNA_P Parameter: Timepoint (hr) Value: 6
  misc_feature: MA Experiment 108605 PARAMETER Experiment Name: At_100uM_ABA_cDNA_P Parameter: Tissue Value: Aerial
  misc_feature: MA Experiment 108605 PARAMETER Experiment Name: At_100uM_ABA_cDNA_P Parameter: Treatment Value: 100uM ABA vs. No Treatment
  misc_feature: MA Experiment ID: 108607 Result: Up-regulated in Transcription
  misc_feature: MA Experiment 108607 PARAMETER Experiment Name: At_100uM_ABA_cDNA_P Parameter: Timepoint (hr) Value: 4
  misc_feature: MA Experiment 108607 PARAMETER Experiment Name: At_100uM_ABA_cDNA_P Parameter: Tissue Value: Aerial
  misc_feature: MA Experiment 108607 PARAMETER Experiment Name: At_100uM_ABA_cDNA_P Parameter: Treatment Value: 100uM ABA vs. No Treatment
  misc_feature: MA Experiment ID: 108609 Result: Up-regulated in Transcription
  misc_feature: MA Experiment 108609 PARAMETER Experiment Name: At_100uM_ABA_cDNA_P Parameter: Timepoint (hr) Value: 24
  misc_feature: MA Experiment 108609 PARAMETER Experiment Name: At_100uM_ABA_cDNA_P Parameter: Tissue Value: Aerial
  misc_feature: MA Experiment 108609 PARAMETER Experiment Name: At_100uM_ABA_cDNA_P Parameter: Treatment Value: 100uM ABA vs. No Treatment
  misc_feature: MA Experiment ID: 108668 Result: Up-regulated in Transcription
  misc_feature: MA Experiment 108668 PARAMETER Experiment Name: At_2mM_SA_cDNA_P Parameter: Plant Line Value: WS
  misc_feature: MA Experiment 108668 PARAMETER Experiment Name: At_2mM_SA_cDNA_P Parameter: Timepoint (hr) Value: 6
  misc_feature: MA Experiment 108668 PARAMETER Experiment Name: At_2mM_SA_cDNA_P Parameter: Treatment Value: 2mM SA vs. No Treatment
  misc_feature: MA Experiment ID: 20000069 Result: Up-regulated in Transcription
  misc_feature: MA Experiment 20000069 PARAMETER Experiment Name: At_100uM_ABA_Mutants_cDNA_P Parameter: Plant Line Value: CS23
  misc_feature: MA Experiment 20000069 PARAMETER Experiment Name: At_100uM_ABA_Mutants_cDNA_P Parameter: Timepoint (hr) Value: 6
  misc_feature: MA Experiment 20000069 PARAMETER Experiment Name: At_100uM_ABA_Mutants_cDNA_P Parameter: Tissue Value: Aerial
  misc_feature: MA Experiment 20000069 PARAMETER Experiment Name: At_100uM_ABA_Mutants_cDNA_P Parameter: Treatment Value: 100uM ABA vs. No Treatment
  misc_feature: MA Experiment ID: 20000070 Result: Up-regulated in Transcription
  misc_feature: MA Experiment 20000070 PARAMETER Experiment Name: At_100uM_ABA_Mutants_cDNA_P Parameter: Plant Line Value: CS24
  misc_feature: MA Experiment 20000070 PARAMETER Experiment Name: At_100uM_ABA_Mutants_cDNA_P Parameter: Timepoint (hr) Value: 6
  misc_feature: MA Experiment 20000070 PARAMETER Experiment Name: At_100uM_ABA_Mutants_cDNA_P Parameter: Tissue Value: Aerial
  misc_feature: MA Experiment 20000070 PARAMETER Experiment Name: At_100uM_ABA_Mutants_cDNA_P Parameter: Treatment Value: 100uM ABA vs. No Treatment
  misc_feature: MA Experiment ID: 20000071 Result: Up-regulated in Transcription
  misc_feature: MA Experiment 20000071 PARAMETER Experiment Name: At_100uM_ABA_Mutants_cDNA_P Parameter: Plant Line Value: CS8104
  misc_feature: MA Experiment 20000071 PARAMETER Experiment Name: At_100uM_ABA_Mutants_cDNA_P Parameter: Timepoint (hr) Value: 6
  misc_feature: MA Experiment 20000071 PARAMETER Experiment Name: At_100uM_ABA_Mutants_cDNA_P Parameter: Tissue Value: Aerial
  misc_feature: MA Experiment 20000071 PARAMETER Experiment Name: At_100uM_ABA_Mutants_cDNA_P Parameter: Treatment Value: 100uM ABA vs. No Treatment
  misc_feature: MA Experiment ID: 20000072 Result: Up-regulated in Transcription
  misc_feature: MA Experiment 20000072 PARAMETER Experiment Name: At_100uM_ABA_Mutants_cDNA_P Parameter: Plant Line Value: CS8105
  misc_feature: MA Experiment 20000072 PARAMETER Experiment Name: At_100uM_ABA_Mutants_cDNA_P Parameter: Timepoint (hr) Value: 6
  misc_feature: MA Experiment 20000072 PARAMETER Experiment Name: At_100uM_ABA_Mutants_cDNA_P Parameter: Tissue Value: Aerial
  misc_feature: MA Experiment 20000072 PARAMETER Experiment Name: At_100uM_ABA_Mutants_cDNA_P Parameter: Treatment Value: 100uM ABA vs. No Treatment
  misc_feature: MA Experiment ID: 20000087 Result: Up-regulated in Transcription
  misc_feature: MA Experiment 20000087 PARAMETER Experiment Name: At_100uM_ABA_Mutants_cDNA_P Parameter: Plant Line Value: WS
  misc_feature: MA Experiment 20000087 PARAMETER Experiment Name: At_100uM_ABA_Mutants_cDNA_P Parameter: Timepoint (hr) Value: 6
  misc_feature: MA Experiment 20000087 PARAMETER Experiment Name: At_100uM_ABA_Mutants_cDNA_P Parameter: Tissue Value: Aerial
  misc_feature: MA Experiment 20000087 PARAMETER Experiment Name: At_100uM_ABA_Mutants_cDNA_P Parameter: Treatment Value: 100uM ABA vs. No Treatment
  misc_feature: MA Experiment ID: 20000088 Result: Up-regulated in Transcription
  misc_feature: MA Experiment 20000088 PARAMETER Experiment Name: At_100uM_ABA_Mutants_cDNA_P Parameter: Plant Line Value: Landsberg
  misc_feature: MA Experiment 20000088 PARAMETER Experiment Name: At_100uM_ABA_Mutants_cDNA_P Parameter: Timepoint (hr) Value: 6
  misc_feature: MA Experiment 20000088 PARAMETER Experiment Name: At_100uM_ABA_Mutants_cDNA_P Parameter: Tissue Value: Aerial
  misc_feature: MA Experiment 20000088 PARAMETER Experiment Name: At_100uM_ABA_Mutants_cDNA_P Parameter: Treatment Value: 100uM ABA vs. No Treatment
  misc_feature: MA Experiment ID: 20000089 Result: Up-regulated in Transcription
  misc_feature: MA Experiment ID: 20000117 Result: Up-regulated in Transcription
  misc_feature: MA Experiment 20000117 PARAMETER Experiment Name: At_100uM_ABA_Mutants_cDNA_P Parameter: Plant Line Value: Columbia
  misc_feature: MA Experiment 20000117 PARAMETER Experiment Name: At_100uM_ABA_Mutants_cDNA_P Parameter: Timepoint (hr) Value: 6
  misc_feature: MA Experiment 20000117 PARAMETER Experiment Name: At_100uM_ABA_Mutants_cDNA_P Parameter: Tissue Value: Aerial
  misc_feature: MA Experiment 20000117 PARAMETER Experiment Name: At_100uM_ABA_Mutants_cDNA_P Parameter: Treatment Value: 100uM ABA vs. No Treatment
  misc_feature: MA Experiment ID: 20000169 Result: Up-regulated in Transcription
  misc_feature: MA Experiment 20000169 PARAMETER Experiment Name: At_100uM_ABA_P Parameter: Age (day) Value: 14
  misc_feature: MA Experiment 20000169 PARAMETER Experiment Name: At_100uM_ABA_P Parameter: Organism Value: A. thaliana
  misc_feature: MA Experiment 20000169 PARAMETER Experiment Name: At_100uM_ABA_P Parameter: Plant Line Value: WS
  misc_feature: MA Experiment 20000169 PARAMETER Experiment Name: At_100uM_ABA_P Parameter: Timepoint (hr) Value: 6
  misc_feature: MA Experiment 20000169 PARAMETER Experiment Name: At_100uM_ABA_P Parameter: Tissue Value: Aerial
  misc_feature: MA Experiment 20000169 PARAMETER Experiment Name: At_100uM_ABA_P Parameter: Treatment Value: 100uM ABA vs. No Treatment
  misc_feature: MA Experiment ID: 20000182 Result: Up-regulated in Transcription
  misc_feature: MA Experiment 20000182 PARAMETER Experiment Name: At_2mM_SA_P Parameter: Age (day) Value: 14
  misc_feature: MA Experiment 20000182 PARAMETER Experiment Name: At_2mM_SA_P Parameter: Organism Value: A. thaliana
  misc_feature: MA Experiment 20000182 PARAMETER Experiment Name: At_2mM_SA_P Parameter: Plant Line Value: WS
  misc_feature: MA Experiment 20000182 PARAMETER Experiment Name: At_2mM_SA_P Parameter: Timepoint (hr) Value: 6
  misc_feature: MA Experiment 20000182 PARAMETER Experiment Name: At_2mM_SA_P Parameter: Tissue Value: Aerial
  misc_feature: MA Experiment 20000182 PARAMETER Experiment Name: At_2mM_SA_P Parameter: Treatment Value: 2mM SA vs. No Treatment
  misc_feature: MA Experiment ID: 20000184 Result: Down-regulated in Transcription
  misc_feature: MA Experiment 20000184 PARAMETER Experiment Name: At_Shoots__P Parameter: Age (day) Value: 7
  misc_feature: MA Experiment 20000184 PARAMETER Experiment Name: At_Shoots__P Parameter: Tissue Value: Shoots vs. Whole Plant
  misc_feature: MA Experiment ID: 20000234 Result: Down-regulated in Transcription
  misc_feature: MA Experiment 20000234 PARAMETER Experiment Name: At_Siliques_P Parameter: Age (day) Value: 21
  misc_feature: MA Experiment 20000234 PARAMETER Experiment Name: At_Siliques_P Parameter: Organism Value: A. thaliana
  misc_feature: MA Experiment 20000234 PARAMETER Experiment Name: At_Siliques_P Parameter: Plant Line Value: WS
  misc_feature: MA Experiment 20000234 PARAMETER Experiment Name: At_Siliques_P Parameter: Tissue Value: Less Than 5mm Siliques vs. Whole Plant
  misc_feature: MA Experiment ID: 20000235 Result: Down-regulated in Transcription
  misc_feature: MA Experiment 20000235 PARAMETER Experiment Name: At_Siliques_P Parameter: Age (day) Value: 21
  misc_feature: MA Experiment 20000235 PARAMETER Experiment Name: At_Siliques_P Parameter: Organism Value: A. thaliana
  misc_feature: MA Experiment 20000235 PARAMETER Experiment Name: At_Siliques_P Parameter: Plant Line Value: WS
  misc_feature: MA Experiment 20000235 PARAMETER Experiment Name: At_Siliques_P Parameter: Tissue Value: 5-10mm Siliques vs. Whole Plant
  misc_feature: MA Experiment ID: 20000265 Result: Down-regulated in Transcription
  misc_feature: MA Experiment 20000265 PARAMETER Experiment Name: At_Open_Flower_P Parameter: Age (day) Value: 21
  misc_feature: MA Experiment 20000265 PARAMETER Experiment Name: At_Open_Flower_P Parameter: Plant Line Value: WS
  misc_feature: MA Experiment 20000265 PARAMETER Experiment Name: At_Open_Flower_P Parameter: Tissue Value: Closed Flower vs. Whole Plant
  misc_feature: MA Experiment ID: 20000267 Result: Up-regulated in Transcription
  misc_feature: MA Experiment 20000267 PARAMETER Experiment Name: At_Drought_P Parameter: Age (day) Value: 7
  misc_feature: MA Experiment 20000267 PARAMETER Experiment Name: At_Drought_P Parameter: Organism Value: A. thaliana
  misc_feature: MA Experiment 20000267 PARAMETER Experiment Name: At_Drought_P Parameter: Plant Line Value: WS
  misc_feature: MA Experiment 20000267 PARAMETER Experiment Name: At_Drought_P Parameter: Timepoint (hr) Value: 6
  misc_feature: MA Experiment 20000267 PARAMETER Experiment Name: At_Drought_P Parameter: Tissue Value: Whole Plant
  misc_feature: MA Experiment 20000267 PARAMETER Experiment Name: At_Drought_P Parameter: Treatment Value: Drought vs. No Drought
  misc_feature: MA Experiment ID: 20000268 Result: Up-regulated in Transcription
  misc_feature: MA Experiment 20000268 PARAMETER Experiment Name: At_100mM_NaCl__P Parameter: Age (day) Value: 14
  misc_feature: MA Experiment 20000268 PARAMETER Experiment Name: At_100mM_NaCl__P Parameter: Organism Value: A. thaliana
  misc_feature: MA Experiment 20000268 PARAMETER Experiment Name: At_100mM_NaCl__P Parameter: Plant Line Value: WS
  misc_feature: MA Experiment 20000268 PARAMETER Experiment Name: At_100mM_NaCl__P Parameter: Timepoint (hr) Value: 6
  misc_feature: MA Experiment 20000268 PARAMETER Experiment Name: At_100mM_NaCl__P Parameter: Tissue Value: Whole Plant
  misc_feature: MA Experiment 20000268 PARAMETER Experiment Name: At_100mM_NaCl__P Parameter: Treatment Value: 100mM NaCl vs. No Treatment
  misc_feature: MA Experiment ID: 20000436 Result: Up-regulated in Transcription
  misc_feature: MA Experiment 20000436 PARAMETER Experiment Name: At_Drought_P Parameter: Age (day) Value: 7
  misc_feature: MA Experiment 20000436 PARAMETER Experiment Name: At_Drought_P Parameter: Organism Value: A. thaliana
  misc_feature: MA Experiment 20000436 PARAMETER Experiment Name: At_Drought_P Parameter: Plant Line Value: WS
  misc_feature: MA Experiment 20000436 PARAMETER Experiment Name: At_Drought_P Parameter: Timepoint (hr) Value: 12
  misc_feature: MA Experiment 20000436 PARAMETER Experiment Name: At_Drought_P Parameter: Tissue Value: Whole Plant
  misc_feature: MA Experiment 20000436 PARAMETER Experiment Name: At_Drought_P Parameter: Treatment Value: Drought vs. No Drought
  misc_feature: MA Experiment ID: 20000437 Result: Up-regulated in Transcription
  misc_feature: MA Experiment 20000437 PARAMETER Experiment Name: At_Drought_P Parameter: Age (day) Value: 8
  misc_feature: MA Experiment 20000437 PARAMETER Experiment Name: At_Drought_P Parameter: Organism Value: A. thaliana
  misc_feature: MA Experiment 20000437 PARAMETER Experiment Name: At_Drought_P Parameter: Plant Line Value: WS
  misc_feature: MA Experiment 20000437 PARAMETER Experiment Name: At_Drought_P Parameter: Timepoint (hr) Value: 24
  misc_feature: MA Experiment 20000437 PARAMETER Experiment Name: At_Drought_P Parameter: Tissue Value: Whole Plant
  misc_feature: MA Experiment 20000437 PARAMETER Experiment Name: At_Drought_P Parameter: Treatment Value: Drought vs. No Drought
  misc_feature: MA Experiment ID: 20000438 Result: Down-regulated in Transcription
  misc_feature: MA Experiment 20000438 PARAMETER Experiment Name: At_Shoots__P Parameter: Age (day) Value: 14
  misc_feature: MA Experiment 20000438 PARAMETER Experiment Name: At_Shoots__P Parameter: Tissue Value: Shoots vs. Whole Plant
  misc_feature: MA Experiment ID: 20000439 Result: Down-regulated in Transcription
  misc_feature: MA Experiment 20000439 PARAMETER Experiment Name: At_Roots__P Parameter: Age (day) Value: 14 vs. 21
  misc_feature: MA Experiment 20000439 PARAMETER Experiment Name: At_Roots__P Parameter: Organism Value: A. thaliana
  misc_feature: MA Experiment 20000439 PARAMETER Experiment Name: At_Roots__P Parameter: Tissue Value: Roots vs. Whole Plant
  misc_feature: MA Experiment ID: 20000451 Result: Down-regulated in Transcription
  misc_feature: MA Experiment 20000451 PARAMETER Experiment Name: At_CS6879_Shoots-Roots_P Parameter: Age (day) Value: 14
  misc_feature: MA Experiment 20000451 PARAMETER Experiment Name: At_CS6879_Shoots-Roots_P Parameter: Organism Value: A. thaliana
  misc_feature: MA Experiment 20000451 PARAMETER Experiment Name: At_CS6879_Shoots-Roots_P Parameter: Plant Line Value: CS6879 vs. WS
  misc_feature: MA Experiment 20000451 PARAMETER Experiment Name: At_CS6879_Shoots-Roots_P Parameter: Tissue Value: Roots
  misc_feature: MA Experiment ID: 20000453 Result: Up-regulated in Transcription
  misc_feature: MA Experiment 20000453 PARAMETER Experiment Name: At_100uM_ABA_P Parameter: Age (day) Value: 15
  misc_feature: MA Experiment 20000453 PARAMETER Experiment Name: At_100uM_ABA_P Parameter: Organism Value: A. thaliana
  misc_feature: MA Experiment 20000453 PARAMETER Experiment Name: At_100uM_ABA_P Parameter: Plant Line Value: WS
  misc_feature: MA Experiment 20000453 PARAMETER Experiment Name: At_100uM_ABA_P Parameter: Timepoint (hr) Value: 24
  misc_feature: MA Experiment 20000453 PARAMETER Experiment Name: At_100uM_ABA_P Parameter: Tissue Value: Aerial
  misc_feature: MA Experiment 20000453 PARAMETER Experiment Name: At_100uM_ABA_P Parameter: Treatment Value: 100uM ABA vs. No Treatment
  misc_feature: MA Experiment ID: 20000455 Result: Up-regulated in Transcription
  misc_feature: MA Experiment 20000455 PARAMETER Experiment Name: At_100uM_ABA_P Parameter: Age (day) Value: 16
  misc_feature: MA Experiment 20000455 PARAMETER Experiment Name: At_100uM_ABA_P Parameter: Organism Value: A. thaliana
  misc_feature: MA Experiment 20000455 PARAMETER Experiment Name: At_100uM_ABA_P Parameter: Plant Line Value: WS
  misc_feature: MA Experiment 20000455 PARAMETER Experiment Name: At_100uM_ABA_P Parameter: Timepoint (hr) Value: 48
  misc_feature: MA Experiment 20000455 PARAMETER Experiment Name: At_100uM_ABA_P Parameter: Tissue Value: Aerial
  misc_feature: MA Experiment 20000455 PARAMETER Experiment Name: At_100uM_ABA_P Parameter: Treatment Value: 100uM ABA vs. No Treatment
  misc_feature: MA Experiment ID: 20000495 Result: Down-regulated in Transcription
  misc_feature: MA Experiment 20000495 PARAMETER Experiment Name: At_Guard_Cells_P Parameter: Harvest Date Value: 8/2/2002
  misc_feature: MA Experiment 20000495 PARAMETER Experiment Name: At_Guard_Cells_P Parameter: Organism Value: A. thaliana
  misc_feature: MA Experiment 20000495 PARAMETER Experiment Name: At_Guard_Cells_P Parameter: Tissue Value: Guard Cells vs. Leaves
  misc_feature: MA Experiment ID: 20000496 Result: Down-regulated in Transcription
  misc_feature: MA Experiment 20000496 PARAMETER Experiment Name: At_Guard_Cells_P Parameter: Harvest Date Value: 7/19/2002
  misc_feature: MA Experiment 20000496 PARAMETER Experiment Name: At_Guard_Cells_P Parameter: Organism Value: Canola
  misc_feature: MA Experiment 20000496 PARAMETER Experiment Name: At_Guard_Cells_P Parameter: Tissue Value: Guard Cells vs. Leaves
  misc_feature: MA Experiment ID: 20000527 Result: Down-regulated in Transcription
  misc_feature: MA Experiment 20000527 PARAMETER Experiment Name: At_10percent_PEG_P Parameter: Age (day) Value: 20
  misc_feature: MA Experiment 20000527 PARAMETER Experiment Name: At_10percent_PEG_P Parameter: Organism Value: A. thaliana
  misc_feature: MA Experiment 20000527 PARAMETER Experiment Name: At_10percent_PEG_P Parameter: Plant Line Value: WS
  misc_feature: MA Experiment 20000527 PARAMETER Experiment Name: At_10percent_PEG_P Parameter: Timepoint (day) Value: 20
  misc_feature: MA Experiment 20000527 PARAMETER Experiment Name: At_10percent_PEG_P Parameter: Tissue Value: Whole Plant
  misc_feature: MA Experiment 20000527 PARAMETER Experiment Name: At_10percent_PEG_P Parameter: Treatment Value: 10percent PEG vs. No Treatment
  misc_feature: MA Experiment ID: 20000709 Result: Down-regulated in Transcription
  misc_feature: MA Experiment 20000709 PARAMETER Experiment Name: At_15mM_NH4NO3_L-to-H_P Parameter: Age (hr) Value: 14
  misc_feature: MA Experiment 20000709 PARAMETER Experiment Name: At_15mM_NH4NO3_L-to-H_P Parameter: Organism Value: A. thaliana
  misc_feature: MA Experiment 20000709 PARAMETER Experiment Name: At_15mM_NH4NO3_L-to-H_P Parameter: Plant Line Value: WS
  misc_feature: MA Experiment 20000709 PARAMETER Experiment Name: At_15mM_NH4NO3_L-to-H_P Parameter: Timepoint (hr) Value: 4
  misc_feature: MA Experiment 20000709 PARAMETER Experiment Name: At_15mM_NH4NO3_L-to-H_P Parameter: Tissue Value: Aerial
  misc_feature: MA Experiment 20000709 PARAMETER Experiment Name: At_15mM_NH4NO3_L-to-H_P Parameter: Treatment Value: 15mM NH4NO3 vs. 30mM Mannitol
  misc_feature: MA Experiment ID: 20001450 Result: Up-regulated in Transcription
  misc_feature: MA Experiment 20001450 PARAMETER Experiment Name: At_Far-red-induction_P Parameter: Age (day) Value: 7
  misc_feature: MA Experiment 20001450 PARAMETER Experiment Name: At_Far-red-induction_P Parameter: Light Value: Far-red vs. White
  misc_feature: MA Experiment 20001450 PARAMETER Experiment Name: At_Far-red-induction_P Parameter: Organism Value: A. thaliana
  misc_feature: MA Experiment 20001450 PARAMETER Experiment Name: At_Far-red-induction_P Parameter: Plant Line Value: Columbia
  misc_feature: MA Experiment 20001450 PARAMETER Experiment Name: At_Far-red-induction_P Parameter: Timepoint (hr) Value: 8
  misc_feature: MA Experiment 20001450 PARAMETER Experiment Name: At_Far-red-induction_P Parameter: Tissue Value: Whole Plant
  misc_feature: MA Experiment ID: 20001504 Result: Up-regulated in Transcription
  misc_feature: MA Experiment 20001504 PARAMETER Experiment Name: At_Far-red-enriched_P Parameter: Age (day) Value: 10
  misc_feature: MA Experiment 20001504 PARAMETER Experiment Name: At_Far-red-enriched_P Parameter: Light Value: Far-red enriched vs. White
  misc_feature: MA Experiment 20001504 PARAMETER Experiment Name: At_Far-red-enriched_P Parameter: Organism Value: A. thaliana
  misc_feature: MA Experiment 20001504 PARAMETER Experiment Name: At_Far-red-enriched_P Parameter: Plant Line Value: Columbia
  misc_feature: MA Experiment 20001504 PARAMETER Experiment Name: At_Far-red-enriched_P Parameter: Timepoint (day) Value: 6
  misc_feature: MA Experiment 20001504 PARAMETER Experiment Name: At_Far-red-enriched_P Parameter: Tissue Value: Whole Plant
  misc_feature: MA Experiment ID: 20001554 Result: Up-regulated in Transcription
  misc_feature: MA Experiment 20001554 PARAMETER Experiment Name: At_Drought_Soil_Dry_P Parameter: Age (day) Value: 21
  misc_feature: MA Experiment 20001554 PARAMETER Experiment Name: At_Drought_Soil_Dry_P Parameter: Organism Value: A. thaliana
  misc_feature: MA Experiment 20001554 PARAMETER Experiment Name: At_Drought_Soil_Dry_P Parameter: Plant Line Value: WS
  misc_feature: MA Experiment 20001554 PARAMETER Experiment Name: At_Drought_Soil_Dry_P Parameter: Post Timepoint (hr) Value: None
  misc_feature: MA Experiment 20001554 PARAMETER Experiment Name: At_Drought_Soil_Dry_P Parameter: Post-Treatment Value: None
  misc_feature: MA Experiment 20001554 PARAMETER Experiment Name: At_Drought_Soil_Dry_P Parameter: Timepoint (day) Value: 7
  misc_feature: MA Experiment 20001554 PARAMETER Experiment Name: At_Drought_Soil_Dry_P Parameter: Treatment Value: Drought vs. No Drought
  misc_feature: MA Experiment ID: 20001555 Result: Up-regulated in Transcription
  misc_feature: MA Experiment 20001555 PARAMETER Experiment Name: At_Drought_Soil_Dry_P Parameter: Age (day) Value: 24
  misc_feature: MA Experiment 20001555 PARAMETER Experiment Name: At_Drought_Soil_Dry_P Parameter: Organism Value: A. thaliana
  misc_feature: MA Experiment 20001555 PARAMETER Experiment Name: At_Drought_Soil_Dry_P Parameter: Plant Line Value: WS
  misc_feature: MA Experiment 20001555 PARAMETER Experiment Name: At_Drought_Soil_Dry_P Parameter: Post Timepoint (hr) Value: None
  misc_feature: MA Experiment 20001555 PARAMETER Experiment Name: At_Drought_Soil_Dry_P Parameter: Post-Treatment Value: None
  misc_feature: MA Experiment 20001555 PARAMETER Experiment Name: At_Drought_Soil_Dry_P Parameter: Timepoint (day) Value: 10
  misc_feature: MA Experiment 20001555 PARAMETER Experiment Name: At_Drought_Soil_Dry_P Parameter: Treatment Value: Drought vs. No Drought
  misc_feature: MA Experiment ID: 20001558 Result: Down-regulated in Transcription
  misc_feature: MA Experiment 20001558 PARAMETER Experiment Name: At_Drought_Soil_Dry_P Parameter: Age (day) Value: 27
  misc_feature: MA Experiment 20001558 PARAMETER Experiment Name: At_Drought_Soil_Dry_P Parameter: Organism Value: A. thaliana
  misc_feature: MA Experiment 20001558 PARAMETER Experiment Name: At_Drought_Soil_Dry_P Parameter: Plant Line Value: WS
  misc_feature: MA Experiment 20001558 PARAMETER Experiment Name: At_Drought_Soil_Dry_P Parameter: Post Timepoint (hr) Value: 6
  misc_feature: MA Experiment 20001558 PARAMETER Experiment Name: At_Drought_Soil_Dry_P Parameter: Post-Treatment Value: Re-Water vs. No Drought
  misc_feature: MA Experiment 20001558 PARAMETER Experiment Name: At_Drought_Soil_Dry_P Parameter: Timepoint (day) Value: 13
  misc_feature: MA Experiment 20001558 PARAMETER Experiment Name: At_Drought_Soil_Dry_P Parameter: Treatment Value: Drought vs. No Drought
  misc_feature: MA Experiment ID: 20001560 Result: Down-regulated in Transcription
  misc_feature: MA Experiment 20001560 PARAMETER Experiment Name: At_Drought_Soil_Dry_P Parameter: Age (day) Value: 28
  misc_feature: MA Experiment 20001560 PARAMETER Experiment Name: At_Drought_Soil_Dry_P Parameter: Organism Value: A. thaliana
  misc_feature: MA Experiment 20001560 PARAMETER Experiment Name: At_Drought_Soil_Dry_P Parameter: Plant Line Value: WS
  misc_feature: MA Experiment 20001560 PARAMETER Experiment Name: At_Drought_Soil_Dry_P Parameter: Post Timepoint (hr) Value: None
  misc_feature: MA Experiment 20001560 PARAMETER Experiment Name: At_Drought_Soil_Dry_P Parameter: Post-Treatment Value: None
  misc_feature: MA Experiment 20001560 PARAMETER Experiment Name: At_Drought_Soil_Dry_P Parameter: Timepoint (day) Value: 14
  misc_feature: MA Experiment 20001560 PARAMETER Experiment Name: At_Drought_Soil_Dry_P Parameter: Treatment Value: Drought vs. No Drought
  misc_feature: MA Experiment ID: 20001774 Result: Up-regulated in Transcription
  misc_feature: MA Experiment 20001774 PARAMETER Experiment Name: At_Far-red-enriched-adult_P Parameter: Age (day) Value: 31
  misc_feature: MA Experiment 20001774 PARAMETER Experiment Name: At_Far-red-enriched-adult_P Parameter: Light Value: Far-red enriched vs. White
  misc_feature: MA Experiment 20001774 PARAMETER Experiment Name: At_Far-red-enriched-adult_P Parameter: Organism Value: A. thaliana
  misc_feature: MA Experiment 20001774 PARAMETER Experiment Name: At_Far-red-enriched-adult_P Parameter: Plant Line Value: Columbia
  misc_feature: MA Experiment 20001774 PARAMETER Experiment Name: At_Far-red-enriched-adult_P Parameter: Timepoint (hr) Value: 72
  misc_feature: MA Experiment 20001774 PARAMETER Experiment Name: At_Far-red-enriched-adult_P Parameter: Tissue Value: Aerial
  misc_feature: MA Experiment ID: 20001906 Result: Up-regulated in Transcription
  misc_feature: MA Experiment 20001906 PARAMETER Experiment Name: At_Drought_Reproduction_P Parameter: Age (day) Value: 35
  misc_feature: MA Experiment 20001906 PARAMETER Experiment Name: At_Drought_Reproduction_P Parameter: Organism Value: A. thaliana
  misc_feature: MA Experiment 20001906 PARAMETER Experiment Name: At_Drought_Reproduction_P Parameter: Plant Line Value: WS
  misc_feature: MA Experiment 20001906 PARAMETER Experiment Name: At_Drought_Reproduction_P Parameter: Timepoint (day) Value: 5
  misc_feature: MA Experiment 20001906 PARAMETER Experiment Name: At_Drought_Reproduction_P Parameter: Tissue Value: Siliques
  misc_feature: MA Experiment 20001906 PARAMETER Experiment Name: At_Drought_Reproduction_P Parameter: Treatment Value: Drought vs. No Drought
  misc_feature: MA Experiment ID: 20001911 Result: Up-regulated in Transcription
  misc_feature: MA Experiment 20001911 PARAMETER Experiment Name: At_Drought_Reproduction_P Parameter: Age (day) Value: 40
  misc_feature: MA Experiment 20001911 PARAMETER Experiment Name: At_Drought_Reproduction_P Parameter: Organism Value: A. thaliana
  misc_feature: MA Experiment 20001911 PARAMETER Experiment Name: At_Drought_Reproduction_P Parameter: Plant Line Value: WS
  misc_feature: MA Experiment 20001911 PARAMETER Experiment Name: At_Drought_Reproduction_P Parameter: Timepoint (day) Value: 10
  misc_feature: MA Experiment 20001911 PARAMETER Experiment Name: At_Drought_Reproduction_P Parameter: Tissue Value: Flowers
  misc_feature: MA Experiment 20001911 PARAMETER Experiment Name: At_Drought_Reproduction_P Parameter: Treatment Value: Drought vs. No Drought
ttattcaaaatattttcaccaactaaaaaaagatacatcgaaacaaatctctctaatcatatctaagttataacttttctttataaacaataaacaatagctttgatttgaagcaagaggagcaacaatggagatcaccactatcatattcctcatcatatcctctctcaccttctccatcttccttaaactcatcttcttcttctcaactcacaaactcccaccgggaccacctcgttttccggtcatcggaaacatcatctggcttaagaaaaacaacttctccgatttccaaggcgttctccgtgacttagcctcccgtcacggaccaatcataacactccacgtaggctccaaaccttccatctgggtcacagacagatcactcgctcaccaagcccttgtccaaaacggtgccgttttctccgaccgttctctcgctctccctaccaccaaagtcatcaccagcaaccaacacgacatccactcctccgtctatggctctctctggagaaccctccgccgcaacctcacctccgaaatcctccagccctcgcgcgtgaaagcacacgcgccgtcgaggaaatggtctctcgagattctcgtggatctgttcgagacagagcagagagagaaaggacatatctccgacgctttagatcatttacgtcacgctatgttttatttgttggctctgatgtgtttcggagagaaactgagaaaagaagagatcagagagatcgaagaagctcagtaccaaatgctcataagctacaccaagttcagcgtcctcaacatcttcccaagcgtaaccaagttcttgctccggcgaaaatggaaagagtttttagaactaaggaaatctcaagagagcgttatacttcgatacgtgaacgcaagaagcaaagaaaccaccggagatgttctctgttacgtcgatacgctgctgaatcttgagatcccgacggaggagaaagaaggagggaagaagaggaaactgagtgactcggagatcgtgagtctgtgttcggagtttcttaacgcagctacggatccaacggcgacgtcgatgcagtggatcatggcgatcatggtgaagtatccagagatacagaggaaagtatacgaggaaatgaagactgtgttcgccggagaagaagaagaaagagaagagatcagagaagaggatttggggaagttgagttacctcaaagctgtgatcttggagtgtctaagaagacaccctcctggtcattacttgtcttaccataaggtcacacacgacaccgttttgggtggatttctcattccgcgccaaggtactataaactttatggtaggagaaatgggccgggacccaaaaatatgggaagatcctctaacgttcaagccagaaagatttctagagaacggagaagcatgtgattttgatatgacgggaactcgcgagattaaaatgatgccgtttggagcgggacgacggatgtgtcccggctacgcgctttcgttgcttcacctggaatattatgtggccaatttggtttggaaattcgagtggaaatgtgtggaaggtgaagaagttgatctatccgagaagcaacagttcatcacaatggtcatgaaaaaccctttcaaagcaaatatttatccaaggagaaagtgatatttgcttttgtcatattatcaaaaaggcccattgggcttatttgtcgtatgtatattaaaaactttgtctcatatgtattaaaacaatttgggcctttaatgggtttcaatataaagatgtcaacacttttagt

SEQ ID NO: 98941 - protein, 511 aa, Arabidopsis thaliana
  peptide (1)..(511): Ceres Seq. ID no. 13601805
  misc_feature (1)..(511): Homolog of NCBI NO: 15228566 NR Description: cytochrome P450, putative [Arabidopsis thaliana]
  misc_feature (1)..(511): Homolog of NCBI NO: 15983414 NR Description: AT3g03470/T21P5_11 [Arabidopsis thaliana]
  misc_feature (6)..(510): Homolog of NCBI NO: 15217801 NR Description: cytochrome P450, putative [Arabidopsis thaliana]
  misc_feature (6)..(510): Homolog of NCBI NO: 15450601 NR Description: At1g64950/F13O11_25 [Arabidopsis thaliana]
  misc_feature (6)..(510): Homolog of NCBI NO: 15224379 NR Description: cytochrome P450, putative [Arabidopsis thaliana]
  misc_feature (6)..(510): Homolog of NCBI NO: 15217800 NR Description: cytochrome P450, putative [Arabidopsis thaliana]
  misc_feature (6)..(510): Homolog of NCBI NO: 15217798 NR Description: cytochrome P450, putative [Arabidopsis thaliana]
  misc_feature (6)..(510): Homolog of NCBI NO: 15217771 NR Description: cytochrome P450, putative [Arabidopsis thaliana]
  misc_feature (11)..(337): Homolog of NCBI NO: 15240223 NR Description: cytochrome P450, putative [Arabidopsis thaliana]
  misc_feature (336)..(511): Homolog of NCBI NO: 15240223 NR Description: cytochrome P450, putative [Arabidopsis thaliana]
MEITTIIFLIISSLTFSIFLKLIFFFSTHKLPPGPPRFPVIGNIIWLKKNNFSDFQGVLRDLASRHGPIITLHVGSKPSIWVTDRSLAHQALVQNGAVFSDRSLALPTTKVITSNQHDIHSSVYGSLWRTLRRNLTSEILQPSRVKAHAPSRKWSLEILVDLFETEQREKGHISDALDHLRHAMFYLLALMCFGEKLRKEEIREIEEAQYQMLISYTKFSVLNIFPSVTKFLLRRKWKEFLELRKSQESVILRYVNARSKETTGDVLCYVDTLLNLEIPTEEKEGGKKRKLSDSEIVSLCSEFLNAATDPTATSMQWIMAIMVKYPEIQRKVYEEMKTVFAGEEEEREEIREEDLGKLSYLKAVILECLRRHPPGHYLSYHKVTHDTVLGGFLIPRQGTINFMVGEMGRDPKIWEDPLTFKPERFLENGEACDFDMTGTREIKMMPFGAGRRMCPGYALSLLHLEYYVANLVWKFEWKCVEGEEVDLSEKQQFITMVMKNPFKANIYPRRK

SEQ ID NO: 98942 - protein, 328 aa, Arabidopsis thaliana
  peptide (1)..(328): Ceres Seq. ID no. 13601806
  misc_feature (1)..(328): Homolog of NCBI NO: 15228566 NR Description: cytochrome P450, putative [Arabidopsis thaliana]
  misc_feature (1)..(328): Homolog of NCBI NO: 15983414 NR Description: AT3g03470/T21P5_11 [Arabidopsis thaliana]
  misc_feature (1)..(327): Homolog of NCBI NO: 15217801 NR Description: cytochrome P450, putative [Arabidopsis thaliana]
  misc_feature (1)..(327): Homolog of NCBI NO: 15450601 NR Description: At1g64950/F13O11_25 [Arabidopsis thaliana]
  misc_feature (1)..(327): Homolog of NCBI NO: 15224379 NR Description: cytochrome P450, putative [Arabidopsis thaliana]
  misc_feature (1)..(327): Homolog of NCBI NO: 15217800 NR Description: cytochrome P450, putative [Arabidopsis thaliana]
  misc_feature (1)..(327): Homolog of NCBI NO: 15217798 NR Description: cytochrome P450, putative [Arabidopsis thaliana]
  misc_feature (1)..(327): Homolog of NCBI NO: 15217771 NR Description: cytochrome P450, putative [Arabidopsis thaliana]
  misc_feature (1)..(154): Homolog of NCBI NO: 15240223 NR Description: cytochrome P450, putative [Arabidopsis thaliana]
  misc_feature (153)..(328): Homolog of NCBI NO: 15240223 NR Description: cytochrome P450, putative [Arabidopsis thaliana]
MFYLLALMCFGEKLRKEEIREIEEAQYQMLISYTKFSVLNIFPSVTKFLLRRKWKEFLELRKSQESVILRYVNARSKETTGDVLCYVDTLLNLEIPTEEKEGGKKRKLSDSEIVSLCSEFLNAATDPTATSMQWIMAIMVKYPEIQRKVYEEMKTVFAGEEEEREEIREEDLGKLSYLKAVILECLRRHPPGHYLSYHKVTHDTVLGGFLIPRQGTINFMVGEMGRDPKIWEDPLTFKPERFLENGEACDFDMTGTREIKMMPFGAGRRMCPGYALSLLHLEYYVANLVWKFEWKCVEGEEVDLSEKQQFITMVMKNPFKANIYPRRK

SEQ ID NO: 98943 - protein, 321 aa, Arabidopsis thaliana
  peptide (1)..(321): Ceres Seq. ID no. 13601807
  misc_feature (1)..(321): Homolog of NCBI NO: 15228566 NR Description: cytochrome P450, putative [Arabidopsis thaliana]
  misc_feature (1)..(321): Homolog of NCBI NO: 15983414 NR Description: AT3g03470/T21P5_11 [Arabidopsis thaliana]
  misc_feature (1)..(320): Homolog of NCBI NO: 15217801 NR Description: cytochrome P450, putative [Arabidopsis thaliana]
  misc_feature (1)..(320): Homolog of NCBI NO: 15450601 NR Description: At1g64950/F13O11_25 [Arabidopsis thaliana]
  misc_feature (1)..(320): Homolog of NCBI NO: 15224379 NR Description: cytochrome P450, putative [Arabidopsis thaliana]
  misc_feature (1)..(320): Homolog of NCBI NO: 15217800 NR Description: cytochrome P450, putative [Arabidopsis thaliana]
  misc_feature (1)..(320): Homolog of NCBI NO: 15217798 NR Description: cytochrome P450, putative [Arabidopsis thaliana]
  misc_feature (1)..(320): Homolog of NCBI NO: 15217771 NR Description: cytochrome P450, putative [Arabidopsis thaliana]
  misc_feature (1)..(147): Homolog of NCBI NO: 15240223 NR Description: cytochrome P450, putative [Arabidopsis thaliana]
  misc_feature (146)..(321): Homolog of NCBI NO: 15240223 NR Description: cytochrome P450, putative [Arabidopsis thaliana]
MCFGEKLRKEEIREIEEAQYQMLISYTKFSVLNIFPSVTKFLLRRKWKEFLELRKSQESVILRYVNARSKETTGDVLCYVDTLLNLEIPTEEKEGGKKRKLSDSEIVSLCSEFLNAATDPTATSMQWIMAIMVKYPEIQRKVYEEMKTVFAGEEEEREEIREEDLGKLSYLKAVILECLRRHPPGHYLSYHKVTHDTVLGGFLIPRQGTINFMVGEMGRDPKIWEDPLTFKPERFLENGEACDFDMTGTREIKMMPFGAGRRMCPGYALSLLHLEYYVANLVWKFEWKCVEGEEVDLSEKQQFITMVMKNPFKANIYPRRK

SEQ ID NO: 98944 - DNA, 1500 bp, Arabidopsis thaliana
  misc_feature (1)..(1500): Ceres Seq. ID no. 13601808
  misc_feature: MA Experiment ID: 108501 Result: Down-regulated in Transcription
  misc_feature: MA Experiment 108501 PARAMETER Experiment Name: At_ap2_floral_buds_cDNA_P Parameter: Plant Line Value: ap2 (Ler.)
  misc_feature: MA Experiment 108501 PARAMETER Experiment Name: At_ap2_floral_buds_cDNA_P Parameter: Tissue Value: Closed Flower
  misc_feature: MA Experiment ID: 108561 Result: Up-regulated in Transcription
  misc_feature: MA Experiment 108561 PARAMETER Experiment Name: At_100uM_ABA_cDNA_P Parameter: Timepoint (hr) Value: 6
  misc_feature: MA Experiment 108561 PARAMETER Experiment Name: At_100uM_ABA_cDNA_P Parameter: Tissue Value: Aerial
  misc_feature: MA Experiment 108561 PARAMETER Experiment Name: At_100uM_ABA_cDNA_P Parameter: Treatment Value: 100uM ABA vs. No Treatment
  misc_feature: MA Experiment ID: 108569 Result: Up-regulated in Transcription
  misc_feature: MA Experiment 108569 PARAMETER Experiment Name: At_0.001%_MeJA__cDNA_P Parameter: Timepoint (hr) Value: 6
  misc_feature: MA Experiment 108569 PARAMETER Experiment Name: At_0.001%_MeJA__cDNA_P Parameter: Tissue Value: Aerial
  misc_feature: MA Experiment 108569 PARAMETER Experiment Name: At_0.001%_MeJA__cDNA_P Parameter: Treatment Value: 0.001% MeJA vs. No Treatment
  misc_feature: MA Experiment ID: 108572 Result: Up-regulated in Transcription
  misc_feature: MA Experiment 108572 PARAMETER Experiment Name: At_Drought_cDNA_P Parameter: Timepoint (hr) Value: 1
  misc_feature: MA Experiment 108572 PARAMETER Experiment Name: At_Drought_cDNA_P Parameter: Tissue Value: Aerial
  misc_feature: MA Experiment 108572 PARAMETER Experiment Name: At_Drought_cDNA_P Parameter: Treatment Value: Drought vs. No Drought
  misc_feature: MA Experiment ID: 108573 Result: Up-regulated in Transcription
  misc_feature: MA Experiment 108573 PARAMETER Experiment Name: At_Drought_cDNA_P Parameter: Timepoint (hr) Value: 6
  misc_feature: MA Experiment 108573 PARAMETER Experiment Name: At_Drought_cDNA_P Parameter: Tissue Value: Aerial
  misc_feature: MA Experiment 108573 PARAMETER Experiment Name: At_Drought_cDNA_P Parameter: Treatment Value: Drought vs. No Drought
  misc_feature: MA Experiment ID: 108605 Result: Up-regulated in Transcription
  misc_feature: MA Experiment 108605 PARAMETER Experiment Name: At_100uM_ABA_cDNA_P Parameter: Timepoint (hr) Value: 6
  misc_feature: MA Experiment 108605 PARAMETER Experiment Name: At_100uM_ABA_cDNA_P Parameter: Tissue Value: Aerial
  misc_feature: MA Experiment 108605 PARAMETER Experiment Name: At_100uM_ABA_cDNA_P Parameter: Treatment Value: 100uM ABA vs. No Treatment
  misc_feature: MA Experiment ID: 108607 Result: Up-regulated in Transcription
  misc_feature: MA Experiment 108607 PARAMETER Experiment Name: At_100uM_ABA_cDNA_P Parameter: Timepoint (hr) Value: 4
  misc_feature: MA Experiment 108607 PARAMETER Experiment Name: At_100uM_ABA_cDNA_P Parameter: Tissue Value: Aerial
  misc_feature: MA Experiment 108607 PARAMETER Experiment Name: At_100uM_ABA_cDNA_P Parameter: Treatment Value: 100uM ABA vs. No Treatment
  misc_feature: MA Experiment ID: 20000069 Result: Up-regulated in Transcription
  misc_feature: MA Experiment 20000069 PARAMETER Experiment Name: At_100uM_ABA_Mutants_cDNA_P Parameter: Plant Line Value: CS23
  misc_feature: MA Experiment 20000069 PARAMETER Experiment Name: At_100uM_ABA_Mutants_cDNA_P Parameter: Timepoint (hr) Value: 6
  misc_feature: MA Experiment 20000069 PARAMETER Experiment Name: At_100uM_ABA_Mutants_cDNA_P Parameter: Tissue Value: Aerial
  misc_feature: MA Experiment 20000069 PARAMETER Experiment Name: At_100uM_ABA_Mutants_cDNA_P Parameter: Treatment Value: 100uM ABA vs. No Treatment
  misc_feature: MA Experiment ID: 20000070 Result: Up-regulated in Transcription
  misc_feature: MA Experiment 20000070 PARAMETER Experiment Name: At_100uM_ABA_Mutants_cDNA_P Parameter: Plant Line Value: CS24
  misc_feature: MA Experiment 20000070 PARAMETER Experiment Name: At_100uM_ABA_Mutants_cDNA_P Parameter: Timepoint (hr) Value: 6
  misc_feature: MA Experiment 20000070 PARAMETER Experiment Name: At_100uM_ABA_Mutants_cDNA_P Parameter: Tissue Value: Aerial
  misc_feature: MA Experiment 20000070 PARAMETER Experiment Name: At_100uM_ABA_Mutants_cDNA_P Parameter: Treatment Value: 100uM ABA vs. No Treatment
  misc_feature: MA Experiment ID: 20000071 Result: Up-regulated in Transcription
  misc_feature: MA Experiment 20000071 PARAMETER Experiment Name: At_100uM_ABA_Mutants_cDNA_P Parameter: Plant Line Value: CS8104
  misc_feature: MA Experiment 20000071 PARAMETER Experiment Name: At_100uM_ABA_Mutants_cDNA_P Parameter: Timepoint (hr) Value: 6
  misc_feature: MA Experiment 20000071 PARAMETER Experiment Name: At_100uM_ABA_Mutants_cDNA_P Parameter: Tissue Value: Aerial
  misc_feature: MA Experiment 20000071 PARAMETER Experiment Name: At_100uM_ABA_Mutants_cDNA_P Parameter: Treatment Value: 100uM ABA vs. No Treatment
  misc_feature: MA Experiment ID: 20000072 Result: Up-regulated in Transcription
  misc_feature: MA Experiment 20000072 PARAMETER Experiment Name: At_100uM_ABA_Mutants_cDNA_P Parameter: Plant Line Value: CS8105
  misc_feature: MA Experiment 20000072 PARAMETER Experiment Name: At_100uM_ABA_Mutants_cDNA_P Parameter: Timepoint (hr) Value: 6
  misc_feature: MA Experiment 20000072 PARAMETER Experiment Name: At_100uM_ABA_Mutants_cDNA_P Parameter: Tissue Value: Aerial
  misc_feature: MA Experiment 20000072 PARAMETER Experiment Name: At_100uM_ABA_Mutants_cDNA_P Parameter: Treatment Value: 100uM ABA vs. No Treatment
  misc_feature: MA Experiment ID: 20000086 Result: Up-regulated in Transcription
  misc_feature: MA Experiment 20000086 PARAMETER Experiment Name: At_100uM_ABA_Mutants_cDNA_P Parameter: Plant Line Value: CS22
  misc_feature: MA Experiment 20000086 PARAMETER Experiment Name: At_100uM_ABA_Mutants_cDNA_P Parameter: Timepoint (hr) Value: 6
  misc_feature: MA Experiment 20000086 PARAMETER Experiment Name: At_100uM_ABA_Mutants_cDNA_P Parameter: Tissue Value: Aerial
  misc_feature: MA Experiment 20000086 PARAMETER Experiment Name: At_100uM_ABA_Mutants_cDNA_P Parameter: Treatment Value: 100uM ABA vs. No Treatment
  misc_feature: MA Experiment ID: 20000087 Result: Up-regulated in Transcription
  misc_feature: MA Experiment 20000087 PARAMETER Experiment Name: At_100uM_ABA_Mutants_cDNA_P Parameter: Plant Line Value: WS
  misc_feature: MA Experiment 20000087 PARAMETER Experiment Name: At_100uM_ABA_Mutants_cDNA_P Parameter: Timepoint (hr) Value: 6
  misc_feature: MA Experiment 20000087 PARAMETER Experiment Name: At_100uM_ABA_Mutants_cDNA_P Parameter: Tissue Value: Aerial
  misc_feature: MA Experiment 20000087 PARAMETER Experiment Name: At_100uM_ABA_Mutants_cDNA_P Parameter: Treatment Value: 100uM ABA vs. No Treatment
  misc_feature: MA Experiment ID: 20000088 Result: Up-regulated in Transcription
  misc_feature: MA Experiment 20000088 PARAMETER Experiment Name: At_100uM_ABA_Mutants_cDNA_P Parameter: Plant Line Value: Landsberg
  misc_feature: MA Experiment 20000088 PARAMETER Experiment Name: At_100uM_ABA_Mutants_cDNA_P Parameter: Timepoint (hr) Value: 6
  misc_feature: MA Experiment 20000088 PARAMETER Experiment Name: At_100uM_ABA_Mutants_cDNA_P Parameter: Tissue Value: Aerial
  misc_feature: MA Experiment 20000088 PARAMETER Experiment Name: At_100uM_ABA_Mutants_cDNA_P Parameter: Treatment Value: 100uM ABA vs. No Treatment
  misc_feature: MA Experiment ID: 20000169 Result: Up-regulated in Transcription
  misc_feature: MA Experiment 20000169 PARAMETER Experiment Name: At_100uM_ABA_P Parameter: Age (day) Value: 14
  misc_feature: MA Experiment 20000169 PARAMETER Experiment Name: At_100uM_ABA_P Parameter: Organism Value: A. thaliana
  misc_feature: MA Experiment 20000169 PARAMETER Experiment Name: At_100uM_ABA_P Parameter: Plant Line Value: WS
  misc_feature: MA Experiment 20000169 PARAMETER Experiment Name: At_100uM_ABA_P Parameter: Timepoint (hr) Value: 6
  misc_feature: MA Experiment 20000169 PARAMETER Experiment Name: At_100uM_ABA_P Parameter: Tissue Value: Aerial
  misc_feature: MA Experiment 20000169 PARAMETER Experiment Name: At_100uM_ABA_P Parameter: Treatment Value: 100uM ABA vs. No Treatment
  misc_feature: MA Experiment ID: 20000171 Result: Down-regulated in Transcription
  misc_feature: MA Experiment 20000171 PARAMETER Experiment Name: At_42deg_Heat_P Parameter: Age (day) Value: 14
  misc_feature: MA Experiment 20000171 PARAMETER Experiment Name: At_42deg_Heat_P Parameter: Organism Value: A. thaliana
  misc_feature: MA Experiment 20000171 PARAMETER Experiment Name: At_42deg_Heat_P Parameter: Plant Line Value: WS
  misc_feature: MA Experiment 20000171 PARAMETER Experiment Name: At_42deg_Heat_P Parameter: Temperature (deg C) Value: 42 vs. 22
  misc_feature: MA Experiment 20000171 PARAMETER Experiment Name: At_42deg_Heat_P Parameter: Timepoint (hr) Value: 1
  misc_feature: MA Experiment 20000171 PARAMETER Experiment Name: At_42deg_Heat_P Parameter: Tissue Value: Aerial
  misc_feature: MA Experiment ID: 20000264 Result: Up-regulated in Transcription
  misc_feature: MA Experiment 20000264 PARAMETER Experiment Name: At_Open_Flower_P Parameter: Age (day) Value: 21
  misc_feature: MA Experiment 20000264 PARAMETER Experiment Name: At_Open_Flower_P Parameter: Plant Line Value: WS
  misc_feature: MA Experiment 20000264 PARAMETER Experiment Name: At_Open_Flower_P Parameter: Tissue Value: Open Flower vs. Whole Plant
  misc_feature: MA Experiment ID: 20000265 Result: Up-regulated in Transcription
  misc_feature: MA Experiment 20000265 PARAMETER Experiment Name: At_Open_Flower_P Parameter: Age (day) Value: 21
  misc_feature: MA Experiment 20000265 PARAMETER Experiment Name: At_Open_Flower_P Parameter: Plant Line Value: WS
  misc_feature: MA Experiment 20000265 PARAMETER Experiment Name: At_Open_Flower_P Parameter: Tissue Value: Closed Flower vs. Whole Plant
  misc_feature: MA Experiment ID: 20000286 Result: Up-regulated in Transcription
  misc_feature: MA Experiment 20000286 PARAMETER Experiment Name: At_Open_Flower_P Parameter: Age (day) Value: 21
  misc_feature: MA Experiment 20000286 PARAMETER Experiment Name: At_Open_Flower_P Parameter: Plant Line Value: WS
  misc_feature: MA Experiment 20000286 PARAMETER Experiment Name: At_Open_Flower_P Parameter: Tissue Value: Half Open vs. Whole Plant
  misc_feature: MA Experiment ID: 20000437 Result: Up-regulated in Transcription
  misc_feature: MA Experiment 20000437 PARAMETER Experiment Name: At_Drought_P Parameter: Age (day) Value: 8
  misc_feature: MA Experiment 20000437 PARAMETER Experiment Name: At_Drought_P Parameter: Organism Value: A. thaliana
  misc_feature: MA Experiment 20000437 PARAMETER Experiment Name: At_Drought_P Parameter: Plant Line Value: WS
  misc_feature: MA Experiment 20000437 PARAMETER Experiment Name: At_Drought_P Parameter: Timepoint (hr) Value: 24
  misc_feature: MA Experiment 20000437 PARAMETER Experiment Name: At_Drought_P Parameter: Tissue Value: Whole Plant
  misc_feature: MA Experiment 20000437 PARAMETER Experiment Name: At_Drought_P Parameter: Treatment Value: Drought vs. No Drought
  misc_feature: MA Experiment ID: 20000453 Result: Up-regulated in Transcription
  misc_feature: MA Experiment 20000453 PARAMETER Experiment Name: At_100uM_ABA_P Parameter: Age (day) Value: 15
  misc_feature: MA Experiment 20000453 PARAMETER Experiment Name: At_100uM_ABA_P Parameter: Organism Value: A. thaliana
  misc_feature: MA Experiment 20000453 PARAMETER Experiment Name: At_100uM_ABA_P Parameter: Plant Line Value: WS
  misc_feature: MA Experiment 20000453 PARAMETER Experiment Name: At_100uM_ABA_P Parameter: Timepoint (hr) Value: 24
  misc_feature: MA Experiment 20000453 PARAMETER Experiment Name: At_100uM_ABA_P Parameter: Tissue Value: Aerial
  misc_feature: MA Experiment 20000453 PARAMETER Experiment Name: At_100uM_ABA_P Parameter: Treatment Value: 100uM ABA vs. No Treatment
  misc_feature: MA Experiment ID: 20000495 Result: Down-regulated in Transcription
  misc_feature: MA Experiment 20000495 PARAMETER Experiment Name: At_Guard_Cells_P Parameter: Harvest Date Value: 8/2/2002
  misc_feature: MA Experiment 20000495 PARAMETER Experiment Name: At_Guard_Cells_P Parameter: Organism Value: A. thaliana
  misc_feature: MA Experiment 20000495 PARAMETER Experiment Name: At_Guard_Cells_P Parameter: Tissue Value: Guard Cells vs. Leaves
  misc_feature: MA Experiment ID: 20000573 Result: Up-regulated in Transcription
  misc_feature: MA Experiment 20000573 PARAMETER Experiment Name: At_100uM_ABA_Mutants__P Parameter: Organism Value: A. thaliana
  misc_feature: MA Experiment 20000573 PARAMETER Experiment Name: At_100uM_ABA_Mutants__P Parameter: Plant Line Value: CS22 vs. Ler wt
  misc_feature: MA Experiment 20000573 PARAMETER Experiment Name: At_100uM_ABA_Mutants__P Parameter: Timepoint (hr) Value: N/A
  misc_feature: MA Experiment 20000573 PARAMETER Experiment Name: At_100uM_ABA_Mutants__P Parameter: Tissue Value: Whole Plant
  misc_feature: MA Experiment 20000573 PARAMETER Experiment Name: At_100uM_ABA_Mutants__P Parameter: Treatment Value: None
  misc_feature: MA Experiment ID: 20000574 Result: Up-regulated in Transcription
  misc_feature: MA Experiment 20000574 PARAMETER Experiment Name: At_100uM_ABA_Mutants__P Parameter: Organism Value: A. thaliana
  misc_feature: MA Experiment 20000574 PARAMETER Experiment Name: At_100uM_ABA_Mutants__P Parameter: Plant Line Value: CS23 vs. Ler wt
  misc_feature: MA Experiment 20000574 PARAMETER Experiment Name: At_100uM_ABA_Mutants__P Parameter: Timepoint (hr) Value: N/A
  misc_feature: MA Experiment 20000574 PARAMETER Experiment Name: At_100uM_ABA_Mutants__P Parameter: Tissue Value: Whole Plant
  misc_feature: MA Experiment 20000574 PARAMETER Experiment Name: At_100uM_ABA_Mutants__P Parameter: Treatment Value: None
  misc_feature: MA Experiment ID: 20000709 Result: Down-regulated in Transcription
  misc_feature: MA Experiment 20000709 PARAMETER Experiment Name: At_15mM_NH4NO3_L-to-H_P Parameter: Age (hr) Value: 14
  misc_feature: MA Experiment 20000709 PARAMETER Experiment Name: At_15mM_NH4NO3_L-to-H_P Parameter: Organism Value: A. thaliana
  misc_feature: MA Experiment 20000709 PARAMETER Experiment Name: At_15mM_NH4NO3_L-to-H_P Parameter: Plant Line Value: WS
  misc_feature: MA Experiment 20000709 PARAMETER Experiment Name: At_15mM_NH4NO3_L-to-H_P Parameter: Timepoint (hr) Value: 4
  misc_feature: MA Experiment 20000709 PARAMETER Experiment Name: At_15mM_NH4NO3_L-to-H_P Parameter: Tissue Value: Aerial
  misc_feature: MA Experiment 20000709 PARAMETER Experiment Name: At_15mM_NH4NO3_L-to-H_P Parameter: Treatment Value: 15mM NH4NO3 vs. 30mM Mannitol
  misc_feature: MA Experiment ID: 20001457 Result: Down-regulated in Transcription
  misc_feature: MA Experiment 20001457 PARAMETER Experiment Name: At_50mM_NH4NO3_L-to-H_P Parameter: Age (day) Value: Undefined
  misc_feature: MA Experiment 20001457 PARAMETER Experiment Name: At_50mM_NH4NO3_L-to-H_P Parameter: Organism Value: Undefined
  misc_feature: MA Experiment 20001457 PARAMETER Experiment Name: At_50mM_NH4NO3_L-to-H_P Parameter: Plant Line Value: Undefined
  misc_feature: MA Experiment 20001457 PARAMETER Experiment Name: At_50mM_NH4NO3_L-to-H_P Parameter: Timepoint (hr) Value: 0.5
  misc_feature: MA Experiment 20001457 PARAMETER Experiment Name: At_50mM_NH4NO3_L-to-H_P Parameter: Tissue Value: Siliques
  misc_feature: MA Experiment 20001457 PARAMETER Experiment Name: At_50mM_NH4NO3_L-to-H_P Parameter: Treatment Value: 50mM NH4NO3 vs. 100mM Manitol
  misc_feature: MA Experiment ID: 20001554 Result: Up-regulated in Transcription
  misc_feature: MA Experiment 20001554 PARAMETER Experiment Name: At_Drought_Soil_Dry_P Parameter: Age (day) Value: 21
  misc_feature: MA Experiment 20001554 PARAMETER Experiment Name: At_Drought_Soil_Dry_P Parameter: Organism Value: A. thaliana
  misc_feature: MA Experiment 20001554 PARAMETER Experiment Name: At_Drought_Soil_Dry_P Parameter: Plant Line Value: WS
  misc_feature: MA Experiment 20001554 PARAMETER Experiment Name: At_Drought_Soil_Dry_P Parameter: Post Timepoint (hr) Value: None
  misc_feature: MA Experiment 20001554 PARAMETER Experiment Name: At_Drought_Soil_Dry_P Parameter: Post-Treatment Value: None
  misc_feature: MA Experiment 20001554 PARAMETER Experiment Name: At_Drought_Soil_Dry_P Parameter: Timepoint (day) Value: 7
  misc_feature: MA Experiment 20001554 PARAMETER Experiment Name: At_Drought_Soil_Dry_P Parameter: Treatment Value: Drought vs. No Drought
  misc_feature: MA Experiment ID: 20001555 Result: Up-regulated in Transcription
  misc_feature: MA Experiment 20001555 PARAMETER Experiment Name: At_Drought_Soil_Dry_P Parameter: Age (day) Value: 24
  misc_feature: MA Experiment 20001555 PARAMETER Experiment Name: At_Drought_Soil_Dry_P Parameter: Organism Value: A. thaliana
  misc_feature: MA Experiment 20001555 PARAMETER Experiment Name: At_Drought_Soil_Dry_P Parameter: Plant Line Value: WS
  misc_feature: MA Experiment 20001555 PARAMETER Experiment Name: At_Drought_Soil_Dry_P Parameter: Post Timepoint (hr) Value: None
  misc_feature: MA Experiment 20001555 PARAMETER Experiment Name: At_Drought_Soil_Dry_P Parameter: Post-Treatment Value: None
  misc_feature: MA Experiment 20001555 PARAMETER Experiment Name: At_Drought_Soil_Dry_P Parameter: Timepoint (day) Value: 10
  misc_feature: MA Experiment 20001555 PARAMETER Experiment Name: At_Drought_Soil_Dry_P Parameter: Treatment Value: Drought vs. No Drought
  misc_feature: MA Experiment ID: 20001559 Result: Up-regulated in Transcription
  misc_feature: MA Experiment 20001559 PARAMETER Experiment Name: At_Drought_Soil_Dry_P Parameter: Age (day) Value: 28
  misc_feature: MA Experiment 20001559 PARAMETER Experiment Name: At_Drought_Soil_Dry_P Parameter: Organism Value: A. thaliana
  misc_feature: MA Experiment 20001559 PARAMETER Experiment Name: At_Drought_Soil_Dry_P Parameter: Plant Line Value: WS
  misc_feature: MA Experiment 20001559 PARAMETER Experiment Name: At_Drought_Soil_Dry_P Parameter: Post Timepoint (hr) Value: 29
  misc_feature: MA Experiment 20001559 PARAMETER Experiment Name: At_Drought_Soil_Dry_P Parameter: Post-Treatment Value: Re-Water vs. No Drought
  misc_feature: MA Experiment 20001559 PARAMETER Experiment Name: At_Drought_Soil_Dry_P Parameter: Timepoint (day) Value: 14
  misc_feature: MA Experiment 20001559 PARAMETER Experiment Name: At_Drought_Soil_Dry_P Parameter: Treatment Value: Drought vs. No Drought
  misc_feature: MA Experiment ID: 20001757 Result: Down-regulated in Transcription
  misc_feature: MA Experiment 20001757 PARAMETER Experiment Name: At_50mM_NH4NO3_L-to-H_P Parameter: Timepoint (hr) Value: 6
  misc_feature: MA Experiment 20001757 PARAMETER Experiment Name: At_50mM_NH4NO3_L-to-H_P Parameter: Tissue Value: Leaf
  misc_feature: MA Experiment 20001757 PARAMETER Experiment Name: At_50mM_NH4NO3_L-to-H_P Parameter: Treatment Value: 50mM NH4NO3 vs 100mM Mannitol
  misc_feature: MA Experiment ID: 20001904 Result: Up-regulated in Transcription
  misc_feature: MA Experiment 20001904 PARAMETER Experiment Name: At_Drought_Reproduction_P Parameter: Age (day) Value: 37
  misc_feature: MA Experiment 20001904 PARAMETER Experiment Name: At_Drought_Reproduction_P Parameter: Organism Value: A. thaliana
  misc_feature: MA Experiment 20001904 PARAMETER Experiment Name: At_Drought_Reproduction_P Parameter: Plant Line Value: WS
  misc_feature: MA Experiment 20001904 PARAMETER Experiment Name: At_Drought_Reproduction_P Parameter: Timepoint (day) Value: 7
  misc_feature: MA Experiment 20001904 PARAMETER Experiment Name: At_Drought_Reproduction_P Parameter: Tissue Value: Rosettes
  misc_feature: MA Experiment 20001904 PARAMETER Experiment Name: At_Drought_Reproduction_P Parameter: Treatment Value: Drought vs. No Drought
  misc_feature: MA Experiment ID: 20001905 Result: Up-regulated in Transcription
  misc_feature: MA Experiment 20001905 PARAMETER Experiment Name: At_Drought_Reproduction_P Parameter: Age (day) Value: 40
  misc_feature: MA Experiment 20001905 PARAMETER Experiment Name: At_Drought_Reproduction_P Parameter: Organism Value: A. thaliana
  misc_feature: MA Experiment 20001905 PARAMETER Experiment Name: At_Drought_Reproduction_P Parameter: Plant Line Value: WS
  misc_feature: MA Experiment 20001905 PARAMETER Experiment Name: At_Drought_Reproduction_P Parameter: Timepoint (day) Value: 10
  misc_feature: MA Experiment 20001905 PARAMETER Experiment Name: At_Drought_Reproduction_P Parameter: Tissue Value: Rosettes
  misc_feature: MA Experiment 20001905 PARAMETER Experiment Name: At_Drought_Reproduction_P Parameter: Treatment Value: Drought vs. No Drought
  misc_feature: MA Experiment ID: 20001906 Result: Up-regulated in Transcription
  misc_feature: MA Experiment 20001906 PARAMETER Experiment Name: At_Drought_Reproduction_P Parameter: Age (day) Value: 35
  misc_feature: MA Experiment 20001906 PARAMETER Experiment Name: At_Drought_Reproduction_P Parameter: Organism Value: A. thaliana
  misc_feature: MA Experiment 20001906 PARAMETER Experiment Name: At_Drought_Reproduction_P Parameter: Plant Line Value: WS
  misc_feature: MA Experiment 20001906 PARAMETER Experiment Name: At_Drought_Reproduction_P Parameter: Timepoint (day) Value: 5
  misc_feature: MA Experiment 20001906 PARAMETER Experiment Name: At_Drought_Reproduction_P Parameter: Tissue Value: Siliques
  misc_feature: MA Experiment 20001906 PARAMETER Experiment Name: At_Drought_Reproduction_P Parameter: Treatment Value: Drought vs. No Drought
acgtgtgattctatcttcaaagtatcaaagtatggaccatcaagtgtctctgccacaatctaccaccactggtctttctttcaaggtgcatcgccagcagcgggagctagtcactccggctaaaccaacgccacgagagctcaagcctctctccgacatagacgaccaacaaggactaagatttcaaattccagttatttttttctatagacctaacctttcaagtgatcttgatccggtccaggtgataaagaaagccctcgccgatgcgctggtttactactatccgttcgctggtaggctccgggaactttcaaaccggaaactcgcggtggactgcaccggtgaaggcgttttgttcatcgaggctgaagctgacgtggcgcttgctgagctggaagaggctgatgctcttcttcctccattccctttcctagaagagcttctctttgatgtggaaggctctagtgatgtgcttaacactcctctgcttctcgtccaggtcacgcgattgaaatgctgtggatttatcttcgcactccgcttcaaccataccatgaccgatggagccggcctgtcgctctttctgaaatcactatgcgagttggcgtgtgggcttcacgcaccctcggttccacccgtatggaaccgacacttgttgactgtgagtgcttcggaggcgcgtgtgacccacacacaccgtgagtacgatgatcaggtgggaatcgatgtggtcgccactggacaccctttggttagccggtctttctttttcagagcagaagagatctccgctataaggaaactccttccgcctgatctacacaatacctcatttgaagctttgtcgtcatttttgtggcgttgtcggactattgcgttgaatcctgaccccaacactgagatgcgtctaacttgcatcatcaactcgcgttccaagcttagaaacccaccgctagagcctggttactacggaaatgtgtttgtcattcccgcggcaatagcgacagcaagagatctaatagagaaaccgcttgagtttgctttgaggttgatacaagaaacgaagtcaagtgtaaccgaggactacgtccgttcagtgaccgccctaatggcgactagaggccggcctatgtttgtggcatcagggaactacataatatcggacttgagacattttgatttaggaaaaattgattttggaccgtggggtaagccagtgtacggtggaaccgctaaggccggtatcgcgcttttcccgggagtgagcttctacgtgccgtttaagaataaaaaaggtgagacaggtacagttgtggcgattagcttgccggtacgggcgatggagacgttcgtagcagagctaaatggagtgctaaatgtgtctaaaggatgagagcttagtcgagactcgagacgttattagtaatgtagtaaatagttccttttcttattcgacatcatagtgtagtaactaatatttatatcattgcatctttc

SEQ ID NO: 98945 - protein, 464 aa, Arabidopsis thaliana
  peptide (1)..(464): Ceres Seq. ID no. 13601809
  misc_feature (27)..(458): Pfam Name: Transferase family Pfam Description: Transferase family
  misc_feature (11)..(464): Homolog of NCBI NO: 15228568 NR Description: transferase family [Arabidopsis thaliana]
  misc_feature (11)..(464): Homolog of NCBI NO: 21536854 NR Description: putative hypersensitivity-related gene
  misc_feature (25)..(460): Homolog of NCBI NO: 15237985 NR Description: transferase family [Arabidopsis thaliana]
  misc_feature (25)..(461): Homolog of NCBI NO: 22854880 NR Description: benzoyl coenzyme A: benzyl alcohol benzoyl
  misc_feature (25)..(461): Homolog of NCBI NO: 7489142 NR Description: hsr201 protein, hypersensitivity-related - common
  misc_feature (25)..(460): Homolog of NCBI NO: 22854876 NR Description: benzoyl coenzyme A: benzyl alcohol benzoyl
  misc_feature (20)..(459): Homolog of NCBI NO: 37535814 NR Description: putative hypersensitivity-related (hsr)protein
  misc_feature (22)..(461): Homolog of NCBI NO: 18652312 NR Description: putative acyltransferase [Cucumis melo]
  misc_feature (26)..(463): Homolog of NCBI NO: 7484744 NR Description: probable anthranilate N-benzoyltransferase (EC - muskmelon (fragment) >gi|1843440|emb|CAA94432.1| unknown
  misc_feature (22)..(451): Homolog of NCBI NO: 27085290 NR Description: acyltransferase 2 [Capsicum chinense]
RVILSSKYQSMDHQVSLPQSTTTGLSFKVHRQQRELVTPAKPTPRELKPLSDIDDQQGLRFQIPVIFFYRPNLSSDLDPVQVIKKALADALVYYYPFAGRLRELSNRKLAVDCTGEGVLFIEAEADVALAELEEADALLPPFPFLEELLFDVEGSSDVLNTPLLLVQVTRLKCCGFIFALRFNHTMTDGAGLSLFLKSLCELACGLHAPSVPPVWNRHLLTVSASEARVTHTHREYDDQVGIDVVATGHPLVSRSFFFRAEEISAIRKLLPPDLHNTSFEALSSFLWRCRTIALNPDPNTEMRLTCIINSRSKLRNPPLEPGYYGNVFVIPAAIATARDLIEKPLEFALRLIQETKSSVTEDYVRSVTALMATRGRPMFVASGNYIISDLRHFDLGKIDFGPWGKPVYGGTAKAGIALFPGVSFYVPFKNKKGETGTVVAISLPVRAMETFVAELNGVLNVSKG

SEQ ID NO: 98946 - protein, 454 aa, Arabidopsis thaliana
  peptide (1)..(454): Ceres Seq. ID no. 13601810
  misc_feature (17)..(448): Pfam Name: Transferase family Pfam Description: Transferase family
  misc_feature (1)..(454): Homolog of NCBI NO: 15228568 NR Description: transferase family [Arabidopsis thaliana]
  misc_feature (1)..(454): Homolog of NCBI NO: 21536854 NR Description: putative hypersensitivity-related gene
  misc_feature (15)..(450): Homolog of NCBI NO: 15237985 NR Description: transferase family [Arabidopsis thaliana]
  misc_feature (15)..(451): Homolog of NCBI NO: 22854880 NR Description: benzoyl coenzyme A: benzyl alcohol benzoyl
  misc_feature (15)..(451): Homolog of NCBI NO: 7489142 NR Description: hsr201 protein, hypersensitivity-related - common
  misc_feature (15)..(450): Homolog of NCBI NO: 22854876 NR Description: benzoyl coenzyme A: benzyl alcohol benzoyl
  misc_feature (10)..(449): Homolog of NCBI NO: 37535814 NR Description: putative hypersensitivity-related (hsr)protein
  misc_feature (12)..(451): Homolog of NCBI NO: 18652312 NR Description: putative acyltransferase [Cucumis melo]
  misc_feature (16)..(453): Homolog of NCBI NO: 7484744 NR Description: probable anthranilate N-benzoyltransferase (EC - muskmelon (fragment) >gi|1843440|emb|CAA94432.1| unknown
  misc_feature (12)..(441): Homolog of NCBI NO: 27085290 NR Description: acyltransferase 2 [Capsicum chinense]
MDHQVSLPQSTTTGLSFKVHRQQRELVTPAKPTPRELKPLSDIDDQQGLRFQIPVIFFYRPNLSSDLDPVQVIKKALADALVYYYPFAGRLRELSNRKLAVDCTGEGVLFIEAEADVALAELEEADALLPPFPFLEELLFDVEGSSDVLNTPLLLVQVTRLKCCGFIFALRFNHTMTDGAGLSLFLKSLCELACGLHAPSVPPVWNRHLLTVSASEARVTHTHREYDDQVGIDVVATGHPLVSRSFFFRAEEISAIRKLLPPDLHNTSFEALSSFLWRCRTIALNPDPNTEMRLTCIINSRSKLRNPPLEPGYYGNVFVIPAAIATARDLIEKPLEFALRLIQETKSSVTEDYVRSVTALMATRGRPMFVASGNYIISDLRHFDLGKIDFGPWGKPVYGGTAKAGIALFPGVSFYVPFKNKKGETGTVVAISLPVRAMETFVAELNGVLNVSKG

SEQ ID NO: 98947 - protein, 279 aa, Arabidopsis thaliana
  peptide (1)..(279): Ceres Seq. ID no. 13601811
  misc_feature (1)..(273): Pfam Name: Transferase family Pfam Description: Transferase family
  misc_feature (1)..(279): Homolog of NCBI NO: 15228568 NR Description: transferase family [Arabidopsis thaliana]
  misc_feature (1)..(279): Homolog of NCBI NO: 21536854 NR Description: putative hypersensitivity-related gene
  misc_feature (1)..(275): Homolog of NCBI NO: 15237985 NR Description: transferase family [Arabidopsis thaliana]
  misc_feature (1)..(276): Homolog of NCBI NO: 22854880 NR Description: benzoyl coenzyme A: benzyl alcohol benzoyl
  misc_feature (1)..(276): Homolog of NCBI NO: 7489142 NR Description: hsr201 protein, hypersensitivity-related - common
  misc_feature (1)..(275): Homolog of NCBI NO: 22854876 NR Description: benzoyl coenzyme A: benzyl alcohol benzoyl
  misc_feature (1)..(274): Homolog of NCBI NO: 37535814 NR Description: putative hypersensitivity-related (hsr)protein
  misc_feature (1)..(276): Homolog of NCBI NO: 18652312 NR Description: putative acyltransferase [Cucumis melo]
  misc_feature (1)..(278): Homolog of NCBI NO: 7484744 NR Description: probable anthranilate N-benzoyltransferase (EC - muskmelon (fragment) >gi|1843440|emb|CAA94432.1| unknown
  misc_feature (1)..(266): Homolog of NCBI NO: 27085290 NR Description: acyltransferase 2 [Capsicum chinense]
MTDGAGLSLFLKSLCELACGLHAPSVPPVWNRHLLTVSASEARVTHTHREYDDQVGIDVVATGHPLVSRSFFFRAEEISAIRKLLPPDLHNTSFEALSSFLWRCRTIALNPDPNTEMRLTCIINSRSKLRNPPLEPGYYGNVFVIPAAIATARDLIEKPLEFALRLIQETKSSVTEDYVRSVTALMATRGRPMFVASGNYIISDLRHFDLGKIDFGPWGKPVYGGTAKAGIALFPGVSFYVPFKNKKGETGTVVAISLPVRAMETFVAELNGVLNVSKG

SEQ ID NO: 98948 - DNA, 912 bp, Arabidopsis thaliana
  misc_feature (1)..(912): Ceres Seq. ID no. 13601823
  misc_feature: MA Experiment ID: 108434 Result: Up-regulated in Transcription
  misc_feature: MA Experiment 108434 PARAMETER Experiment Name: At_Root_Tips_cDNA_P Parameter: Tissue Value: Root Tips
  misc_feature: MA Experiment ID: 108462 Result: Down-regulated in Transcription
  misc_feature: MA Experiment 108462 PARAMETER Experiment Name: At_Germinating_Seeds_cDNA_P Parameter: Age (day) Value: 2 vs. 0
  misc_feature: MA Experiment 108462 PARAMETER Experiment Name: At_Germinating_Seeds_cDNA_P Parameter: Tissue Value: Germinating Seeds
  misc_feature: MA Experiment ID: 108463 Result: Down-regulated in Transcription
  misc_feature: MA Experiment 108463 PARAMETER Experiment Name: At_Germinating_Seeds_cDNA_P Parameter: Age (day) Value: 3 vs. 0
  misc_feature: MA Experiment 108463 PARAMETER Experiment Name: At_Germinating_Seeds_cDNA_P Parameter: Tissue Value: Germinating Seeds
  misc_feature: MA Experiment ID: 108464 Result: Down-regulated in Transcription
  misc_feature: MA Experiment 108464 PARAMETER Experiment Name: At_Germinating_Seeds_cDNA_P Parameter: Age (day) Value: 4 vs. 0
  misc_feature: MA Experiment 108464 PARAMETER Experiment Name: At_Germinating_Seeds_cDNA_P Parameter: Tissue Value: Germinating Seeds
  misc_feature: MA Experiment ID: 20000437 Result: Down-regulated in Transcription
  misc_feature: MA Experiment 20000437 PARAMETER Experiment Name: At_Drought_P Parameter: Age (day) Value: 8
  misc_feature: MA Experiment 20000437 PARAMETER Experiment Name: At_Drought_P Parameter: Organism Value: A. thaliana
  misc_feature: MA Experiment 20000437 PARAMETER Experiment Name: At_Drought_P Parameter: Plant Line Value: WS
  misc_feature: MA Experiment 20000437 PARAMETER Experiment Name: At_Drought_P Parameter: Timepoint (hr) Value: 24
  misc_feature: MA Experiment 20000437 PARAMETER Experiment Name: At_Drought_P Parameter: Tissue Value: Whole Plant
  misc_feature: MA Experiment 20000437 PARAMETER Experiment Name: At_Drought_P Parameter: Treatment Value: Drought vs. No Drought
  misc_feature: MA Experiment ID: 20000794 Result: Down-regulated in Transcription
  misc_feature: MA Experiment 20000794 PARAMETER Experiment Name: At_Petals_P Parameter: Age (day) Value: 23-25 days
  misc_feature: MA Experiment 20000794 PARAMETER Experiment Name: At_Petals_P Parameter: Plant Line Value: WS
  misc_feature: MA Experiment 20000794 PARAMETER Experiment Name: At_Petals_P Parameter: Tissue Value: Petals vs. Whole plant
  misc_feature: MA Experiment ID: 20001560 Result: Up-regulated in Transcription
  misc_feature: MA Experiment 20001560 PARAMETER Experiment Name: At_Drought_Soil_Dry_P Parameter: Age (day) Value: 28
  misc_feature: MA Experiment 20001560 PARAMETER Experiment Name: At_Drought_Soil_Dry_P Parameter: Organism Value: A. thaliana
  misc_feature: MA Experiment 20001560 PARAMETER Experiment Name: At_Drought_Soil_Dry_P Parameter: Plant Line Value: WS
  misc_feature: MA Experiment 20001560 PARAMETER Experiment Name: At_Drought_Soil_Dry_P Parameter: Post Timepoint (hr) Value: None
  misc_feature: MA Experiment 20001560 PARAMETER Experiment Name: At_Drought_Soil_Dry_P Parameter: Post-Treatment Value: None
  misc_feature: MA Experiment 20001560 PARAMETER Experiment Name: At_Drought_Soil_Dry_P Parameter: Timepoint (day) Value: 14
  misc_feature: MA Experiment 20001560 PARAMETER Experiment Name: At_Drought_Soil_Dry_P Parameter: Treatment Value: Drought vs. No Drought
tcaatctgcgaatttctcttaaaccctaaccctctcgctgccgtccggtggtttttccgacgacgaactatgacgattcacgctgcagtaatccagaagcttctgaacaccggagcacatctcggccgtcgtgccgccgagcaccatttcaagcaatacgcttacgggacgcgtaacggaatgacaattatcgactccgacaaaaccctaatttgcctccgtagcgccgctcatttcgtcgctaacctcgcccacatgagaggtaacatcttcttcgtcaacacgaatcctctcttcgacgaaatcattgagctcacttctcgtcggatccaaggagattcgtataatcacaaccgtgcgatgaatctgtggaagatgggagggtttttgactaacagctacagtcctaagaagtttcgatctaggcataaaaagctttgctttggtccaactactatgcctgattgtgtcgttgtgtttgattctgagaggaagagctctgtgatacttgaggcatcgaagcttcagattccggttgttgcaattgtggacccgaatgtgccattggagttctttgagaagattacgtatcctgtgccagctcgtgattcggtcaagtttgtgtatttgttctgtaatgtgatcaccaagtgctttgtggcagaacagatgaagttggggatcaaagaagggagcaatgaagatttgatgaaggatttagctgcttgattttgatatttgcaacaaaagtatgaaactttacagttgtttttctgagtctggaataattgttcttcagaattgtggttacttcaactttgaaattctgggagttttttacacatggatgattttgtttctctgatggatatttctgtataagattgttgagttctagtgttctacatcttg

SEQ ID NO: 98949 - protein, 242 aa, Arabidopsis thaliana
  peptide (1)..(242): Ceres Seq. ID no. 13601824
  misc_feature (34)..(223): Pfam Name: Ribosomal protein S2 Pfam Description: Ribosomal protein S2
  misc_feature (24)..(242): Homolog of NCBI NO: 15228593 NR Description: ribosomal protein S2p family [Arabidopsis >gi|27805714|sp|Q9GCB9|RT02_ARATH Mitochondrial ribosomal protein >gi|6091762|gb|AAF03472.1|AC009327_11 putative ribosomal protein
  misc_feature (24)..(242): Homolog of NCBI NO: 21536611 NR Description: putative ribosomal protein S2 [Arabidopsis
  misc_feature (24)..(223): Homolog of NCBI NO: 7440113 NR Description: ribosomal protein S2 homolog - wheat >gi|2547036|emb|CAA74226.1| ribosomal protein S2 [Triticum
  misc_feature (23)..(229): Homolog of NCBI NO: 9944891 NR Description: ribosomal protein S2 [Zea mays]
  misc_feature (24)..(217): Homolog of NCBI NO: 9944889 NR Description: ribosomal protein S2 [Zea mays]
  misc_feature (23)..(229): Homolog of NCBI NO: 40795007 NR Description: ribosomal protein S2 [Zea mays]
  misc_feature (24)..(223): Homolog of NCBI NO: 7489611 NR Description: hypothetical protein 483 - rice mitochondrion
  misc_feature (30)..(143): Homolog of NCBI NO: 11467163 NR Description: rps2 [Marchantia polymorpha]
  misc_feature (135)..(220): Homolog of NCBI NO: 11467163 NR Description: rps2 [Marchantia polymorpha]
  misc_feature (24)..(217): Homolog of NCBI NO: 40795002 NR Description: ribosomal protein S2 [Zea mays]
SICEFLLNPNPLAAVRWFFRRRTMTIHAAVIQKLLNTGAHLGRRAAEHHFKQYAYGTRNGMTIIDSDKTLICLRSAAHFVANLAHMRGNIFFVNTNPLFDEIIELTSRRIQGDSYNHNRAMNLWKMGGFLTNSYSPKKFRSRHKKLCFGPTTMPDCVVVFDSERKSSVILEASKLQIPVVAIVDPNVPLEFFEKITYPVPARDSVKFVYLFCNVITKCFVAEQMKLGIKEGSNEDLMKDLAA

SEQ ID NO: 98950 - protein, 219 aa, Arabidopsis thaliana
  peptide (1)..(219): Ceres Seq. ID no. 13601825
  misc_feature (11)..(200): Pfam Name: Ribosomal protein S2 Pfam Description: Ribosomal protein S2
  misc_feature (1)..(219): Homolog of NCBI NO: 15228593 NR Description: ribosomal protein S2p family [Arabidopsis >gi|27805714|sp|Q9GCB9|RT02_ARATH Mitochondrial ribosomal protein >gi|6091762|gb|AAF03472.1|AC009327_11 putative ribosomal protein
  misc_feature (1)..(219): Homolog of NCBI NO: 21536611 NR Description: putative ribosomal protein S2 [Arabidopsis
  misc_feature (1)..(200): Homolog of NCBI NO: 7440113 NR Description: ribosomal protein S2 homolog - wheat >gi|2547036|emb|CAA74226.1| ribosomal protein S2 [Triticum
  misc_feature (1)..(206): Homolog of NCBI NO: 9944891 NR Description: ribosomal protein S2 [Zea mays]
  misc_feature (1)..(194): Homolog of NCBI NO: 9944889 NR Description: ribosomal protein S2 [Zea mays]
  misc_feature (1)..(206): Homolog of NCBI NO: 40795007 NR Description: ribosomal protein S2 [Zea mays]
  misc_feature (1)..(200): Homolog of NCBI NO: 7489611 NR Description: hypothetical protein 483 - rice mitochondrion
  misc_feature (7)..(120): Homolog of NCBI NO: 11467163 NR Description: rps2 [Marchantia polymorpha]
  misc_feature (112)..(197): Homolog of NCBI NO: 11467163 NR Description: rps2 [Marchantia polymorpha]
  misc_feature (1)..(194): Homolog of NCBI NO: 40795002 NR Description: ribosomal protein S2 [Zea mays]
MTIHAAVIQKLLNTGAHLGRRAAEHHFKQYAYGTRNGMTIIDSDKTLICLRSAAHFVANLAHMRGNIFFVNTNPLFDEIIELTSRRIQGDSYNHNRAMNLWKMGGFLTNSYSPKKFRSRHKKLCFGPTTMPDCVVVFDSERKSSVILEASKLQIPVVAIVDPNVPLEFFEKITYPVPARDSVKFVYLFCNVITKCFVAEQMKLGIKEGSNEDLMKDLAA

SEQ ID NO: 98951 - protein, 182 aa, Arabidopsis thaliana
  peptide (1)..(182): Ceres Seq. ID no. 13601826
  misc_feature (1)..(163): Pfam Name: Ribosomal protein S2 Pfam Description: Ribosomal protein S2
  misc_feature (1)..(182): Homolog of NCBI NO: 15228593 NR Description: ribosomal protein S2p family [Arabidopsis >gi|27805714|sp|Q9GCB9|RT02_ARATH Mitochondrial ribosomal protein >gi|6091762|gb|AAF03472.1|AC009327_11 putative ribosomal protein
  misc_feature (1)..(182): Homolog of NCBI NO: 21536611 NR Description: putative ribosomal protein S2 [Arabidopsis
  misc_feature (1)..(163): Homolog of NCBI NO: 7440113 NR Description: ribosomal protein S2 homolog - wheat >gi|2547036|emb|CAA74226.1| ribosomal protein S2 [Triticum
  misc_feature (1)..(169): Homolog of NCBI NO: 9944891 NR Description: ribosomal protein S2 [Zea mays]
  misc_feature (1)..(157): Homolog of NCBI NO: 9944889 NR Description: ribosomal protein S2 [Zea mays]
  misc_feature (1)..(169): Homolog of NCBI NO: 40795007 NR Description: ribosomal protein S2 [Zea mays]
  misc_feature (1)..(163): Homolog of NCBI NO: 7489611 NR Description: hypothetical protein 483 - rice mitochondrion
  misc_feature (1)..(83): Homolog of NCBI NO: 11467163 NR Description: rps2 [Marchantia polymorpha]
  misc_feature (75)..(160): Homolog of NCBI NO: 11467163 NR Description: rps2 [Marchantia polymorpha]
  misc_feature (1)..(157): Homolog of NCBI NO: 40795002 NR Description: ribosomal protein S2 [Zea mays]
MTIIDSDKTLICLRSAAHFVANLAHMRGNIFFVNTNPLFDEIIELTSRRIQGDSYNHNRAMNLWKMGGFLTNSYSPKKFRSRHKKLCFGPTTMPDCVVVFDSERKSSVILEASKLQIPVVAIVDPNVPLEFFEKITYPVPARDSVKFVYLFCNVITKCFVAEQMKLGIKEGSNEDLMKDLAA

SEQ ID NO: 98952 - DNA, 1124 bp, Arabidopsis thaliana
  misc_feature (1)..(1124): Ceres Seq. ID no. 13601831
  misc_feature: MA Experiment ID: 108576 Result: Up-regulated in Transcription
  misc_feature: MA Experiment 108576 PARAMETER Experiment Name: At_42deg_Heat_cDNA_P Parameter: Temperature (deg C) Value: 42 vs. 22
  misc_feature: MA Experiment 108576 PARAMETER Experiment Name: At_42deg_Heat_cDNA_P Parameter: Timepoint (hr) Value: 1
  misc_feature: MA Experiment 108576 PARAMETER Experiment Name: At_42deg_Heat_cDNA_P Parameter: Tissue Value: Aerial
  misc_feature: MA Experiment ID: 108594 Result: Down-regulated in Transcription
  misc_feature: MA Experiment 108594 PARAMETER Experiment Name: At_Ler-rhl_Root_cDNA_P Parameter: Plant Line Value: null
  misc_feature: MA Experiment ID: 20000286 Result: Up-regulated in Transcription
  misc_feature: MA Experiment 20000286 PARAMETER Experiment Name: At_Open_Flower_P Parameter: Age (day) Value: 21
  misc_feature: MA Experiment 20000286 PARAMETER Experiment Name: At_Open_Flower_P Parameter: Plant Line Value: WS
  misc_feature: MA Experiment 20000286 PARAMETER Experiment Name: At_Open_Flower_P Parameter: Tissue Value: Half Open vs. Whole Plant
  misc_feature: MA Experiment ID: 20000451 Result: Up-regulated in Transcription
  misc_feature: MA Experiment 20000451 PARAMETER Experiment Name: At_CS6879_Shoots-Roots_P Parameter: Age (day) Value: 14
  misc_feature: MA Experiment 20000451 PARAMETER Experiment Name: At_CS6879_Shoots-Roots_P Parameter: Organism Value: A. thaliana
  misc_feature: MA Experiment 20000451 PARAMETER Experiment Name: At_CS6879_Shoots-Roots_P Parameter: Plant Line Value: CS6879 vs. WS
  misc_feature: MA Experiment 20000451 PARAMETER Experiment Name: At_CS6879_Shoots-Roots_P Parameter: Tissue Value: Roots
acattgcaacactttctacaaaaacaagatgaagattgcaacgttttctgttctactcttgcttttatttattttccccgtggcattagcgcagctgaaatttaagttttacagtgaatcgtgccctaatgcagagactatcgtagaaaacctggttcgccagcagtttgctcgtgacccttcaatcacggccgccttgactcgtatgcattttcacgactgttttgtccagggctgcgacgcttctctcctcatagacccaacgacgtctcaactatcggaaaaaaacgccggcccaaactttagcgtgagagggttcgagctgatcgacgagatcaagacggcactcgaagctcaatgtccctctacggtctcgtgctccgatatagtcacgctcgccacacgtgacgccgtgttcttaggtggaggaccaagctacgtggtccccaccggacgtcgcgatggctttgtgtcgaatcctgaagacgccaatgagatcctccctccaccattcatatccgtcgaaggcatgttaagttttttcggcaacaaaggaatgaatgtttttgattccgtagctcttttgggggcgcacacggttgggatcgcgtcttgtggtaattttgtggaccgggtcacgaactttcaaggaaccggactgcccgacccatccatggaccccactttggctggcaggctaaggaacacatgtgcggttccaggcggcttcgcggcactggaccagtcgatgccagtaacgccggtctcattcgacaacttgttctttggtcagatcagagagaggaaaggaattttgcttattgaccaactgatcgcaagcgacccggccacttctggtgttgtacttcagtacgcgtccaacaacgaactattcaaacgtcagttcgcaatcgcaatggtgaagatgggagccgttgacgtgcttaccggttcagctggtgagatcaggacgaattgtagagcattcaactaaagctttataacaagtttctatatctgattattgattgtttttcccttaatttccgcttctgatgatgaattgtgaatggtgattgtttgcctatatatgtatgtacgtatatctttaaaataaggtttgg

SEQ ID NO: 98953 - protein, 330 aa, Arabidopsis thaliana
  peptide (1)..(330): Ceres Seq. ID no. 13601832
  misc_feature (48)..(294): Pfam Name: Peroxidase Pfam Description: Peroxidase
  misc_feature (10)..(330): Homolog of NCBI NO: 15228606 NR Description: peroxidase, putative [Arabidopsis thaliana] Peroxidase 28 precursor (Atperox P28) (ATP39)
  misc_feature (10)..(330): Homolog of NCBI NO: 21593692 NR Description: putative peroxidase [Arabidopsis thaliana]
  misc_feature (10)..(330): Homolog of NCBI NO: 15238030 NR Description: peroxidase, putative [Arabidopsis thaliana] Peroxidase 57 precursor (Atperox P57) (PRXR10) (ATP13a) peroxidase [Arabidopsis thaliana] >gi|1429219|emb|CAA67312.1|
  misc_feature (10)..(330): Homolog of NCBI NO: 21593467 NR Description: peroxidase ATP13a [Arabidopsis thaliana]
  misc_feature (16)..(330): Homolog of NCBI NO: 18416663 NR Description: peroxidase, putative [Arabidopsis thaliana] Peroxidase 44 precursor (Atperox P44) (ATP35)
  misc_feature (16)..(330): Homolog of NCBI NO: 7433094 NR Description: peroxidase homolog F20B18.120 - Arabidopsis >gi|4538930|emb|CAB39666.1| putative peroxidase [Arabidopsis >gi|7269452|emb|CAB79456.1| putative peroxidase [Arabidopsis
  misc_feature (20)..(330): Homolog of NCBI NO: 15218665 NR Description: peroxidase, putative [Arabidopsis thaliana]
  misc_feature (16)..(330): Homolog of NCBI NO: 21593262 NR Description: peroxidase [Arabidopsis thaliana]
  misc_feature (16)..(330): Homolog of NCBI NO: 15240140 NR Description: peroxidase, putative [Arabidopsis thaliana] Peroxidase 53 precursor (Atperox P53) (ATPA2) peroxidase [Arabidopsis thaliana] >gi|9759300|dbj|BAB09806.1|
  misc_feature (3)..(330): Homolog of NCBI NO: 5002348 NR Description: peroxidase 5 precursor [Phaseolus vulgaris]
HCNTFYKNKMKIATFSVLLLLLFIFPVALAQLKFKFYSESCPNAETIVENLVRQQFARDPSITAALTRMHFHDCFVQGCDASLLIDPTTSQLSEKNAGPNFSVRGFELIDEIKTALEAQCPSTVSCSDIVTLATRDAVFLGGGPSYVVPTGRRDGFVSNPEDANEILPPPFISVEGMLSFFGNKGMNVFDSVALLGAHTVGIASCGNFVDRVTNFQGTGLPDPSMDPTLAGRLRNTCAVPGGFAALDQSMPVTPVSFDNLFFGQIRERKGILLIDQLIASDPATSGVVLQYASNNELFKRQFAIAMVKMGAVDVLTGSAGEIRTNCRAFN

SEQ ID NO: 98954 - protein, 321 aa, Arabidopsis thaliana
  peptide (1)..(321): Ceres Seq. ID no. 13601833
  misc_feature (39)..(285): Pfam Name: Peroxidase Pfam Description: Peroxidase
  misc_feature (1)..(321): Homolog of NCBI NO: 15228606 NR Description: peroxidase, putative [Arabidopsis thaliana] Peroxidase 28 precursor (Atperox P28) (ATP39)
  misc_feature (1)..(321): Homolog of NCBI NO: 21593692 NR Description: putative peroxidase [Arabidopsis thaliana]
  misc_feature (1)..(321): Homolog of NCBI NO: 15238030 NR Description: peroxidase, putative [Arabidopsis thaliana] Peroxidase 57 precursor (Atperox P57) (PRXR10) (ATP13a) peroxidase [Arabidopsis thaliana] >gi|1429219|emb|CAA67312.1|
  misc_feature (1)..(321): Homolog of NCBI NO: 21593467 NR Description: peroxidase ATP13a [Arabidopsis thaliana]
  misc_feature (7)..(321): Homolog of NCBI NO: 18416663 NR Description: peroxidase, putative [Arabidopsis thaliana] Peroxidase 44 precursor (Atperox P44) (ATP35)
  misc_feature (7)..(321): Homolog of NCBI NO: 7433094 NR Description: peroxidase homolog F20B18.120 - Arabidopsis >gi|4538930|emb|CAB39666.1| putative peroxidase [Arabidopsis >gi|7269452|emb|CAB79456.1| putative peroxidase [Arabidopsis
  misc_feature (11)..(321): Homolog of NCBI NO: 15218665 NR Description: peroxidase, putative [Arabidopsis thaliana]
  misc_feature (7)..(321): Homolog of NCBI NO: 21593262 NR Description: peroxidase [Arabidopsis thaliana]
  misc_feature (7)..(321): Homolog of NCBI NO: 15240140 NR Description: peroxidase, putative [Arabidopsis thaliana] Peroxidase 53 precursor (Atperox P53) (ATPA2) peroxidase [Arabidopsis thaliana] >gi|9759300|dbj|BAB09806.1|
  misc_feature (1)..(321): Homolog of NCBI NO: 5002348 NR Description: peroxidase 5 precursor [Phaseolus vulgaris]
MKIATFSVLLLLLFIFPVALAQLKFKFYSESCPNAETIVENLVRQQFARDPSITAALTRMHFHDCFVQGCDASLLIDPTTSQLSEKNAGPNFSVRGFELIDEIKTALEAQCPSTVSCSDIVTLATRDAVFLGGGPSYVVPTGRRDGFVSNPEDANEILPPPFISVEGMLSFFGNKGMNVFDSVALLGAHTVGIASCGNFVDRVTNFQGTGLPDPSMDPTLAGRLRNTCAVPGGFAALDQSMPVTPVSFDNLFFGQIRERKGILLIDQLIASDPATSGVVLQYASNNELFKRQFAIAMVKMGAVDVLTGSAGEIRTNCRAFN

SEQ ID NO: 98955 - protein, 262 aa, Arabidopsis thaliana
  peptide (1)..(262): Ceres Seq. ID no. 13601834
  misc_feature (1)..(226): Pfam Name: Peroxidase Pfam Description: Peroxidase
  misc_feature (1)..(262): Homolog of NCBI NO: 15228606 NR Description: peroxidase, putative [Arabidopsis thaliana] Peroxidase 28 precursor (Atperox P28) (ATP39)
  misc_feature (1)..(262): Homolog of NCBI NO: 21593692 NR Description: putative peroxidase [Arabidopsis thaliana]
  misc_feature (1)..(262): Homolog of NCBI NO: 15238030 NR Description: peroxidase, putative [Arabidopsis thaliana] Peroxidase 57 precursor (Atperox P57) (PRXR10) (ATP13a) peroxidase [Arabidopsis thaliana] >gi|1429219|emb|CAA67312.1|
  misc_feature (1)..(262): Homolog of NCBI NO: 21593467 NR Description: peroxidase ATP13a [Arabidopsis thaliana]
  misc_feature (1)..(262): Homolog of NCBI NO: 18416663 NR Description: peroxidase, putative [Arabidopsis thaliana] Peroxidase 44 precursor (Atperox P44) (ATP35)
  misc_feature (1)..(262): Homolog of NCBI NO: 7433094 NR Description: peroxidase homolog F20B18.120 - Arabidopsis >gi|4538930|emb|CAB39666.1| putative peroxidase [Arabidopsis >gi|7269452|emb|CAB79456.1| putative peroxidase [Arabidopsis
  misc_feature (1)..(262): Homolog of NCBI NO: 15218665 NR Description: peroxidase, putative [Arabidopsis thaliana]
  misc_feature (1)..(262): Homolog of NCBI NO: 21593262 NR Description: peroxidase [Arabidopsis thaliana]
  misc_feature (1)..(262): Homolog of NCBI NO: 15240140 NR Description: peroxidase, putative [Arabidopsis thaliana] Peroxidase 53 precursor (Atperox P53) (ATPA2) peroxidase [Arabidopsis thaliana] >gi|9759300|dbj|BAB09806.1|
  misc_feature (1)..(262): Homolog of NCBI NO: 5002348 NR Description: peroxidase 5 precursor [Phaseolus vulgaris]
MHFHDCFVQGCDASLLIDPTTSQLSEKNAGPNFSVRGFELIDEIKTALEAQCPSTVSCSDIVTLATRDAVFLGGGPSYVVPTGRRDGFVSNPEDANEILPPPFISVEGMLSFFGNKGMNVFDSVALLGAHTVGIASCGNFVDRVTNFQGTGLPDPSMDPTLAGRLRNTCAVPGGFAALDQSMPVTPVSFDNLFFGQIRERKGILLIDQLIASDPATSGVVLQYASNNELFKRQFAIAMVKMGAVDVLTGSAGEIRTNCRAFN

SEQ ID NO: 98956 - DNA, 1937 bp, Arabidopsis thaliana
  misc_feature (1)..(1937): Ceres Seq. ID no. 13601856
  misc_feature: MA Experiment ID: 108461 Result: Down-regulated in Transcription
  misc_feature: MA Experiment 108461 PARAMETER Experiment Name: At_Germinating_Seeds_cDNA_P Parameter: Age (day) Value: 1 vs. 0
  misc_feature: MA Experiment 108461 PARAMETER Experiment Name: At_Germinating_Seeds_cDNA_P Parameter: Tissue Value: Germinating Seeds
  misc_feature: MA Experiment ID: 108462 Result: Down-regulated in Transcription
  misc_feature: MA Experiment 108462 PARAMETER Experiment Name: At_Germinating_Seeds_cDNA_P Parameter: Age (day) Value: 2 vs. 0
  misc_feature: MA Experiment 108462 PARAMETER Experiment Name: At_Germinating_Seeds_cDNA_P Parameter: Tissue Value: Germinating Seeds
  misc_feature: MA Experiment ID: 108463 Result: Down-regulated in Transcription
  misc_feature: MA Experiment 108463 PARAMETER Experiment Name: At_Germinating_Seeds_cDNA_P Parameter: Age (day) Value: 3 vs. 0
  misc_feature: MA Experiment 108463 PARAMETER Experiment Name: At_Germinating_Seeds_cDNA_P Parameter: Tissue Value: Germinating Seeds
  misc_feature: MA Experiment ID: 108464 Result: Down-regulated in Transcription
  misc_feature: MA Experiment 108464 PARAMETER Experiment Name: At_Germinating_Seeds_cDNA_P Parameter: Age (day) Value: 4 vs. 0
  misc_feature: MA Experiment 108464 PARAMETER Experiment Name: At_Germinating_Seeds_cDNA_P Parameter: Tissue Value: Germinating Seeds
  misc_feature: MA Experiment ID: 20000180 Result: Down-regulated in Transcription
  misc_feature: MA Experiment 20000180 PARAMETER Experiment Name: At_Germinating_Seeds_P Parameter: Age (hr) Value: 24 vs. 0
  misc_feature: MA Experiment 20000180 PARAMETER Experiment Name: At_Germinating_Seeds_P Parameter: Tissue Value: Germinating Seeds
  misc_feature: MA Experiment ID: 20001557 Result: Up-regulated in Transcription
  misc_feature: MA Experiment 20001557 PARAMETER Experiment Name: At_Drought_Soil_Dry_P Parameter: Age (day) Value: 27
  misc_feature: MA Experiment 20001557 PARAMETER Experiment Name: At_Drought_Soil_Dry_P Parameter: Organism Value: A. thaliana
  misc_feature: MA Experiment 20001557 PARAMETER Experiment Name: At_Drought_Soil_Dry_P Parameter: Plant Line Value: WS
  misc_feature: MA Experiment 20001557 PARAMETER Experiment Name: At_Drought_Soil_Dry_P Parameter: Post Timepoint (hr) Value: 3
  misc_feature: MA Experiment 20001557 PARAMETER Experiment Name: At_Drought_Soil_Dry_P Parameter: Post-Treatment Value: Re-Water vs. No Drought
  misc_feature: MA Experiment 20001557 PARAMETER Experiment Name: At_Drought_Soil_Dry_P Parameter: Timepoint (day) Value: 13
  misc_feature: MA Experiment 20001557 PARAMETER Experiment Name: At_Drought_Soil_Dry_P Parameter: Treatment Value: Drought vs. No Drought
atgagcagagaaagcttcaagccaatctgtcacattaacttggttgaaccagatgtctcttgcagtatatattgcttcttgagaaacgtagacatctgcttcgcgaattcggagcttccacagcaaaccttccattcatcttctccgatctccatcgccattttttctctcttttctccaatcctcacttctgttgactggtgtaagatcaaaagtcatctaattgggccttttcataaacgggcttttcaaaaatgggccttttctttatcttcttcctttttttattcatcatcttctatatgtgaattattcagaaacagaagcgagaagtttcttacaatttgtaaagagatctgttttagggttttgccttgttcttgtggcgggaataacaaagacatcgccgatatggggaaagacgaagaggaaatgcgaggtgagatcgaggagcgactaatcaatgaagagtacaagatctggaagaagaacactcctttcctctacgatctcgttattactcacgctctcgagtggccttcacttactgttgaatggcttcctgaccgtgaagaaccttccggtaaagactactccgttcagaagatgattctcggtacccatacctccgagagcgagcccaattacttgatgctagcccaagttcagcttcctcttgacgataccgagagtgaagctcgtcagtacgatgatgaccgctctgaatttggtggctttggctgtgcaactggaaaggtacaaattatccagcagataaatcatgatggtgaggttaatcgagctcgctatatgcctcaaaaccctttcataattgctaccaagacagttaatgcggaggtctatgttttcgattacagtaagcatccatctaagcctcctcttgatggggcttgtaatcctgatttaaagcttagaggtcacagctctgagggatatggtctctcttggagtaagttcaagcagggtcatttgcttagtggctctgatgatgctcagatctgcttgtgggatattaacgctactcctaaaaacaaatctctggacgctcagcagatttttaaggctcatgaaggggttgtggaagatgttgcatggcatctgagacatgagtacctgtttggatcagttggagatgaccaataccttctcatatgggatctgcgttctccatctgccagtaaaccagtacagtctgtggttgctcattcgatggaggttaactgcttagccttcaatccatttaatgagtgggttgtggcaacaggatcaactgacaagactgttaaattattcgatctacggaagctaagcaccgctcttcacacatttgatagccacaaagaggaggtttttcaagttggttggaacccaaagaacgagactattttagcttcatgttgccttggtagaagacttatggtttgggaccttagcaggatcgatgaggaacagacagtggaggacgcagaagacggcccacctgagctgctgtttattcacggtggtcacactagcaaaatttcagatttctcgtggaacccttgtgaagattgggttatttccagtgttgctgaggacaacatactccaaatatggcaaatggctgaaaacatctatcatgatgaggatgacgctccaggggaagaaccatcaaaagcttcttagcttgttatttagtatccaaagcgcactgatcttatgggacagtatttatttatacatctctgctattgtttagttcaagtatttagtgttcattgtgtaaaatgaggcatgagaggatggtagcaagtgggaatttttctttataacatgaaggagttgattctaatctcactaagtagtgtcaaccaaagctataactcttagtttatacccagattgggcgacattagaaagaaattacaaatttgaat

SEQ ID NO: 98957 - protein, 561 aa, Arabidopsis thaliana
  peptide (1)..(561): Ceres Seq. ID no. 13601857
  misc_feature (138)..(561): Homolog of NCBI NO: 15237140 NR Description: WD-40 repeat protein (MSI1) [Arabidopsis thaliana]
  misc_feature (138)..(559): Homolog of NCBI NO: 3122386 NR Description: WD-40 repeat protein MSI1 >gi|7444288|pir||T04324
  misc_feature (141)..(561): Homolog of NCBI NO: 17017388 NR Description: MSI type nucleosome/chromatin assembly factor C
  misc_feature (138)..(557): Homolog of NCBI NO: 5032027 NR Description: retinoblastoma binding protein 4;
  misc_feature (138)..(557): Homolog of NCBI NO: 6677681 NR Description: retinoblastoma binding protein 4 [Mus musculus]
  misc_feature (138)..(557): Homolog of NCBI NO: 34871596 NR Description: similar to retinoblastoma-binding protein mRbAp48
  misc_feature (141)..(556): Homolog of NCBI NO: 27503223 NR Description: Similar to retinoblastoma binding protein 7
  misc_feature (142)..(550): Homolog of NCBI NO: 9454362 NR Description: Rbap46 polypeptide [Gallus gallus]
  misc_feature (135)..(556): Homolog of NCBI NO: 31207939 NR Description: ENSANGP00000014714 [Anopheles gambiae]
  misc_feature (138)..(557): Homolog of NCBI NO: 5163126 NR Description: chromatin assembly factor 1 p48 subunit [Gallus
MSRESFKPICHINLVEPDVSCSIYCFLRNVDICFANSELPQQTFHSSSPISIAIFSLFSPILTSVDWCKIKSHLIGPFHKRAFQKWAFSLSSSFFYSSSSICELFRNRSEKFLTICKEICFRVLPCSCGGNNKDIADMGKDEEEMRGEIEERLINEEYKIWKKNTPFLYDLVITHALEWPSLTVEWLPDREEPSGKDYSVQKMILGTHTSESEPNYLMLAQVQLPLDDTESEARQYDDDRSEFGGFGCATGKVQIIQQINHDGEVNRARYMPQNPFIIATKTVNAEVYVFDYSKHPSKPPLDGACNPDLKLRGHSSEGYGLSWSKFKQGHLLSGSDDAQICLWDINATPKNKSLDAQQIFKAHEGVVEDVAWHLRHEYLFGSVGDDQYLLIWDLRSPSASKPVQSVVAHSMEVNCLAFNPFNEWVVATGSTDKTVKLFDLRKLSTALHTFDSHKEEVFQVGWNPKNETILASCCLGRRLMVWDLSRIDEEQTVEDAEDGPPELLFIHGGHTSKISDFSWNPCEDWVISSVAEDNILQIWQMAENIYHDEDDAPGEEPSKAS

SEQ ID NO: 98958 - protein, 424 aa, Arabidopsis thaliana; identical to SEQ ID NO: 23265
  peptide (1)..(424): Ceres Seq. ID no. 13601858
  misc_feature (1)..(424): Homolog of NCBI NO: 15237140 NR Description: WD-40 repeat protein (MSI1) [Arabidopsis thaliana]
  misc_feature (1)..(422): Homolog of NCBI NO: 3122386 NR Description: WD-40 repeat protein MSI1 >gi|7444288|pir||T04324
  misc_feature (4)..(424): Homolog of NCBI NO: 17017388 NR Description: MSI type nucleosome/chromatin assembly factor C
  misc_feature (1)..(420): Homolog of NCBI NO: 5032027 NR Description: retinoblastoma binding protein 4;
  misc_feature (1)..(420): Homolog of NCBI NO: 6677681 NR Description: retinoblastoma binding protein 4 [Mus musculus]
  misc_feature (1)..(420): Homolog of NCBI NO: 34871596 NR Description: similar to retinoblastoma-binding protein mRbAp48
  misc_feature (4)..(419): Homolog of NCBI NO: 27503223 NR Description: Similar to retinoblastoma binding protein 7
  misc_feature (5)..(413): Homolog of NCBI NO: 9454362 NR Description: Rbap46 polypeptide [Gallus gallus]
  misc_feature (1)..(419): Homolog of NCBI NO: 31207939 NR Description: ENSANGP00000014714 [Anopheles gambiae]
  misc_feature (1)..(420): Homolog of NCBI NO: 5163126 NR Description: chromatin assembly factor 1 p48 subunit [Gallus

SEQ ID NO: 98959 - protein, 417 aa, Arabidopsis thaliana; identical to SEQ ID NO: 23266
  peptide (1)..(417): Ceres Seq. ID no. 13601859
  misc_feature (1)..(417): Homolog of NCBI NO: 15237140 NR Description: WD-40 repeat protein (MSI1) [Arabidopsis thaliana]
  misc_feature (1)..(415): Homolog of NCBI NO: 3122386 NR Description: WD-40 repeat protein MSI1 >gi|7444288|pir||T04324
  misc_feature (1)..(417): Homolog of NCBI NO: 17017388 NR Description: MSI type nucleosome/chromatin assembly factor C
  misc_feature (1)..(413): Homolog of NCBI NO: 5032027 NR Description: retinoblastoma binding protein 4;
  misc_feature (1)..(413): Homolog of NCBI NO: 6677681 NR Description: retinoblastoma binding protein 4 [Mus musculus]
  misc_feature (1)..(413): Homolog of NCBI NO: 34871596 NR Description: similar to retinoblastoma-binding protein mRbAp48
  misc_feature (1)..(412): Homolog of NCBI NO: 27503223 NR Description: Similar to retinoblastoma binding protein 7
  misc_feature (1)..(406): Homolog of NCBI NO: 9454362 NR Description: Rbap46 polypeptide [Gallus gallus]
  misc_feature (1)..(412): Homolog of NCBI NO: 31207939 NR Description: ENSANGP00000014714 [Anopheles gambiae]
  misc_feature (1)..(413): Homolog of NCBI NO: 5163126 NR Description: chromatin assembly factor 1 p48 subunit [Gallus

SEQ ID NO: 98960 - DNA, 784 bp, Arabidopsis thaliana
  misc_feature (1)..(784): Ceres Seq. ID no. 13601860
  misc_feature: MA Experiment ID: 20000794 Result: Up-regulated in Transcription
  misc_feature: MA Experiment 20000794 PARAMETER Experiment Name: At_Petals_P Parameter: Age (day) Value: 23-25 days
  misc_feature: MA Experiment 20000794 PARAMETER Experiment Name: At_Petals_P Parameter: Plant Line Value: WS
  misc_feature: MA Experiment 20000794 PARAMETER Experiment Name: At_Petals_P Parameter: Tissue Value: Petals vs. Whole plant
gagctgagatgctgaacctgcaagtaaccgggaagacgatcttatctagtattcgttgtcagagaaagatgtcgtctacttgttcttcgtacgcatttgggccgtacaaaatcgatccccgtgaagtgttctacgcaacgcctctctcttatgccatggttaatctccgtccgcttcttcctgcacatgttcttgtctgcccgagacgccttgtgccacgatttactgatcttacagctgatgagaccagtgacctgtggcttactgctcagaaggttggctctaagcttgagaccttccataatgcgtcttctctcacattagccatccaagatggccctcaagcgggacagactgttccccatgtacacattcatatcttgcctcgtaaaggtggtgactttgagaagaatgatgaaatctatgatgctcttgatgagaaggagaaggaactgaagcagaagcttgatctagataaagaccgggttgataggagcattcaggagatggctgacgaggcttcccaatacagatctcttttcgattgctagttatcatttatcaatatcaaatcaaaccaagctatccagtagctttaataaggaccattgtgacaagtgactttcagtttgaaattttatgtcagagactttgattcaaatttgtaatttctttctaatgtcgcccaatctgggtataaactaagagttatagctttggttgacactacttagtgagattagaatcaactccttcatgttataaagaaaaattcccacttgct

SEQ ID NO: 98961 - protein, 182 aa, Arabidopsis thaliana
  peptide (1)..(182): Ceres Seq. ID no. 13601861
  misc_feature (3)..(182): Homolog of NCBI NO: 30697031 NR Description: bis(5'-adenosyl)-triphosphatase-related; also
  misc_feature (3)..(182): Homolog of NCBI NO: 27808510 NR Description: At5g58240 [Arabidopsis thaliana]
  misc_feature (23)..(182): Homolog of NCBI NO: 8777325 NR Description: bis(5'-adenosyl)-triphosphatase-like protein
  misc_feature (28)..(180): Homolog of NCBI NO: 27542770 NR Description: ATPase-like protein [Sorghum bicolor]
  misc_feature (28)..(180): Homolog of NCBI NO: 37589828 NR Description: Unknown (protein for MGC:73176) [Danio rerio]
  misc_feature (32)..(181): Homolog of NCBI NO: 28828402 NR Description: similar to diadenosine tetraphosphatase
  misc_feature (32)..(173): Homolog of NCBI NO: 40738785 NR Description: hypothetical protein AN6189.2 [Aspergillus
  misc_feature (29)..(180): Homolog of NCBI NO: 4503719 NR Description: fragile histidine triad gene; bis(5'-adenosyl)-
  misc_feature (29)..(180): Homolog of NCBI NO: 11120730 NR Description: fragile histidine triad protein [Rattus >gi|9587672|gb|AAF89328.1|AF170064_1 fragile histidine triad
  misc_feature (14)..(179): Homolog of NCBI NO: 17556280 NR Description: Nitrilase and fragile histidine triad fusion
AEMLNLQVTGKTILSSIRCQRKMSSTCSSYAFGPYKIDPREVFYATPLSYAMVNLRPLLPAHVLVCPRRLVPRFTDLTADETSDLWLTAQKVGSKLETFHNASSLTLAIQDGPQAGQTVPHVHIHILPRKGGDFEKNDEIYDALDEKEKELKQKLDLDKDRVDRSIQEMADEASQYRSLFDC

SEQ ID NO: 98962 - protein, 180 aa, Arabidopsis thaliana
  peptide (1)..(180): Ceres Seq. ID no. 13601862
  misc_feature (1)..(180): Homolog of NCBI NO: 30697031 NR Description: bis(5'-adenosyl)-triphosphatase-related; also
  misc_feature (1)..(180): Homolog of NCBI NO: 27808510 NR Description: At5g58240 [Arabidopsis thaliana]
  misc_feature (21)..(180): Homolog of NCBI NO: 8777325 NR Description: bis(5'-adenosyl)-triphosphatase-like protein
  misc_feature (26)..(178): Homolog of NCBI NO: 27542770 NR Description: ATPase-like protein [Sorghum bicolor]
  misc_feature (26)..(178): Homolog of NCBI NO: 37589828 NR Description: Unknown (protein for MGC:73176) [Danio rerio]
  misc_feature (30)..(179): Homolog of NCBI NO: 28828402 NR Description: similar to diadenosine tetraphosphatase
  misc_feature (30)..(171): Homolog of NCBI NO: 40738785 NR Description: hypothetical protein AN6189.2 [Aspergillus
  misc_feature (27)..(178): Homolog of NCBI NO: 4503719 NR Description: fragile histidine triad gene; bis(5'-adenosyl)-
  misc_feature (27)..(178): Homolog of NCBI NO: 11120730 NR Description: fragile histidine triad protein [Rattus >gi|9587672|gb|AAF89328.1|AF170064_1 fragile histidine triad
  misc_feature (12)..(177): Homolog of NCBI NO: 17556280 NR Description: Nitrilase and fragile histidine triad fusion
MLNLQVTGKTILSSIRCQRKMSSTCSSYAFGPYKIDPREVFYATPLSYAMVNLRPLLPAHVLVCPRRLVPRFTDLTADETSDLWLTAQKVGSKLETFHNASSLTLAIQDGPQAGQTVPHVHIHILPRKGGDFEKNDEIYDALDEKEKELKQKLDLDKDRVDRSIQEMADEASQYRSLFDC

SEQ ID NO: 98963 - protein, 160 aa, Arabidopsis thaliana
  peptide (1)..(160): Ceres Seq. ID no. 13601863
  misc_feature (1)..(160): Homolog of NCBI NO: 30697031 NR Description: bis(5'-adenosyl)-triphosphatase-related; also
  misc_feature (1)..(160): Homolog of NCBI NO: 27808510 NR Description: At5g58240 [Arabidopsis thaliana]
  misc_feature (1)..(160): Homolog of NCBI NO: 8777325 NR Description: bis(5'-adenosyl)-triphosphatase-like protein
  misc_feature (6)..(158): Homolog of NCBI NO: 27542770 NR Description: ATPase-like protein [Sorghum bicolor]
  misc_feature (6)..(158): Homolog of NCBI NO: 37589828 NR Description: Unknown (protein for MGC:73176) [Danio rerio]
  misc_feature (10)..(159): Homolog of NCBI NO: 28828402 NR Description: similar to diadenosine tetraphosphatase
  misc_feature (10)..(151): Homolog of NCBI NO: 40738785 NR Description: hypothetical protein AN6189.2 [Aspergillus
  misc_feature (7)..(158): Homolog of NCBI NO: 4503719 NR Description: fragile histidine triad gene; bis(5'-adenosyl)-
  misc_feature (7)..(158): Homolog of NCBI NO: 11120730 NR Description: fragile histidine triad protein [Rattus >gi|9587672|gb|AAF89328.1|AF170064_1 fragile histidine triad
  misc_feature (1)..(157): Homolog of NCBI NO: 17556280 NR Description: Nitrilase and fragile histidine triad fusion
MSSTCSSYAFGPYKIDPREVFYATPLSYAMVNLRPLLPAHVLVCPRRLVPRFTDLTADETSDLWLTAQKVGSKLETFHNASSLTLAIQDGPQAGQTVPHVHIHILPRKGGDFEKNDEIYDALDEKEKELKQKLDLDKDRVDRSIQEMADEASQYRSLFDC

SEQ ID NO: 98964 - DNA, 1645 bp, Arabidopsis thaliana
  misc_feature (1)..(1645): Ceres Seq. ID no. 13601864
  misc_feature: MA Experiment ID: 108462 Result: Up-regulated in Transcription
  misc_feature: MA Experiment 108462 PARAMETER Experiment Name: At_Germinating_Seeds_cDNA_P Parameter: Age (day) Value: 2 vs. 0
  misc_feature: MA Experiment 108462 PARAMETER Experiment Name: At_Germinating_Seeds_cDNA_P Parameter: Tissue Value: Germinating Seeds
  misc_feature: MA Experiment ID: 20000089 Result: Down-regulated in Transcription
  misc_feature: MA Experiment ID: 20000180 Result: Up-regulated in Transcription
  misc_feature: MA Experiment 20000180 PARAMETER Experiment Name: At_Germinating_Seeds_P Parameter: Age (hr) Value: 24 vs. 0
  misc_feature: MA Experiment 20000180 PARAMETER Experiment Name: At_Germinating_Seeds_P Parameter: Tissue Value: Germinating Seeds
  misc_feature: MA Experiment ID: 20000185 Result: Down-regulated in Transcription
  misc_feature: MA Experiment 20000185 PARAMETER Experiment Name: At_Roots__P Parameter: Age (day) Value: 7 vs. 21
  misc_feature: MA Experiment 20000185 PARAMETER Experiment Name: At_Roots__P Parameter: Organism Value: A. thaliana
  misc_feature: MA Experiment 20000185 PARAMETER Experiment Name: At_Roots__P Parameter: Tissue Value: Roots vs. Whole Plant
  misc_feature: MA Experiment ID: 20000227 Result: Down-regulated in Transcription
  misc_feature: MA Experiment 20000227 PARAMETER Experiment Name: At_Root-Tips-vs-Tops_P Parameter: Tissue Value: Root Tips vs. Root Tops
  misc_feature: MA Experiment ID: 20000438 Result: Up-regulated in Transcription
  misc_feature: MA Experiment 20000438 PARAMETER Experiment Name: At_Shoots__P Parameter: Age (day) Value: 14
  misc_feature: MA Experiment 20000438 PARAMETER Experiment Name: At_Shoots__P Parameter: Tissue Value: Shoots vs. Whole Plant
  misc_feature: MA Experiment ID: 20000439 Result: Down-regulated in Transcription
  misc_feature: MA Experiment 20000439 PARAMETER Experiment Name: At_Roots__P Parameter: Age (day) Value: 14 vs. 21
  misc_feature: MA Experiment 20000439 PARAMETER Experiment Name: At_Roots__P Parameter: Organism Value: A. thaliana
  misc_feature: MA Experiment 20000439 PARAMETER Experiment Name: At_Roots__P Parameter: Tissue Value: Roots vs. Whole Plant
  misc_feature: MA Experiment ID: 20001248 Result: Down-regulated in Transcription
  misc_feature: MA Experiment 20001248 PARAMETER Experiment Name: At_Far-red-induction_P Parameter: Age (day) Value: 7
  misc_feature: MA Experiment 20001248 PARAMETER Experiment Name: At_Far-red-induction_P Parameter: Light Value: Far-red vs. White
  misc_feature: MA Experiment 20001248 PARAMETER Experiment Name: At_Far-red-induction_P Parameter: Organism Value: A. thaliana
  misc_feature: MA Experiment 20001248 PARAMETER Experiment Name: At_Far-red-induction_P Parameter: Plant Line Value: Columbia
  misc_feature: MA Experiment 20001248 PARAMETER Experiment Name: At_Far-red-induction_P Parameter: Timepoint (hr) Value: 4
  misc_feature: MA Experiment 20001248 PARAMETER Experiment Name: At_Far-red-induction_P Parameter: Tissue Value: Whole Plant
  misc_feature: MA Experiment ID: 20001450 Result: Down-regulated in Transcription
  misc_feature: MA Experiment 20001450 PARAMETER Experiment Name: At_Far-red-induction_P Parameter: Age (day) Value: 7
  misc_feature: MA Experiment 20001450 PARAMETER Experiment Name: At_Far-red-induction_P Parameter: Light Value: Far-red vs. White
  misc_feature: MA Experiment 20001450 PARAMETER Experiment Name: At_Far-red-induction_P Parameter: Organism Value: A. thaliana
  misc_feature: MA Experiment 20001450 PARAMETER Experiment Name: At_Far-red-induction_P Parameter: Plant Line Value: Columbia
  misc_feature: MA Experiment 20001450 PARAMETER Experiment Name: At_Far-red-induction_P Parameter: Timepoint (hr) Value: 8
  misc_feature: MA Experiment 20001450 PARAMETER Experiment Name: At_Far-red-induction_P Parameter: Tissue Value: Whole Plant
actctgtcgcttggcgcgctctctctccatagttccagttctgaaatctcactttcacagtttgtgtctgtgcgataatggccatggcagagctctcaacccccaaaacgacgtcgccttttctcaactcttcgtctcggcttcgtctctcttcaaaattgcacctttcaaaccactttcgccatcttcttcttccacctctccacacaacaactcccaactccaaaatctcttgctccgtttctcaaaatagccaagctcctgttgctgtgcaagaaaatggattggtgaagacgaagaaagagtgttatggagtgttctgcctcacctatgatcttaaagctgaagaagagacaagatcatggaagaagttaattaatattgcagtttcaggtgctgcaggaatgatttctaaccatcttctcttcaaacttgcttcaggggaagtatttggtccagatcaacccattgcattgaaactgctaggatcagagagatcaattcaagctcttgaaggtgttgcaatggaactggaggattcattgttcccattgttgagagaagttgatataggaacagatccaaatgaagtgttccaagatgtggagtgggctattctgattggagcaaaacctcgaggccctggaatggaacgtgctgacttgttggacatcaatggccaaatctttgctgagcagggcaaagctctgaacaaagctgcctctcctaacgtcaaggttcttgtagtgggaaacccttgcaacaccaatgccttgatttgtcttaaaaatgctcccaacattcctgcaaagaacttccatgccctcacgaggttagacgaaaatcgtgccaaatgccagcttgctcttaaagccggtgttttctatgacaaagtgtctaatatgaccatatggggaaatcactccacgactcaggtgccagacttcttaaatgccagaattaatggcctgcctgtgaaggaggttattacagatcacaaatggttagaagagggattcactgagagtgtgcagaagagaggtgggttattaattcagaaatggggtcgatcttctgctgcttctactgctgtttccattgttgatgctataaagtctcttgtaactcctactcctgagggtgattggttttcgactggggtgtacacggatggaaatccttatggtattgaagagggccttgtcttcagtatgccatgccggtcgaagggagatggagattatgaacttgtcaaggatgtagaaattgatgactaccttcgccaacgaatcgccaagtcggaagcggaactgttggctgagaagagatgtgttgcacacctcactggagagggcattgcctactgtgatcttggtccggtagatactatgcttcctggggaagtttgatttttgcaggacgttgaacatctcaagtaagcattctcttccgggttgttagctgtacagagcacagccacattacttatgattattgttcagaataagaaaatgaaactcttatttcttatttacatgcatctgtatgtgatttttcttgagcaatgctccaaaagtcatatacagtagtatttgtaaacacttgaaacgtttctatgctttattccagtttcagaactcaaact

SEQ ID NO: 98965 - protein, 443 aa, Arabidopsis thaliana; identical to SEQ ID NO: 25547
  peptide (1)..(443): Ceres Seq. ID no. 13601865
  misc_feature (251)..(423): Pfam Name: lactate/malate dehydrogenase, alpha/beta Pfam Description: lactate/malate dehydrogenase, alpha/beta
  misc_feature (1)..(443): Homolog of NCBI NO: 30697049 NR Description: malate dehydrogenase [NADP], chloroplast, putative
  misc_feature (1)..(443): Homolog of NCBI NO: 18377751 NR Description: putative NADP-dependent malate dehydrogenase
  misc_feature (1)..(443): Homolog of NCBI NO: 30697051 NR Description: malate dehydrogenase [NADP], chloroplast, putative
  misc_feature (3)..(443): Homolog of NCBI NO: 21554349 NR Description: NADP-dependent malate dehydrogenase [Arabidopsis
  misc_feature (1)..(443): Homolog of NCBI NO: 11133370 NR Description: Malate dehydrogenase [NADP], chloroplast (NADP- MDH) >gi|2827076|gb|AAB99753.1| malate dehydrogenase
  misc_feature (1)..(443): Homolog of NCBI NO: 462579 NR Description: Malate dehydrogenase [NADP], chloroplast (NADP- MDH) >gi|481222|pir||S38346 malate dehydrogenase (NADP)
  misc_feature (1)..(443): Homolog of NCBI NO: 462578 NR Description: Malate dehydrogenase [NADP], chloroplast
  misc_feature (7)..(443): Homolog of NCBI NO: 1170895 NR Description: Malate dehydrogenase [NADP], chloroplast
  misc_feature (45)..(443): Homolog of NCBI NO: 726334 NR Description: NADP-malate dehydrogenase
  misc_feature (52)..(443): Homolog of NCBI NO: 7546191 NR Description: Chain A, Chloroplast Nadp-Dependent Malate

SEQ ID NO: 98966 - protein, 441 aa, Arabidopsis thaliana; identical to SEQ ID NO: 25548
  peptide (1)..(441): Ceres Seq. ID no. 13601866
  misc_feature (249)..(421): Pfam Name: lactate/malate dehydrogenase, alpha/beta Pfam Description: lactate/malate dehydrogenase, alpha/beta
  misc_feature (1)..(441): Homolog of NCBI NO: 30697049 NR Description: malate dehydrogenase [NADP], chloroplast, putative
  misc_feature (1)..(441): Homolog of NCBI NO: 18377751 NR Description: putative NADP-dependent malate dehydrogenase
  misc_feature (1)..(441): Homolog of NCBI NO: 30697051 NR Description: malate dehydrogenase [NADP], chloroplast, putative
  misc_feature (1)..(441): Homolog of NCBI NO: 21554349 NR Description: NADP-dependent malate dehydrogenase [Arabidopsis
  misc_feature (1)..(441): Homolog of NCBI NO: 11133370 NR Description: Malate dehydrogenase [NADP], chloroplast (NADP- MDH) >gi|2827076|gb|AAB99753.1| malate dehydrogenase
  misc_feature (1)..(441): Homolog of NCBI NO: 462579 NR Description: Malate dehydrogenase [NADP], chloroplast (NADP- MDH) >gi|481222|pir||S38346 malate dehydrogenase (NADP)
  misc_feature (1)..(441): Homolog of NCBI NO: 462578 NR Description: Malate dehydrogenase [NADP], chloroplast
  misc_feature (5)..(441): Homolog of NCBI NO: 1170895 NR Description: Malate dehydrogenase [NADP], chloroplast
  misc_feature (43)..(441): Homolog of NCBI NO: 726334 NR Description: NADP-malate dehydrogenase
  misc_feature (50)..(441): Homolog of NCBI NO: 7546191 NR Description: Chain A, Chloroplast Nadp-Dependent Malate

SEQ ID NO: 98967 - protein, 334 aa, Arabidopsis thaliana; identical to SEQ ID NO: 25549
  peptide (1)..(334): Ceres Seq. ID no. 13601867
  misc_feature (142)..(314): Pfam Name: lactate/malate dehydrogenase, alpha/beta Pfam Description: lactate/malate dehydrogenase, alpha/beta
  misc_feature (1)..(334): Homolog of NCBI NO: 30697049 NR Description: malate dehydrogenase [NADP], chloroplast, putative
  misc_feature (1)..(334): Homolog of NCBI NO: 18377751 NR Description: putative NADP-dependent malate dehydrogenase
  misc_feature (1)..(334): Homolog of NCBI NO: 30697051 NR Description: malate dehydrogenase [NADP], chloroplast, putative
  misc_feature (1)..(334): Homolog of NCBI NO: 21554349 NR Description: NADP-dependent malate dehydrogenase [Arabidopsis
  misc_feature (1)..(334): Homolog of NCBI NO: 11133370 NR Description: Malate dehydrogenase [NADP], chloroplast (NADP- MDH) >gi|2827076|gb|AAB99753.1| malate dehydrogenase
  misc_feature (1)..(334): Homolog of NCBI NO: 462579 NR Description: Malate dehydrogenase [NADP], chloroplast (NADP- MDH) >gi|481222|pir||S38346 malate dehydrogenase (NADP)
  misc_feature (1)..(334): Homolog of NCBI NO: 462578 NR Description: Malate dehydrogenase [NADP], chloroplast
  misc_feature (1)..(334): Homolog of NCBI NO: 1170895 NR Description: Malate dehydrogenase [NADP], chloroplast
  misc_feature (1)..(334): Homolog of NCBI NO: 726334 NR Description: NADP-malate dehydrogenase
  misc_feature (1)..(334): Homolog of NCBI NO: 7546191 NR Description: Chain A, Chloroplast Nadp-Dependent Malate

SEQ ID NO: 98968 - DNA, 786 bp, Arabidopsis thaliana
  misc_feature (1)..(786): Ceres Seq. ID no. 13601868
  misc_feature: MA Experiment ID: 20000182 Result: Up-regulated in Transcription
  misc_feature: MA Experiment 20000182 PARAMETER Experiment Name: At_2mM_SA_P Parameter: Age (day) Value: 14
  misc_feature: MA Experiment 20000182 PARAMETER Experiment Name: At_2mM_SA_P Parameter: Organism Value: A. thaliana
  misc_feature: MA Experiment 20000182 PARAMETER Experiment Name: At_2mM_SA_P Parameter: Plant Line Value: WS
  misc_feature: MA Experiment 20000182 PARAMETER Experiment Name: At_2mM_SA_P Parameter: Timepoint (hr) Value: 6
  misc_feature: MA Experiment 20000182 PARAMETER Experiment Name: At_2mM_SA_P Parameter: Tissue Value: Aerial
  misc_feature: MA Experiment 20000182 PARAMETER Experiment Name: At_2mM_SA_P Parameter: Treatment Value: 2mM SA vs. No Treatment
  misc_feature: MA Experiment ID: 20000436 Result: Up-regulated in Transcription
  misc_feature: MA Experiment 20000436 PARAMETER Experiment Name: At_Drought_P Parameter: Age (day) Value: 7
  misc_feature: MA Experiment 20000436 PARAMETER Experiment Name: At_Drought_P Parameter: Organism Value: A. thaliana
  misc_feature: MA Experiment 20000436 PARAMETER Experiment Name: At_Drought_P Parameter: Plant Line Value: WS
  misc_feature: MA Experiment 20000436 PARAMETER Experiment Name: At_Drought_P Parameter: Timepoint (hr) Value: 12
  misc_feature: MA Experiment 20000436 PARAMETER Experiment Name: At_Drought_P Parameter: Tissue Value: Whole Plant
  misc_feature: MA Experiment 20000436 PARAMETER Experiment Name: At_Drought_P Parameter: Treatment Value: Drought vs. No Drought
  misc_feature: MA Experiment ID: 20000437 Result: Up-regulated in Transcription
  misc_feature: MA Experiment 20000437 PARAMETER Experiment Name: At_Drought_P Parameter: Age (day) Value: 8
  misc_feature: MA Experiment 20000437 PARAMETER Experiment Name: At_Drought_P Parameter: Organism Value: A. thaliana
  misc_feature: MA Experiment 20000437 PARAMETER Experiment Name: At_Drought_P Parameter: Plant Line Value: WS
  misc_feature: MA Experiment 20000437 PARAMETER Experiment Name: At_Drought_P Parameter: Timepoint (hr) Value: 24
  misc_feature: MA Experiment 20000437 PARAMETER Experiment Name: At_Drought_P Parameter: Tissue Value: Whole Plant
  misc_feature: MA Experiment 20000437 PARAMETER Experiment Name: At_Drought_P Parameter: Treatment Value: Drought vs. No Drought
  misc_feature: MA Experiment ID: 20000438 Result: Down-regulated in Transcription
  misc_feature: MA Experiment 20000438 PARAMETER Experiment Name: At_Shoots__P Parameter: Age (day) Value: 14
  misc_feature: MA Experiment 20000438 PARAMETER Experiment Name: At_Shoots__P Parameter: Tissue Value: Shoots vs. Whole Plant
  misc_feature: MA Experiment ID: 20000439 Result: Up-regulated in Transcription
  misc_feature: MA Experiment 20000439 PARAMETER Experiment Name: At_Roots__P Parameter: Age (day) Value: 14 vs. 21
  misc_feature: MA Experiment 20000439 PARAMETER Experiment Name: At_Roots__P Parameter: Organism Value: A. thaliana
  misc_feature: MA Experiment 20000439 PARAMETER Experiment Name: At_Roots__P Parameter: Tissue Value: Roots vs. Whole Plant
  misc_feature: MA Experiment ID: 20000709 Result: Up-regulated in Transcription
  misc_feature: MA Experiment 20000709 PARAMETER Experiment Name: At_15mM_NH4NO3_L-to-H_P Parameter: Age (hr) Value: 14
  misc_feature: MA Experiment 20000709 PARAMETER Experiment Name: At_15mM_NH4NO3_L-to-H_P Parameter: Organism Value: A. thaliana
  misc_feature: MA Experiment 20000709 PARAMETER Experiment Name: At_15mM_NH4NO3_L-to-H_P Parameter: Plant Line Value: WS
  misc_feature: MA Experiment 20000709 PARAMETER Experiment Name: At_15mM_NH4NO3_L-to-H_P Parameter: Timepoint (hr) Value: 4
  misc_feature: MA Experiment 20000709 PARAMETER Experiment Name: At_15mM_NH4NO3_L-to-H_P Parameter: Tissue Value: Aerial
  misc_feature: MA Experiment 20000709 PARAMETER Experiment Name: At_15mM_NH4NO3_L-to-H_P Parameter: Treatment Value: 15mM NH4NO3 vs. 30mM Mannitol
  misc_feature: MA Experiment ID: 20001905 Result: Up-regulated in Transcription
  misc_feature: MA Experiment 20001905 PARAMETER Experiment Name: At_Drought_Reproduction_P Parameter: Age (day) Value: 40
  misc_feature: MA Experiment 20001905 PARAMETER Experiment Name: At_Drought_Reproduction_P Parameter: Organism Value: A. thaliana
  misc_feature: MA Experiment 20001905 PARAMETER Experiment Name: At_Drought_Reproduction_P Parameter: Plant Line Value: WS
  misc_feature: MA Experiment 20001905 PARAMETER Experiment Name: At_Drought_Reproduction_P Parameter: Timepoint (day) Value: 10
  misc_feature: MA Experiment 20001905 PARAMETER Experiment Name: At_Drought_Reproduction_P Parameter: Tissue Value: Rosettes
  misc_feature: MA Experiment 20001905 PARAMETER Experiment Name: At_Drought_Reproduction_P Parameter: Treatment Value: Drought vs. No Drought
acaagtttgtcggatcaatccattttaactccgatccatgactacgactaggcggaaaaatacacattggtgtcatacttgtagacgaggaatccatcttcaaggagaaggcagaagagaaggagcttgcatttactgtggtaacacctttcttgaaaggctatatgagaatgttgaactaagcccttttgatttattcggattagcctacgaagaagctcgtaaccgtcgcaacaacagaagatcggttataggagaacaactaagttttgaagagttgtttaaccggctcccagcactacaagaccgtcgtggtcctcctccagcatcactagccgcgattaactcattgcaaaagatcaaaatcaggcagaagcatctcggtttagatccctattgtccggtttgccaagaccagtttgaaatcggatcagatgcaagaaaaatgccgtgtaaacatatctaccattctgaatgtatactcccgtggttagtccagcgtaatacttgccccgtctgccgcaaagaacttccacaagaccgaaataatagccggaaaaatccattgtggcatctgtggccgttcaggtcctctggtttggcctcaaaccataatggatcatcacctttccattgagatgctagcttttgaatcaatccatgtgcatgtacgtagtatatgatgatattttatttttccatgataaaatgttgcttttttcaatatattggcatgtacaaaagggttttgtagtcttattaatgtatgaaaaatattgtttatct

SEQ ID NO: 98969 - protein, 199 aa, Arabidopsis thaliana
  peptide (1)..(199): Ceres Seq. ID no. 13601869
  misc_feature (121)..(161): Pfam Name: Zinc finger, C3HC4 type (RING finger) Pfam Description: Zinc finger, C3HC4 type (RING finger)
  misc_feature (1)..(199): Homolog of NCBI NO: 22655083 NR Description: putative RING zinc finger protein [Arabidopsis >gi|27311973|gb|AAO00952.1| putative RING zinc finger protein
  misc_feature (1)..(183): Homolog of NCBI NO: 15228375 NR Description: zinc finger (C3HC4-type RING finger) protein [Arabidopsis thaliana] >gi|6630549|gb|AAF19568.1|AC011708_11
  misc_feature (79)..(193): Homolog of NCBI NO: 18405518 NR Description: RING-H2 finger protein (RHC1a) [Arabidopsis
  misc_feature (7)..(54): Homolog of NCBI NO: 18405518 NR Description: RING-H2 finger protein (RHC1a) [Arabidopsis
  misc_feature (63)..(189): Homolog of NCBI NO: 34908968 NR Description: P0003D09.21 [Oryza sativa (japonica
  misc_feature (79)..(172): Homolog of NCBI NO: 18410530 NR Description: expressed protein [Arabidopsis thaliana] unknown protein [Arabidopsis thaliana]
  misc_feature (60)..(184): Homolog of NCBI NO: 15219060 NR Description: hypothetical protein [Arabidopsis thaliana]
  misc_feature (78)..(173): Homolog of NCBI NO: 14719329 NR Description: putative RING-H2 finger protein [Oryza sativa]
  misc_feature (78)..(172): Homolog of NCBI NO: 34906008 NR Description: putative RING-H2 finger protein RHC2a [Oryza
  misc_feature (78)..(175): Homolog of NCBI NO: 18424254 NR Description: expressed protein [Arabidopsis thaliana] AT5g59550/f2o15_210 [Arabidopsis thaliana]
MTTTRRKNTHWCHTCRRGIHLQGEGRREGACIYCGNTFLERLYENVELSPFDLFGLAYEEARNRRNNRRSVIGEQLSFEELFNRLPALQDRRGPPPASLAAINSLQKIKIRQKHLGLDPYCPVCQDQFEIGSDARKMPCKHIYHSECILPWLVQRNTCPVCRKELPQDRNNSRKNPLWHLWPFRSSGLASNHNGSSPFH

SEQ ID NO: 98970 - DNA, 999 bp, Arabidopsis thaliana
  misc_feature (1)..(999): Ceres Seq. ID no. 13601874
  misc_feature: MA Experiment ID: 108461 Result: Up-regulated in Transcription
  misc_feature: MA Experiment 108461 PARAMETER Experiment Name: At_Germinating_Seeds_cDNA_P Parameter: Age (day) Value: 1 vs. 0
  misc_feature: MA Experiment 108461 PARAMETER Experiment Name: At_Germinating_Seeds_cDNA_P Parameter: Tissue Value: Germinating Seeds
  misc_feature: MA Experiment ID: 108463 Result: Up-regulated in Transcription
  misc_feature: MA Experiment 108463 PARAMETER Experiment Name: At_Germinating_Seeds_cDNA_P Parameter: Age (day) Value: 3 vs. 0
  misc_feature: MA Experiment 108463 PARAMETER Experiment Name: At_Germinating_Seeds_cDNA_P Parameter: Tissue Value: Germinating Seeds
  misc_feature: MA Experiment ID: 108585 Result: Down-regulated in Transcription
  misc_feature: MA Experiment 108585 PARAMETER Experiment Name: At_5mM_NaNP_cDNA_P Parameter: Timepoint (hr) Value: 6
  misc_feature: MA Experiment 108585 PARAMETER Experiment Name: At_5mM_NaNP_cDNA_P Parameter: Tissue Value: Aerial
  misc_feature: MA Experiment 108585 PARAMETER Experiment Name: At_5mM_NaNP_cDNA_P Parameter: Treatment Value: null
  misc_feature: MA Experiment ID: 20001905 Result: Down-regulated in Transcription
  misc_feature: MA Experiment 20001905 PARAMETER Experiment Name: At_Drought_Reproduction_P Parameter: Age (day) Value: 40
  misc_feature: MA Experiment 20001905 PARAMETER Experiment Name: At_Drought_Reproduction_P Parameter: Organism Value: A. thaliana
  misc_feature: MA Experiment 20001905 PARAMETER Experiment Name: At_Drought_Reproduction_P Parameter: Plant Line Value: WS
  misc_feature: MA Experiment 20001905 PARAMETER Experiment Name: At_Drought_Reproduction_P Parameter: Timepoint (day) Value: 10
  misc_feature: MA Experiment 20001905 PARAMETER Experiment Name: At_Drought_Reproduction_P Parameter: Tissue Value: Rosettes
  misc_feature: MA Experiment 20001905 PARAMETER Experiment Name: At_Drought_Reproduction_P Parameter: Treatment Value: Drought vs. No Drought
gaggagaaggacgatcgatctaaggagacgatgaagatcttccacgttccttgtctgcaagacaactactcttatctgataatcgatgagagcaccggagacgcggcggttgtggatccagttgatccggagaaggtgatcgcatcggctgagaagcaccaagctaagatcaagttcgtactcactacgcatcatcactgggatcatgccggtggaaacgagaagattaagcagttggttcctgatatcaaagtatatggaggttctctggataaggtgaagggttgcactgatgcggttgataatggtgacaagctgactttgggtcaggatattaacatattggctctccacactccttgtcacaccaagggtcacattagttattatgtgaacggaaaagaaggagaaaacccagccgtgttcaccggagatacactttttgttgctggatgtgggaagttttttgaagggacagctgagcagatgtatcagtcgttgtgtgtgactctggctgcattacctaaaccgacacaggtttactgcggccatgagtacaccgttaagaacttggaatttgctctaactgtggaaccaaacaacgggaagatacaacagaagttagcatgggcccgtcaacagcgccaagcagatcttcccacaatcccttcaacactggaggaagagctcgaaacaaatccatttatgcgtgttgataagccagagatacaggagaaactcggttgcaagtcgccaattgatacaatgagggaagttcggaacaagaaggatcagtggaggggatgatgataaatggagagcttcttgcctatgttttgtgtacttgtgttgaatgatcctgtaaaaggtgtatgaaccagtaatgttgatattctgtgtgaaactgtgaaccggtttggtaaaccgaaatcagaccgacctgtaagccgtactccctttttgaattttcagtttactatggataataatttcagtgtc

SEQ ID NO: 98971 - protein, 268 aa, Arabidopsis thaliana
  peptide (1)..(268): Ceres Seq. ID no. 13601875
  misc_feature (21)..(184): Pfam Name: Metallo-beta-lactamase superfamily Pfam Description: Metallo-beta-lactamase superfamily
  misc_feature (11)..(268): Homolog of NCBI NO: 15228389 NR Description: glyoxalase II (hydroxyacylglutathione [Arabidopsis thaliana] >gi|3913733|sp|O24496|GL2C_ARATH hydrolase cytoplasmic (Glyoxalase II) (Glx II)
  misc_feature (11)..(268): Homolog of NCBI NO: 2570342 NR Description: glyoxalase II cytoplasmic isozyme [Arabidopsis
  misc_feature (11)..(267): Homolog of NCBI NO: 21729786 NR Description: hydroxyacyl glutathione hydrolase; glyoxylase 2; II; round spermatid protein RSP29 [Mus musculus] Hydroxyacylglutathione hydrolase (Glyoxalase II) (Glx II)
  misc_feature (11)..(267): Homolog of NCBI NO: 15375320 NR Description: hydroxyacyl glutathione hydrolase; glyoxalase II; spermatid protein RSP29 [Rattus norvegicus] Hydroxyacylglutathione hydrolase (Glyoxalase II) (Glx II) (Round
  misc_feature (11)..(267): Homolog of NCBI NO: 4885389 NR Description: hydroxyacyl glutathione hydrolase; hydroxyacyl hydrolase; glyoxalase 2; Hydroxyacyl glutathione hydrolase; II; hydroxyacylglutathione hydroxylase [Homo sapiens]
  misc_feature (11)..(267): Homolog of NCBI NO: 2494848 NR Description: Hydroxyacylglutathione hydrolase (Glyoxalase II) II) (Germ cell specific protein) >gi|1167481|emb|CAA64612.1| ORF
  misc_feature (4)..(267): Homolog of NCBI NO: 21356335 NR Description: CG4365-PA [Drosophila melanogaster]
  misc_feature (4)..(267): Homolog of NCBI NO: 24667711 NR Description: CG4365-PB [Drosophila melanogaster]
  misc_feature (4)..(267): Homolog of NCBI NO: 24667703 NR Description: CG4365-PC [Drosophila melanogaster]
  misc_feature (11)..(266): Homolog of NCBI NO: 29841459 NR Description: similar to probable hydroxyacylglutathione
EEKDDRSKETMKIFHVPCLQDNYSYLIIDESTGDAAVVDPVDPEKVIASAEKHQAKIKFVLTTHHHWDHAGGNEKIKQLVPDIKVYGGSLDKVKGCTDAVDNGDKLTLGQDINILALHTPCHTKGHISYYVNGKEGENPAVFTGDTLFVAGCGKFFEGTAEQMYQSLCVTLAALPKPTQVYCGHEYTVKNLEFALTVEPNNGKIQQKLAWARQQRQADLPTIPSTLEEELETNPFMRVDKPEIQEKLGCKSPIDTMREVRNKKDQWRG

SEQ ID NO: 98972 - protein, 258 aa, Arabidopsis thaliana; identical to SEQ ID NO: 29515
  peptide (1)..(258): Ceres Seq. ID no. 13601876
  misc_feature (11)..(174): Pfam Name: Metallo-beta-lactamase superfamily Pfam Description: Metallo-beta-lactamase superfamily
  misc_feature (1)..(258): Homolog of NCBI NO: 15228389 NR Description: glyoxalase II (hydroxyacylglutathione [Arabidopsis thaliana] >gi|3913733|sp|O24496|GL2C_ARATH hydrolase cytoplasmic (Glyoxalase II) (Glx II)
  misc_feature (1)..(258): Homolog of NCBI NO: 2570342 NR Description: glyoxalase II cytoplasmic isozyme [Arabidopsis
  misc_feature (1)..(257): Homolog of NCBI NO: 21729786 NR Description: hydroxyacyl glutathione hydrolase; glyoxylase 2; II; round spermatid protein RSP29 [Mus musculus] Hydroxyacylglutathione hydrolase (Glyoxalase II) (Glx II)
  misc_feature (1)..(257): Homolog of NCBI NO: 15375320 NR Description: hydroxyacyl glutathione hydrolase; glyoxalase II; spermatid protein RSP29 [Rattus norvegicus] Hydroxyacylglutathione hydrolase (Glyoxalase II) (Glx II) (Round
  misc_feature (1)..(257): Homolog of NCBI NO: 4885389 NR Description: hydroxyacyl glutathione hydrolase; hydroxyacyl hydrolase; glyoxalase 2; Hydroxyacyl glutathione hydrolase; II; hydroxyacylglutathione hydroxylase [Homo sapiens]
  misc_feature (1)..(257): Homolog of NCBI NO: 2494848 NR Description: Hydroxyacylglutathione hydrolase (Glyoxalase II) II) (Germ cell specific protein) >gi|1167481|emb|CAA64612.1| ORF
  misc_feature (1)..(257): Homolog of NCBI NO: 21356335 NR Description: CG4365-PA [Drosophila melanogaster]
  misc_feature (1)..(257): Homolog of NCBI NO: 24667703 NR Description: CG4365-PC [Drosophila melanogaster]
  misc_feature (1)..(257): Homolog of NCBI NO: 24667711 NR Description: CG4365-PB [Drosophila melanogaster]
  misc_feature (1)..(256): Homolog of NCBI NO: 29841459 NR Description: similar to probable hydroxyacylglutathione

SEQ ID NO: 98973 - DNA, 1067 bp, Arabidopsis thaliana
  misc_feature (1)..(1067): Ceres Seq. ID no. 13601877
  misc_feature: MA Experiment ID: 108573 Result: Up-regulated in Transcription
  misc_feature: MA Experiment 108573 PARAMETER Experiment Name: At_Drought_cDNA_P Parameter: Timepoint (hr) Value: 6
  misc_feature: MA Experiment 108573 PARAMETER Experiment Name: At_Drought_cDNA_P Parameter: Tissue Value: Aerial
  misc_feature: MA Experiment 108573 PARAMETER Experiment Name: At_Drought_cDNA_P Parameter: Treatment Value: Drought vs. No Drought
aaagaaatgaagaaagttgactagaaacggagaatttccaaatgttgaatttgttggatgcatgtgaaagccaattctatttggttcctccttgataatccacccaatcgctgtcattctcccatcaatctagctgctttcacaaaccattgtactgagatcgtatctttaaggtaaatttcaaatcggagtcggcgagatcgaaataggaacctggaagtcggagaatttgtgtaaattcggttttttttttttaattctccgatggatagtttaagtgatatcgatggtgatttcgatggaagaaatgaaggaggatcgtcatcggattatcgattgttgggtcggcagattacggttcatcagttcatgggtggtggcaaagctgctgacttgctcttatggaggaggcgacatctttctttgggggttatcattatatcaactgtagcctggcttatattcgagttttccgggttgcctttcttatctgtttcttcggatgtcttactcatcgtgatcatgatatcattcgttcatgcccgggtttctgcttttaggaatagacagttgcattcgttgccagagcttgttctatcagaggaaatggtgaatagtgctgcagcttctttccgtataaaactcaatcacttgcttgtaatggctcatgatgtcacagttggcaacgattttcgactcttcttcaaggtggtgatttgtctgtggcttctctctgccattggtagctatatatctctctgcactcttctttacatcgggaccatcctatctgtaacaataccggctttgtacagtaaatatcaaagcaaagtagacaagtgttgcgggacgattcacaggcggttgtctcaccactacaaaatagtagacgaaaatgttataagcagactctcatggagcttatccaaggataaagattcatgagcttaactttggtgattctgagaatgcttttacttgtttttgtttagcttttcttgttattcaccatttgtagtataactaaacgccatatccagaatgaatataagatggtttctttgttc

SEQ ID NO: 98974 - protein, 226 aa, Arabidopsis thaliana; identical to SEQ ID NO: 41512
  peptide (1)..(226): Ceres Seq. ID no. 13601878
  misc_feature (1)..(226): Homolog of NCBI NO: 26450318 NR Description: unknown protein [Arabidopsis thaliana]
  misc_feature (26)..(226): Homolog of NCBI NO: 30681541 NR Description: reticulon family [Arabidopsis thaliana]
  misc_feature (31)..(224): Homolog of NCBI NO: 38345298 NR Description: OSJNBa0043A12.26 [Oryza sativa (japonica
  misc_feature (3)..(222): Homolog of NCBI NO: 15222616 NR Description: expressed protein [Arabidopsis thaliana] F22C12.15 [Arabidopsis thaliana] >gi|17381218|gb|AAL36421.1| protein [Arabidopsis thaliana] >gi|21436435|gb|AAM51418.1|
  misc_feature (2)..(225): Homolog of NCBI NO: 15238125 NR Description: expressed protein [Arabidopsis thaliana] contains similarity to 24 kDa seed maturation [Arabidopsis thaliana] >gi|14334530|gb|AAK59673.1| unknown
  misc_feature (12)..(224): Homolog of NCBI NO: 21592845 NR Description: unknown [Arabidopsis thaliana]
  misc_feature (20)..(224): Homolog of NCBI NO: 15236556 NR Description: expressed protein [Arabidopsis thaliana]
  misc_feature (2)..(224): Homolog of NCBI NO: 15237093 NR Description: expressed protein [Arabidopsis thaliana]
  misc_feature (23)..(224): Homolog of NCBI NO: 34904202 NR Description: P0492F05.25 [Oryza sativa (japonica
  misc_feature (3)..(224): Homolog of NCBI NO: 34909318 NR Description: OSJNBb0021A09.5 [Oryza sativa (japonica

SEQ ID NO: 98975 - protein, 191 aa, Arabidopsis thaliana; identical to SEQ ID NO: 41513
  peptide (1)..(191): Ceres Seq. ID no. 13601879
  misc_feature (1)..(191): Homolog of NCBI NO: 26450318 NR Description: unknown protein [Arabidopsis thaliana]
  misc_feature (1)..(191): Homolog of NCBI NO: 30681541 NR Description: reticulon family [Arabidopsis thaliana]
  misc_feature (1)..(189): Homolog of NCBI NO: 38345298 NR Description: OSJNBa0043A12.26 [Oryza sativa (japonica
  misc_feature (1)..(187): Homolog of NCBI NO: 15222616 NR Description: expressed protein [Arabidopsis thaliana] F22C12.15 [Arabidopsis thaliana] >gi|17381218|gb|AAL36421.1| protein [Arabidopsis thaliana] >gi|21436435|gb|AAM51418.1|
  misc_feature (1)..(190): Homolog of NCBI NO: 15238125 NR Description: expressed protein [Arabidopsis thaliana] contains similarity to 24 kDa seed maturation [Arabidopsis thaliana] >gi|14334530|gb|AAK59673.1| unknown
  misc_feature (1)..(189): Homolog of NCBI NO: 21592845 NR Description: unknown [Arabidopsis thaliana]
  misc_feature (1)..(189): Homolog of NCBI NO: 15236556 NR Description: expressed protein [Arabidopsis thaliana]
  misc_feature (1)..(189): Homolog of NCBI NO: 15237093 NR Description: expressed protein [Arabidopsis thaliana]
  misc_feature (1)..(189): Homolog of NCBI NO: 34904202 NR Description: P0492F05.25 [Oryza sativa (japonica
  misc_feature (1)..(189): Homolog of NCBI NO: 34909318 NR Description: OSJNBb0021A09.5 [Oryza sativa (japonica

SEQ ID NO: 98976 - protein, 140 aa, Arabidopsis thaliana; identical to SEQ ID NO: 41514
  peptide (1)..(140): Ceres Seq. ID no. 13601880
  misc_feature (1)..(140): Homolog of NCBI NO: 26450318 NR Description: unknown protein [Arabidopsis thaliana]
  misc_feature (1)..(140): Homolog of NCBI NO: 30681541 NR Description: reticulon family [Arabidopsis thaliana]
  misc_feature (1)..(138): Homolog of NCBI NO: 38345298 NR Description: OSJNBa0043A12.26 [Oryza sativa (japonica
  misc_feature (1)..(136): Homolog of NCBI NO: 15222616 NR Description: expressed protein [Arabidopsis thaliana] F22C12.15 [Arabidopsis thaliana] >gi|17381218|gb|AAL36421.1| protein [Arabidopsis thaliana] >gi|21436435|gb|AAM51418.1|
  misc_feature (1)..(139): Homolog of NCBI NO: 15238125 NR Description: expressed protein [Arabidopsis thaliana] contains similarity to 24 kDa seed maturation [Arabidopsis thaliana] >gi|14334530|gb|AAK59673.1| unknown
  misc_feature (1)..(138): Homolog of NCBI NO: 21592845 NR Description: unknown [Arabidopsis thaliana]
  misc_feature (1)..(138): Homolog of NCBI NO: 15236556 NR Description: expressed protein [Arabidopsis thaliana]
  misc_feature (1)..(138): Homolog of NCBI NO: 15237093 NR Description: expressed protein [Arabidopsis thaliana]
  misc_feature (1)..(138): Homolog of NCBI NO: 34904202 NR Description: P0492F05.25 [Oryza sativa (japonica
  misc_feature (1)..(138): Homolog of NCBI NO: 34909318 NR Description: OSJNBb0021A09.5 [Oryza sativa (japonica

SEQ ID NO: 98977 - DNA, 930 bp, Arabidopsis thaliana
  misc_feature (1)..(930): Ceres Seq. ID no. 13601881
  misc_feature: MA Experiment ID: 108595 Result: Down-regulated in Transcription
  misc_feature: MA Experiment 108595 PARAMETER Experiment Name: At_Ler-pi_Ovule_cDNA_P Parameter: Plant Line Value: null
gcgaccactagaaggagaaacaaatcttcattccaacaatggcgattcgttgtgtagcgagtagaaaaaccctagccggcttgaaggagacatcatcgaggctattgaggatcagagggattcagacttttacgcttcctgatcttccttacgattatggcgcattggaaccggccattagtggagagatcatgcagattcatcaccagaagcatcaccaggcttatgttactaattacaataatgctcttgagcagcttgatcaagctgtgaacaagggagatgcttccactgttgttaagttgcagagcgccatcaaattcaacggcggaggtcatgtcaaccattcgattttctggaagaaccttgctccttccagtgaaggtggtggagagccaccaaaaggatctcttggtagtgccattgacgctcactttggctcccttgaaggtctggtgaaaaagatgagtgctgagggtgctgcagtgcaaggctcaggatgggtgtggctcggactagacaaagaactgaagaagctagttgttgacacaactgccaatcaggatccattagtgacaaaaggaggaagcttggtacctctggtgggtatagatgtttgggagcacgcctactacttgcagtacaaaaatgtgaggcctgagtatctgaagaatgtatggaaagtgatcaactggaaatatgcaagcgaggtttatgagaaggaaaacaactgaatcgtttacacgatgacataaggagatgaaccagttccagctcagcttttgttttaaggttgtctgaaacaaacttacagtgtctctttggtttttaagatttgctcaactcagctgtgtggtacgttgttttacaatgaaagttttcaagaataaaaatttgctattattgtcagaaagcgctattgtttattct

SEQ ID NO: 98978 - protein, 231 aa, Arabidopsis thaliana; identical to SEQ ID NO: 29575
  peptide (1)..(231): Ceres Seq. ID no. 13601882
  misc_feature (1)..(231): Homolog of NCBI NO: 15228407 NR Description: manganese superoxide dismutase (MSD1) thaliana] >gi|21542455|sp|O81235|SODM_ARATH Superoxide dismutase mitochondrial precursor >gi|6016702|gb|AAF01529.1|AC009991_25
  misc_feature (1)..(231): Homolog of NCBI NO: 11256334 NR Description: superoxide dismutase (EC 1.15.1.1) (Mn) - Arabidopsis thaliana >gi|3273751|gb|AAC24832.1| manganese
  misc_feature (1)..(231): Homolog of NCBI NO: 21553457 NR Description: putative (Mn) superoxide dismutase [Arabidopsis
  misc_feature (1)..(229): Homolog of NCBI NO: 15778185 NR Description: superoxide dismutase [Raphanus sativus]
  misc_feature (1)..(229): Homolog of NCBI NO: 7433350 NR Description: superoxide dismutase (EC 1.15.1.1) (Mn) - radish
  misc_feature (1)..(229): Homolog of NCBI NO: 134672 NR Description: Superoxide dismutase [Mn], mitochondrial precursor
  misc_feature (1)..(229): Homolog of NCBI NO: 3915002 NR Description: Superoxide dismutase [Mn], mitochondrial precursor
  misc_feature (2)..(229): Homolog of NCBI NO: 9929159 NR Description: manganese superoxide dismutase [Digitalis lanata]
  misc_feature (1)..(229): Homolog of NCBI NO: 464775 NR Description: Superoxide dismutase [Mn], mitochondrial precursor
  misc_feature (1)..(226): Homolog of NCBI NO: 498260 NR Description: manganous superoxide dismutase

SEQ ID NO: 98979 - protein, 180 aa, Arabidopsis thaliana; identical to SEQ ID NO: 29576
  peptide (1)..(180): Ceres Seq. ID no. 13601883
  misc_feature (1)..(180): Homolog of NCBI NO: 15228407 NR Description: manganese superoxide dismutase (MSD1) thaliana] >gi|21542455|sp|O81235|SODM_ARATH Superoxide dismutase mitochondrial precursor >gi|6016702|gb|AAF01529.1|AC009991_25
  misc_feature (1)..(180): Homolog of NCBI NO: 11256334 NR Description: superoxide dismutase (EC 1.15.1.1) (Mn) - Arabidopsis thaliana >gi|3273751|gb|AAC24832.1| manganese
  misc_feature (1)..(180): Homolog of NCBI NO: 21553457 NR Description: putative (Mn) superoxide dismutase [Arabidopsis
  misc_feature (1)..(178): Homolog of NCBI NO: 15778185 NR Description: superoxide dismutase [Raphanus sativus]
  misc_feature (1)..(178): Homolog of NCBI NO: 7433350 NR Description: superoxide dismutase (EC 1.15.1.1) (Mn) - radish
  misc_feature (1)..(178): Homolog of NCBI NO: 134672 NR Description: Superoxide dismutase [Mn], mitochondrial precursor
  misc_feature (1)..(178): Homolog of NCBI NO: 3915002 NR Description: Superoxide dismutase [Mn], mitochondrial precursor
  misc_feature (1)..(178): Homolog of NCBI NO: 9929159 NR Description: manganese superoxide dismutase [Digitalis lanata]
  misc_feature (1)..(178): Homolog of NCBI NO: 464775 NR Description: Superoxide dismutase [Mn], mitochondrial precursor
  misc_feature (1)..(175): Homolog of NCBI NO: 498260 NR Description: manganous superoxide dismutase

SEQ ID NO: 98980 - DNA, 1074 bp, Arabidopsis thaliana
  misc_feature (1)..(1074): Ceres Seq. ID no. 13601884
  misc_feature: MA Experiment ID: 108434 Result: Up-regulated in Transcription
  misc_feature: MA Experiment 108434 PARAMETER Experiment Name: At_Root_Tips_cDNA_P Parameter: Tissue Value: Root Tips
  misc_feature: MA Experiment ID: 108461 Result: Up-regulated in Transcription
  misc_feature: MA Experiment 108461 PARAMETER Experiment Name: At_Germinating_Seeds_cDNA_P Parameter: Age (day) Value: 1 vs. 0
  misc_feature: MA Experiment 108461 PARAMETER Experiment Name: At_Germinating_Seeds_cDNA_P Parameter: Tissue Value: Germinating Seeds
  misc_feature: MA Experiment ID: 108462 Result: Up-regulated in Transcription
  misc_feature: MA Experiment 108462 PARAMETER Experiment Name: At_Germinating_Seeds_cDNA_P Parameter: Age (day) Value: 2 vs. 0
  misc_feature: MA Experiment 108462 PARAMETER Experiment Name: At_Germinating_Seeds_cDNA_P Parameter: Tissue Value: Germinating Seeds
  misc_feature: MA Experiment ID: 108463 Result: Up-regulated in Transcription
  misc_feature: MA Experiment 108463 PARAMETER Experiment Name: At_Germinating_Seeds_cDNA_P Parameter: Age (day) Value: 3 vs. 0
  misc_feature: MA Experiment 108463 PARAMETER Experiment Name: At_Germinating_Seeds_cDNA_P Parameter: Tissue Value: Germinating Seeds
  misc_feature: MA Experiment ID: 108464 Result: Up-regulated in Transcription
  misc_feature: MA Experiment 108464 PARAMETER Experiment Name: At_Germinating_Seeds_cDNA_P Parameter: Age (day) Value: 4 vs. 0
  misc_feature: MA Experiment 108464 PARAMETER Experiment Name: At_Germinating_Seeds_cDNA_P Parameter: Tissue Value: Germinating Seeds
  misc_feature: MA Experiment ID: 108488 Result: Up-regulated in Transcription
  misc_feature: MA Experiment ID: 108489 Result: Down-regulated in Transcription
  misc_feature: MA Experiment ID: 108573 Result: Down-regulated in Transcription
  misc_feature: MA Experiment 108573 PARAMETER Experiment Name: At_Drought_cDNA_P Parameter: Timepoint (hr) Value: 6
  misc_feature: MA Experiment 108573 PARAMETER Experiment Name: At_Drought_cDNA_P Parameter: Tissue Value: Aerial
  misc_feature: MA Experiment 108573 PARAMETER Experiment Name: At_Drought_cDNA_P Parameter: Treatment Value: Drought vs. No Drought
  misc_feature: MA Experiment ID: 108579 Result: Up-regulated in Transcription
  misc_feature: MA Experiment 108579 PARAMETER Experiment Name: At_4deg_Cold_cDNA_P Parameter: Temperature (deg C) Value: 4 vs. 22
  misc_feature: MA Experiment 108579 PARAMETER Experiment Name: At_4deg_Cold_cDNA_P Parameter: Timepoint (hr) Value: 6
  misc_feature: MA Experiment 108579 PARAMETER Experiment Name: At_4deg_Cold_cDNA_P Parameter: Tissue Value: Aerial
  misc_feature: MA Experiment ID: 108585 Result: Down-regulated in Transcription
  misc_feature: MA Experiment 108585 PARAMETER Experiment Name: At_5mM_NaNP_cDNA_P Parameter: Timepoint (hr) Value: 6
  misc_feature: MA Experiment 108585 PARAMETER Experiment Name: At_5mM_NaNP_cDNA_P Parameter: Tissue Value: Aerial
  misc_feature: MA Experiment 108585 PARAMETER Experiment Name: At_5mM_NaNP_cDNA_P Parameter: Treatment Value: null
  misc_feature: MA Experiment ID: 20000087 Result: Down-regulated in Transcription
  misc_feature: MA Experiment 20000087 PARAMETER Experiment Name: At_100uM_ABA_Mutants_cDNA_P Parameter: Plant Line Value: WS
  misc_feature: MA Experiment 20000087 PARAMETER Experiment Name: At_100uM_ABA_Mutants_cDNA_P Parameter: Timepoint (hr) Value: 6
  misc_feature: MA Experiment 20000087 PARAMETER Experiment Name: At_100uM_ABA_Mutants_cDNA_P Parameter: Tissue Value: Aerial
  misc_feature: MA Experiment 20000087 PARAMETER Experiment Name: At_100uM_ABA_Mutants_cDNA_P Parameter: Treatment Value: 100uM ABA vs. No Treatment
  misc_feature: MA Experiment ID: 20000224 Result: Up-regulated in Transcription
  misc_feature: MA Experiment ID: 20001248 Result: Down-regulated in Transcription
  misc_feature: MA Experiment 20001248 PARAMETER Experiment Name: At_Far-red-induction_P Parameter: Age (day) Value: 7
  misc_feature: MA Experiment 20001248 PARAMETER Experiment Name: At_Far-red-induction_P Parameter: Light Value: Far-red vs. White
  misc_feature: MA Experiment 20001248 PARAMETER Experiment Name: At_Far-red-induction_P Parameter: Organism Value: A. thaliana
  misc_feature: MA Experiment 20001248 PARAMETER Experiment Name: At_Far-red-induction_P Parameter: Plant Line Value: Columbia
  misc_feature: MA Experiment 20001248 PARAMETER Experiment Name: At_Far-red-induction_P Parameter: Timepoint (hr) Value: 4
  misc_feature: MA Experiment 20001248 PARAMETER Experiment Name: At_Far-red-induction_P Parameter: Tissue Value: Whole Plant
  misc_feature: MA Experiment ID: 20001450 Result: Down-regulated in Transcription
  misc_feature: MA Experiment 20001450 PARAMETER Experiment Name: At_Far-red-induction_P Parameter: Age (day) Value: 7
  misc_feature: MA Experiment 20001450 PARAMETER Experiment Name: At_Far-red-induction_P Parameter: Light Value: Far-red vs. White
  misc_feature: MA Experiment 20001450 PARAMETER Experiment Name: At_Far-red-induction_P Parameter: Organism Value: A. thaliana
  misc_feature: MA Experiment 20001450 PARAMETER Experiment Name: At_Far-red-induction_P Parameter: Plant Line Value: Columbia
  misc_feature: MA Experiment 20001450 PARAMETER Experiment Name: At_Far-red-induction_P Parameter: Timepoint (hr) Value: 8
  misc_feature: MA Experiment 20001450 PARAMETER Experiment Name: At_Far-red-induction_P Parameter: Tissue Value: Whole Plant
  misc_feature: MA Experiment ID: 20001451 Result: Down-regulated in Transcription
  misc_feature: MA Experiment 20001451 PARAMETER Experiment Name: At_Far-red-induction_P Parameter: Age (day) Value: 7
  misc_feature: MA Experiment 20001451 PARAMETER Experiment Name: At_Far-red-induction_P Parameter: Light Value: Far-red vs. White
  misc_feature: MA Experiment 20001451 PARAMETER Experiment Name: At_Far-red-induction_P Parameter: Organism Value: A. thaliana
  misc_feature: MA Experiment 20001451 PARAMETER Experiment Name: At_Far-red-induction_P Parameter: Plant Line Value: Columbia
  misc_feature: MA Experiment 20001451 PARAMETER Experiment Name: At_Far-red-induction_P Parameter: Timepoint (hr) Value: 24
  misc_feature: MA Experiment 20001451 PARAMETER Experiment Name: At_Far-red-induction_P Parameter: Tissue Value: Whole Plant
  misc_feature: MA Experiment ID: 20001557 Result: Down-regulated in Transcription
  misc_feature: MA Experiment 20001557 PARAMETER Experiment Name: At_Drought_Soil_Dry_P Parameter: Age (day) Value: 27
  misc_feature: MA Experiment 20001557 PARAMETER Experiment Name: At_Drought_Soil_Dry_P Parameter: Organism Value: A. thaliana
  misc_feature: MA Experiment 20001557 PARAMETER Experiment Name: At_Drought_Soil_Dry_P Parameter: Plant Line Value: WS
  misc_feature: MA Experiment 20001557 PARAMETER Experiment Name: At_Drought_Soil_Dry_P Parameter: Post Timepoint (hr) Value: 3
  misc_feature: MA Experiment 20001557 PARAMETER Experiment Name: At_Drought_Soil_Dry_P Parameter: Post-Treatment Value: Re-Water vs. No Drought
  misc_feature: MA Experiment 20001557 PARAMETER Experiment Name: At_Drought_Soil_Dry_P Parameter: Timepoint (day) Value: 13
  misc_feature: MA Experiment 20001557 PARAMETER Experiment Name: At_Drought_Soil_Dry_P Parameter: Treatment Value: Drought vs. No Drought
acagatatcaatgttgcatcaggtgaagaacgagagatagagaacgatgagtgtgattggaagcaagagctgtattttctctgtggctagatacacccgagaaaatgagaaatcttcttgcttcacttctatcaacaagaaatcttcgcttgatctgagatttcccagaaatctggcgggagtttcctgcaaattctctggagaaaatccaggaacaaatggggtttctcttagctccaagaacaaaatggaggattacaatacagctatgaagagattgatgagaagcccttatgaatatcatcatgatctaggtatgaactatacattgataagagatgaacttatagttgggtcacagccacagaaacctgaggacatagatcacttgaagcaggaacagaatgttgcttacatacttaacttgcagcaggataaggacattgagtattggggaatcgatttggattccattgttagaagatgtaaggagcttggaatccgtcacatgagaaggcctgctaaagattttgatccactttcgttgagaagccaacttccaaaagctgtttcttctttggaatgggcggtttcagaaggtaaaggaagagtctatgtgcattgctcagccggattgggaagagctccaggggtttccattgcttatatgtattggttctgtgacatgaatcttaacacggcttatgacactttggtatcaaagcgtccatgtgggcctaacaaaggagccatccgtggtgcaacatatgatctggctaagaatgatccctggaaagagccctttgagagtctccctgagaacgcattcgaggacattgcagattgggaaaggaagttgattcaagaacgtgttcgggccctccgtggaacctgaaaatcagtaattctgagaatatgtataatttcgaataaaatgtagacttctgtatattttaaagctacggattacaaaacctcttctgcgaattaatcgaccttgttgtcaggaactctgtggttcttcttgtctagttctacaaagatgaagtctatataatttatacatacacttag

SEQ ID NO: 98981 - protein, 282 aa, Arabidopsis thaliana
  peptide (1)..(282): Ceres Seq. ID no. 13601885
  misc_feature (92)..(228): Pfam Name: Dual specificity phosphatase, catalytic domain Pfam Description: Dual specificity phosphatase, catalytic domain
  misc_feature (1)..(282): Homolog of NCBI NO: 18399058 NR Description: expressed protein [Arabidopsis thaliana]
  misc_feature (1)..(282): Homolog of NCBI NO: 21592631 NR Description: unknown [Arabidopsis thaliana]
  misc_feature (58)..(243): Homolog of NCBI NO: 11288831 NR Description: hypothetical protein F4F15.290 - Arabidopsis >gi|4678947|emb|CAB41338.1| putative protein [Arabidopsis
  misc_feature (58)..(243): Homolog of NCBI NO: 18409505 NR Description: expressed protein [Arabidopsis thaliana] PTPKIS1 [Arabidopsis thaliana] >gi|11595504|emb|CAC18328.1|
  misc_feature (59)..(243): Homolog of NCBI NO: 16612246 NR Description: AT3g52180/F4F15_290 [Arabidopsis thaliana]
  misc_feature (56)..(243): Homolog of NCBI NO: 14970762 NR Description: protein tyrosine phosphatase [Lycopersicon
  misc_feature (58)..(243): Homolog of NCBI NO: 21536905 NR Description: unknown [Arabidopsis thaliana]
  misc_feature (20)..(243): Homolog of NCBI NO: 18395843 NR Description: expressed protein [Arabidopsis thaliana]
  misc_feature (20)..(243): Homolog of NCBI NO: 21592520 NR Description: unknown [Arabidopsis thaliana]
  misc_feature (68)..(243): Homolog of NCBI NO: 6016710 NR Description: unknown protein [Arabidopsis thaliana]
MSVIGSKSCIFSVARYTRENEKSSCFTSINKKSSLDLRFPRNLAGVSCKFSGENPGTNGVSLSSKNKMEDYNTAMKRLMRSPYEYHHDLGMNYTLIRDELIVGSQPQKPEDIDHLKQEQNVAYILNLQQDKDIEYWGIDLDSIVRRCKELGIRHMRRPAKDFDPLSLRSQLPKAVSSLEWAVSEGKGRVYVHCSAGLGRAPGVSIAYMYWFCDMNLNTAYDTLVSKRPCGPNKGAIRGATYDLAKNDPWKEPFESLPENAFEDIADWERKLIQERVRALRGT

SEQ ID NO: 98982 - protein, 215 aa, Arabidopsis thaliana; identical to SEQ ID NO: 26565
  peptide (1)..(215): Ceres Seq. ID no. 13601886
  misc_feature (25)..(161): Pfam Name: Dual specificity phosphatase, catalytic domain Pfam Description: Dual specificity phosphatase, catalytic domain
  misc_feature (1)..(215): Homolog of NCBI NO: 18399058 NR Description: expressed protein [Arabidopsis thaliana]
  misc_feature (1)..(215): Homolog of NCBI NO: 21592631 NR Description: unknown [Arabidopsis thaliana]
  misc_feature (1)..(176): Homolog of NCBI NO: 11288831 NR Description: hypothetical protein F4F15.290 - Arabidopsis >gi|4678947|emb|CAB41338.1| putative protein [Arabidopsis
  misc_feature (1)..(176): Homolog of NCBI NO: 18409505 NR Description: expressed protein [Arabidopsis thaliana] PTPKIS1 [Arabidopsis thaliana] >gi|11595504|emb|CAC18328.1|
  misc_feature (1)..(176): Homolog of NCBI NO: 16612246 NR Description: AT3g52180/F4F15_290 [Arabidopsis thaliana]
  misc_feature (1)..(176): Homolog of NCBI NO: 14970762 NR Description: protein tyrosine phosphatase [Lycopersicon
  misc_feature (1)..(176): Homolog of NCBI NO: 21536905 NR Description: unknown [Arabidopsis thaliana]
  misc_feature (1)..(176): Homolog of NCBI NO: 18395843 NR Description: expressed protein [Arabidopsis thaliana]
  misc_feature (1)..(176): Homolog of NCBI NO: 21592520 NR Description: unknown [Arabidopsis thaliana]
  misc_feature (1)..(176): Homolog of NCBI NO: 6016710 NR Description: unknown protein [Arabidopsis thaliana]

SEQ ID NO: 98983 - protein, 208 aa, Arabidopsis thaliana; identical to SEQ ID NO: 26566
  peptide (1)..(208): Ceres Seq. ID no. 13601887
  misc_feature (18)..(154): Pfam Name: Dual specificity phosphatase, catalytic domain Pfam Description: Dual specificity phosphatase, catalytic domain
  misc_feature (1)..(208): Homolog of NCBI NO: 18399058 NR Description: expressed protein [Arabidopsis thaliana]
  misc_feature (1)..(208): Homolog of NCBI NO: 21592631 NR Description: unknown [Arabidopsis thaliana]
  misc_feature (1)..(169): Homolog of NCBI NO: 11288831 NR Description: hypothetical protein F4F15.290 - Arabidopsis >gi|4678947|emb|CAB41338.1| putative protein [Arabidopsis
  misc_feature (1)..(169): Homolog of NCBI NO: 18409505 NR Description: expressed protein [Arabidopsis thaliana] PTPKIS1 [Arabidopsis thaliana] >gi|11595504|emb|CAC18328.1|
  misc_feature (1)..(169): Homolog of NCBI NO: 16612246 NR Description: AT3g52180/F4F15_290 [Arabidopsis thaliana]
  misc_feature (1)..(169): Homolog of NCBI NO: 14970762 NR Description: protein tyrosine phosphatase [Lycopersicon
  misc_feature (1)..(169): Homolog of NCBI NO: 21536905 NR Description: unknown [Arabidopsis thaliana]
  misc_feature (1)..(169): Homolog of NCBI NO: 18395843 NR Description: expressed protein [Arabidopsis thaliana]
  misc_feature (1)..(169): Homolog of NCBI NO: 21592520 NR Description: unknown [Arabidopsis thaliana]
  misc_feature (1)..(169): Homolog of NCBI NO: 6016710 NR Description: unknown protein [Arabidopsis thaliana]

SEQ ID NO: 98984 - DNA, 981 bp, Arabidopsis thaliana
  misc_feature (1)..(981): Ceres Seq. ID no. 13601888
  misc_feature: MA Experiment ID: 108434 Result: Up-regulated in Transcription
  misc_feature: MA Experiment 108434 PARAMETER Experiment Name: At_Root_Tips_cDNA_P Parameter: Tissue Value: Root Tips
  misc_feature: MA Experiment ID: 108462 Result: Down-regulated in Transcription
  misc_feature: MA Experiment 108462 PARAMETER Experiment Name: At_Germinating_Seeds_cDNA_P Parameter: Age (day) Value: 2 vs. 0
  misc_feature: MA Experiment 108462 PARAMETER Experiment Name: At_Germinating_Seeds_cDNA_P Parameter: Tissue Value: Germinating Seeds
  misc_feature: MA Experiment ID: 108464 Result: Down-regulated in Transcription
  misc_feature: MA Experiment 108464 PARAMETER Experiment Name: At_Germinating_Seeds_cDNA_P Parameter: Age (day) Value: 4 vs. 0
  misc_feature: MA Experiment 108464 PARAMETER Experiment Name: At_Germinating_Seeds_cDNA_P Parameter: Tissue Value: Germinating Seeds
  misc_feature: MA Experiment ID: 20000111 Result: Up-regulated in Transcription
  misc_feature: MA Experiment 20000111 PARAMETER Experiment Name: At_42deg_Heat_cDNA_P Parameter: Temperature (deg C) Value: 42 vs. 22
  misc_feature: MA Experiment 20000111 PARAMETER Experiment Name: At_42deg_Heat_cDNA_P Parameter: Timepoint (hr) Value: 6
  misc_feature: MA Experiment 20000111 PARAMETER Experiment Name: At_42deg_Heat_cDNA_P Parameter: Tissue Value: Aerial
  misc_feature: MA Experiment ID: 20000173 Result: Up-regulated in Transcription
  misc_feature: MA Experiment 20000173 PARAMETER Experiment Name: At_42deg_Heat_P Parameter: Age (day) Value: 14
  misc_feature: MA Experiment 20000173 PARAMETER Experiment Name: At_42deg_Heat_P Parameter: Organism Value: A. thaliana
  misc_feature: MA Experiment 20000173 PARAMETER Experiment Name: At_42deg_Heat_P Parameter: Plant Line Value: WS
  misc_feature: MA Experiment 20000173 PARAMETER Experiment Name: At_42deg_Heat_P Parameter: Temperature (deg C) Value: 42 vs. 22
  misc_feature: MA Experiment 20000173 PARAMETER Experiment Name: At_42deg_Heat_P Parameter: Timepoint (hr) Value: 6
  misc_feature: MA Experiment 20000173 PARAMETER Experiment Name: At_42deg_Heat_P Parameter: Tissue Value: Aerial
  misc_feature: MA Experiment ID: 20000184 Result: Up-regulated in Transcription
  misc_feature: MA Experiment 20000184 PARAMETER Experiment Name: At_Shoots__P Parameter: Age (day) Value: 7
  misc_feature: MA Experiment 20000184 PARAMETER Experiment Name: At_Shoots__P Parameter: Tissue Value: Shoots vs. Whole Plant
  misc_feature: MA Experiment ID: 20000224 Result: Up-regulated in Transcription
  misc_feature: MA Experiment ID: 20000227 Result: Up-regulated in Transcription
  misc_feature: MA Experiment 20000227 PARAMETER Experiment Name: At_Root-Tips-vs-Tops_P Parameter: Tissue Value: Root Tips vs. Root Tops
  misc_feature: MA Experiment ID: 20000437 Result: Up-regulated in Transcription
  misc_feature: MA Experiment 20000437 PARAMETER Experiment Name: At_Drought_P Parameter: Age (day) Value: 8
  misc_feature: MA Experiment 20000437 PARAMETER Experiment Name: At_Drought_P Parameter: Organism Value: A. thaliana
  misc_feature: MA Experiment 20000437 PARAMETER Experiment Name: At_Drought_P Parameter: Plant Line Value: WS
  misc_feature: MA Experiment 20000437 PARAMETER Experiment Name: At_Drought_P Parameter: Timepoint (hr) Value: 24
  misc_feature: MA Experiment 20000437 PARAMETER Experiment Name: At_Drought_P Parameter: Tissue Value: Whole Plant
  misc_feature: MA Experiment 20000437 PARAMETER Experiment Name: At_Drought_P Parameter: Treatment Value: Drought vs. No Drought
  misc_feature: MA Experiment ID: 20000527 Result: Down-regulated in Transcription
  misc_feature: MA Experiment 20000527 PARAMETER Experiment Name: At_10percent_PEG_P Parameter: Age (day) Value: 20
  misc_feature: MA Experiment 20000527 PARAMETER Experiment Name: At_10percent_PEG_P Parameter: Organism Value: A. thaliana
  misc_feature: MA Experiment 20000527 PARAMETER Experiment Name: At_10percent_PEG_P Parameter: Plant Line Value: WS
  misc_feature: MA Experiment 20000527 PARAMETER Experiment Name: At_10percent_PEG_P Parameter: Timepoint (day) Value: 20
  misc_feature: MA Experiment 20000527 PARAMETER Experiment Name: At_10percent_PEG_P Parameter: Tissue Value: Whole Plant
  misc_feature: MA Experiment 20000527 PARAMETER Experiment Name: At_10percent_PEG_P Parameter: Treatment Value: 10percent PEG vs. No Treatment
  misc_feature: MA Experiment ID: 20001556 Result: Up-regulated in Transcription
  misc_feature: MA Experiment 20001556 PARAMETER Experiment Name: At_Drought_Soil_Dry_P Parameter: Age (day) Value: 26
  misc_feature: MA Experiment 20001556 PARAMETER Experiment Name: At_Drought_Soil_Dry_P Parameter: Organism Value: A. thaliana
  misc_feature: MA Experiment 20001556 PARAMETER Experiment Name: At_Drought_Soil_Dry_P Parameter: Plant Line Value: WS
  misc_feature: MA Experiment 20001556 PARAMETER Experiment Name: At_Drought_Soil_Dry_P Parameter: Post Timepoint (hr) Value: None
  misc_feature: MA Experiment 20001556 PARAMETER Experiment Name: At_Drought_Soil_Dry_P Parameter: Post-Treatment Value: None
  misc_feature: MA Experiment 20001556 PARAMETER Experiment Name: At_Drought_Soil_Dry_P Parameter: Timepoint (day) Value: 12
  misc_feature: MA Experiment 20001556 PARAMETER Experiment Name: At_Drought_Soil_Dry_P Parameter: Treatment Value: Drought vs. No Drought
  misc_feature: MA Experiment ID: 20001906 Result: Up-regulated in Transcription
  misc_feature: MA Experiment 20001906 PARAMETER Experiment Name: At_Drought_Reproduction_P Parameter: Age (day) Value: 35
  misc_feature: MA Experiment 20001906 PARAMETER Experiment Name: At_Drought_Reproduction_P Parameter: Organism Value: A. thaliana
  misc_feature: MA Experiment 20001906 PARAMETER Experiment Name: At_Drought_Reproduction_P Parameter: Plant Line Value: WS
  misc_feature: MA Experiment 20001906 PARAMETER Experiment Name: At_Drought_Reproduction_P Parameter: Timepoint (day) Value: 5
  misc_feature: MA Experiment 20001906 PARAMETER Experiment Name: At_Drought_Reproduction_P Parameter: Tissue Value: Siliques
  misc_feature: MA Experiment 20001906 PARAMETER Experiment Name: At_Drought_Reproduction_P Parameter: Treatment Value: Drought vs. No Drought
aagcccaaatgttgcacaaggcttctcccgctctctctctcttgagctccggctacaccggcggtggaaatctgtttcctccgtcgagaaattcgtcgaatcttctgttttctccgagtggatccaggttttctgttcaggcggcgaaaggaacgaacacgaagtcgttaaccggagttgtattcgaaccttttgaggaggtgaagaaagaaatggagctcgttcccactaccccttttgtttctctcgctcgccacaagttctccgacgattctgaatctgccatcaacgatcagatcaacgtggagtacaacgtctcgtatgtctaccatgccctgtatgcctactttgacagagacaatgtcggcttgaaaggtttcgccaagttttttaacgattcgagtcttgaagaacgaggtcatgctgagatgtttatggagtatcagaacaagcgtggtgggagagtgaagctgcagtctattttgatgcccgtctctgagtttgatcacgaggagaagggagatgcattgcatgcgatggagcttgcattgtctttggagaaacttacaaatgaaaagcttctgaagttacaaagtgttggtgtgaagaacaatgatgttcagctggttgattttgtagaatctgagtttctaggcgagcaggtcgaagctatcaagaaaatctcagagtacgttgcacagctaagaagaataggaaagggtcatggagtgtggcattttgatcaaatgcttctcaatgatgaggtttaaggaaggagagttcagcttctgagtttgatgacaatcttccttgtgctatatggcaccgttctatctctataacgacgtctctaagtttggtcggagaaaagtgttcttgctcgttctttcttttctttgtttttggttaaccgaatgcttgtgagtgtgtacttaataatgtaactcgtagtctgataataaatgcaagtcccactgtttc

SEQ ID NO: 98985 - protein, 255 aa, Arabidopsis thaliana
  peptide (1)..(255): Ceres Seq. ID no. 13601889
  misc_feature (92)..(237): Pfam Name: Ferritin-like domain Pfam Description: Ferritin-like domain
  misc_feature (3)..(255): Homolog of NCBI NO: 15228431 NR Description: ferritin subunit -related [Arabidopsis thaliana] Probable ferritin 3, chloroplast precursor
  misc_feature (3)..(255): Homolog of NCBI NO: 21593905 NR Description: ferritin subunit, putative [Arabidopsis thaliana]
AQMLHKASPALSLLSSGYTGGGNLFPPSRNSSNLLFSPSGSRFSVQAAKGTNTKSLTGVVFEPFEEVKKEMELVPTTPFVSLARHKFSDDSESAINDQINVEYNVSYVYHALYAYFDRDNVGLKGFAKFFNDSSLEERGHAEMFMEYQNKRGGRVKLQSILMPVSEFDHEEKGDALHAMELALSLEKLTNEKLLKLQSVGVKNNDVQLVDFVESEFLGEQVEAIKKISEYVAQLRRIGKGHGVWHFDQMLLNDEV

SEQ ID NO: 98986 - protein, 253 aa, Arabidopsis thaliana
  peptide (1)..(253): Ceres Seq. ID no. 13601890
  misc_feature (90)..(235): Pfam Name: Ferritin-like domain Pfam Description: Ferritin-like domain
  misc_feature (1)..(253): Homolog of NCBI NO: 15228431 NR Description: ferritin subunit -related [Arabidopsis thaliana] Probable ferritin 3, chloroplast precursor
  misc_feature (1)..(253): Homolog of NCBI NO: 21593905 NR Description: ferritin subunit, putative [Arabidopsis thaliana]
MLHKASPALSLLSSGYTGGGNLFPPSRNSSNLLFSPSGSRFSVQAAKGTNTKSLTGVVFEPFEEVKKEMELVPTTPFVSLARHKFSDDSESAINDQINVEYNVSYVYHALYAYFDRDNVGLKGFAKFFNDSSLEERGHAEMFMEYQNKRGGRVKLQSILMPVSEFDHEEKGDALHAMELALSLEKLTNEKLLKLQSVGVKNNDVQLVDFVESEFLGEQVEAIKKISEYVAQLRRIGKGHGVWHFDQMLLNDEV

SEQ ID NO: 98987 - protein, 185 aa, Arabidopsis thaliana
  peptide (1)..(185): Ceres Seq. ID no. 13601891
  misc_feature (22)..(167): Pfam Name: Ferritin-like domain Pfam Description: Ferritin-like domain
  misc_feature (1)..(185): Homolog of NCBI NO: 15228431 NR Description: ferritin subunit -related [Arabidopsis thaliana] Probable ferritin 3, chloroplast precursor
  misc_feature (1)..(185): Homolog of NCBI NO: 21593905 NR Description: ferritin subunit, putative [Arabidopsis thaliana]
MELVPTTPFVSLARHKFSDDSESAINDQINVEYNVSYVYHALYAYFDRDNVGLKGFAKFFNDSSLEERGHAEMFMEYQNKRGGRVKLQSILMPVSEFDHEEKGDALHAMELALSLEKLTNEKLLKLQSVGVKNNDVQLVDFVESEFLGEQVEAIKKISEYVAQLRRIGKGHGVWHFDQMLLNDEV

SEQ ID NO: 98988 - DNA, 1106 bp, Arabidopsis thaliana
  misc_feature (1)..(1106): Ceres Seq. ID no. 13601892
  misc_feature: MA Experiment ID: 108488 Result: Down-regulated in Transcription
  misc_feature: MA Experiment ID: 108579 Result: Down-regulated in Transcription
  misc_feature: MA Experiment 108579 PARAMETER Experiment Name: At_4deg_Cold_cDNA_P Parameter: Temperature (deg C) Value: 4 vs. 22
  misc_feature: MA Experiment 108579 PARAMETER Experiment Name: At_4deg_Cold_cDNA_P Parameter: Timepoint (hr) Value: 6
  misc_feature: MA Experiment 108579 PARAMETER Experiment Name: At_4deg_Cold_cDNA_P Parameter: Tissue Value: Aerial
  misc_feature: MA Experiment ID: 20000184 Result: Down-regulated in Transcription
  misc_feature: MA Experiment 20000184 PARAMETER Experiment Name: At_Shoots__P Parameter: Age (day) Value: 7
  misc_feature: MA Experiment 20000184 PARAMETER Experiment Name: At_Shoots__P Parameter: Tissue Value: Shoots vs. Whole Plant
  misc_feature: MA Experiment ID: 20000234 Result: Down-regulated in Transcription
  misc_feature: MA Experiment 20000234 PARAMETER Experiment Name: At_Siliques_P Parameter: Age (day) Value: 21
  misc_feature: MA Experiment 20000234 PARAMETER Experiment Name: At_Siliques_P Parameter: Organism Value: A. thaliana
  misc_feature: MA Experiment 20000234 PARAMETER Experiment Name: At_Siliques_P Parameter: Plant Line Value: WS
  misc_feature: MA Experiment 20000234 PARAMETER Experiment Name: At_Siliques_P Parameter: Tissue Value: Less Than 5mm Siliques vs. Whole Plant
  misc_feature: MA Experiment ID: 20000235 Result: Down-regulated in Transcription
  misc_feature: MA Experiment 20000235 PARAMETER Experiment Name: At_Siliques_P Parameter: Age (day) Value: 21
  misc_feature: MA Experiment 20000235 PARAMETER Experiment Name: At_Siliques_P Parameter: Organism Value: A. thaliana
  misc_feature: MA Experiment 20000235 PARAMETER Experiment Name: At_Siliques_P Parameter: Plant Line Value: WS
  misc_feature: MA Experiment 20000235 PARAMETER Experiment Name: At_Siliques_P Parameter: Tissue Value: 5-10mm Siliques vs. Whole Plant
  misc_feature: MA Experiment ID: 20000264 Result: Down-regulated in Transcription
  misc_feature: MA Experiment 20000264 PARAMETER Experiment Name: At_Open_Flower_P Parameter: Age (day) Value: 21
  misc_feature: MA Experiment 20000264 PARAMETER Experiment Name: At_Open_Flower_P Parameter: Plant Line Value: WS
  misc_feature: MA Experiment 20000264 PARAMETER Experiment Name: At_Open_Flower_P Parameter: Tissue Value: Open Flower vs. Whole Plant
  misc_feature: MA Experiment ID: 20001248 Result: Up-regulated in Transcription
  misc_feature: MA Experiment 20001248 PARAMETER Experiment Name: At_Far-red-induction_P Parameter: Age (day) Value: 7
  misc_feature: MA Experiment 20001248 PARAMETER Experiment Name: At_Far-red-induction_P Parameter: Light Value: Far-red vs. White
  misc_feature: MA Experiment 20001248 PARAMETER Experiment Name: At_Far-red-induction_P Parameter: Organism Value: A. thaliana
  misc_feature: MA Experiment 20001248 PARAMETER Experiment Name: At_Far-red-induction_P Parameter: Plant Line Value: Columbia
  misc_feature: MA Experiment 20001248 PARAMETER Experiment Name: At_Far-red-induction_P Parameter: Timepoint (hr) Value: 4
  misc_feature: MA Experiment 20001248 PARAMETER Experiment Name: At_Far-red-induction_P Parameter: Tissue Value: Whole Plant
  misc_feature: MA Experiment ID: 20001450 Result: Up-regulated in Transcription
  misc_feature: MA Experiment 20001450 PARAMETER Experiment Name: At_Far-red-induction_P Parameter: Age (day) Value: 7
  misc_feature: MA Experiment 20001450 PARAMETER Experiment Name: At_Far-red-induction_P Parameter: Light Value: Far-red vs. White
  misc_feature: MA Experiment 20001450 PARAMETER Experiment Name: At_Far-red-induction_P Parameter: Organism Value: A. thaliana
  misc_feature: MA Experiment 20001450 PARAMETER Experiment Name: At_Far-red-induction_P Parameter: Plant Line Value: Columbia
  misc_feature: MA Experiment 20001450 PARAMETER Experiment Name: At_Far-red-induction_P Parameter: Timepoint (hr) Value: 8
  misc_feature: MA Experiment 20001450 PARAMETER Experiment Name: At_Far-red-induction_P Parameter: Tissue Value: Whole Plant
  misc_feature: MA Experiment ID: 20001451 Result: Up-regulated in Transcription
  misc_feature: MA Experiment 20001451 PARAMETER Experiment Name: At_Far-red-induction_P Parameter: Age (day) Value: 7
  misc_feature: MA Experiment 20001451 PARAMETER Experiment Name: At_Far-red-induction_P Parameter: Light Value: Far-red vs. White
  misc_feature: MA Experiment 20001451 PARAMETER Experiment Name: At_Far-red-induction_P Parameter: Organism Value: A. thaliana
  misc_feature: MA Experiment 20001451 PARAMETER Experiment Name: At_Far-red-induction_P Parameter: Plant Line Value: Columbia
  misc_feature: MA Experiment 20001451 PARAMETER Experiment Name: At_Far-red-induction_P Parameter: Timepoint (hr) Value: 24
  misc_feature: MA Experiment 20001451 PARAMETER Experiment Name: At_Far-red-induction_P Parameter: Tissue Value: Whole Plant
aaaaatccgatccaacagaaattcttatcctaagcctctttctccaccgcgcacgttagcctcctctctttcccactccgagatggagacgacgccggagactcagtcgaagactcaccgtctaccggcgggaagagaggattggtggagcgaagacgctacggcgacattgatcgaagcttggggagatcgttacgtcaatctcaaccggggaaatctccggcaaaacgattggaaagaagtcgccgacgccgtcaattcaagccacgggaatggccggccaaagaccgatgtacagtgcaaaaaccggatcgatacgttgaagaagaagtacaaaactgaaaaggcgaaacctttatcgaattggtgcttctttgatagactcgatttcttaatcggtccggttatgaagaaatcgtccggtgctgttgttaaatcggcgttgatgaaccctaatttgaatcctactggatctaaatcaactggtagctctctcgatgacgatgatgatgatgatgatgacgacgaagaagatgatgatgatgcgggtgattggggatttgtggtgaggaagcatcgtaaagttgaagatgtagattcgagtgaaggatcagcctttagggagctagcgagatcgattctgaagttaggggaagcgtttgagagaatcgaggggaagaagcaacagatgatgattgaattggagaaacagagaatggaagttgcaaaggagcttgagttacaacgaatgaatatgttgatggagatgcaattggagcttgagaaatctaaacttgggaaacgaagagctgcttcaggtaagaagttgtaggattgtagattgtggaggagttactgatgtgaagcaaggagcaatggttggatctaaagctcatacgatttggagaagatgttattattattgatctttaggttttcttaagttatagcgcgatgctttttttcttcttcttctttttcattctcttttttagcattgtagagttacattggtagtagcaatgcgaattaccaaaagaactctcatagtatctgacatatcaagatgtacttttgtgaagtatcaatgtatgatggtttgtgta

SEQ ID NO: 98989 - protein, 276 aa, Arabidopsis thaliana
  peptide (1)..(276): Ceres Seq. ID no. 13601893
  misc_feature (28)..(272): Homolog of NCBI NO: 12321891 NR Description: hypothetical protein; 14486-13072 [Arabidopsis
  misc_feature (28)..(276): Homolog of NCBI NO: 18399118 NR Description: expressed protein [Arabidopsis thaliana]
  misc_feature (28)..(274): Homolog of NCBI NO: 6016685 NR Description: hypothetical protein [Arabidopsis thaliana]
  misc_feature (28)..(275): Homolog of NCBI NO: 21537288 NR Description: unknown [Arabidopsis thaliana]
  misc_feature (28)..(276): Homolog of NCBI NO: 18414919 NR Description: expressed protein [Arabidopsis thaliana] AT5g05550/MOP10_9 [Arabidopsis thaliana]
  misc_feature (28)..(275): Homolog of NCBI NO: 10178132 NR Description: gb|AAF01512.1~gene_id:MOP10.9~similar to unknown
  misc_feature (28)..(272): Homolog of NCBI NO: 30680994 NR Description: expressed protein [Arabidopsis thaliana]
  misc_feature (4)..(143): Homolog of NCBI NO: 18149189 NR Description: 6b-interacting protein 1 [Nicotiana tabacum]
  misc_feature (132)..(274): Homolog of NCBI NO: 18149189 NR Description: 6b-interacting protein 1 [Nicotiana tabacum]
  misc_feature (169)..(268): Homolog of NCBI NO: 15231799 NR Description: expressed protein [Arabidopsis thaliana]
KIRSNRNSYPKPLSPPRTLASSLSHSEMETTPETQSKTHRLPAGREDWWSEDATATLIEAWGDRYVNLNRGNLRQNDWKEVADAVNSSHGNGRPKTDVQCKNRIDTLKKKYKTEKAKPLSNWCFFDRLDFLIGPVMKKSSGAVVKSALMNPNLNPTGSKSTGSSLDDDDDDDDDDEEDDDDAGDWGFVVRKHRKVEDVDSSEGSAFRELARSILKLGEAFERIEGKKQQMMIELEKQRMEVAKELELQRMNMLMEMQLELEKSKLGKRRAASGKKL

SEQ ID NO: 98990 - protein, 249 aa, Arabidopsis thaliana; identical to SEQ ID NO: 42107
  peptide (1)..(249): Ceres Seq. ID no. 13601894
  misc_feature (1)..(245): Homolog of NCBI NO: 12321891 NR Description: hypothetical protein; 14486-13072 [Arabidopsis
  misc_feature (1)..(249): Homolog of NCBI NO: 18399118 NR Description: expressed protein [Arabidopsis thaliana]
  misc_feature (1)..(247): Homolog of NCBI NO: 6016685 NR Description: hypothetical protein [Arabidopsis thaliana]
  misc_feature (1)..(248): Homolog of NCBI NO: 21537288 NR Description: unknown [Arabidopsis thaliana]
  misc_feature (1)..(249): Homolog of NCBI NO: 18414919 NR Description: expressed protein [Arabidopsis thaliana] AT5g05550/MOP10_9 [Arabidopsis thaliana]
  misc_feature (1)..(248): Homolog of NCBI NO: 10178132 NR Description: gb|AAF01512.1~gene_id:MOP10.9~similar to unknown
  misc_feature (1)..(245): Homolog of NCBI NO: 30680994 NR Description: expressed protein [Arabidopsis thaliana]
  misc_feature (1)..(116): Homolog of NCBI NO: 18149189 NR Description: 6b-interacting protein 1 [Nicotiana tabacum]
  misc_feature (105)..(247): Homolog of NCBI NO: 18149189 NR Description: 6b-interacting protein 1 [Nicotiana tabacum]
  misc_feature (142)..(241): Homolog of NCBI NO: 15231799 NR Description: expressed protein [Arabidopsis thaliana]

SEQ ID NO: 98991 - protein, 141 aa, Arabidopsis thaliana; identical to SEQ ID NO: 42108
  peptide (1)..(141): Ceres Seq. ID no. 13601895
  misc_feature (1)..(137): Homolog of NCBI NO: 12321891 NR Description: hypothetical protein; 14486-13072 [Arabidopsis
  misc_feature (1)..(141): Homolog of NCBI NO: 18399118 NR Description: expressed protein [Arabidopsis thaliana]
  misc_feature (1)..(139): Homolog of NCBI NO: 6016685 NR Description: hypothetical protein [Arabidopsis thaliana]
  misc_feature (1)..(140): Homolog of NCBI NO: 21537288 NR Description: unknown [Arabidopsis thaliana]
  misc_feature (1)..(141): Homolog of NCBI NO: 18414919 NR Description: expressed protein [Arabidopsis thaliana] AT5g05550/MOP10_9 [Arabidopsis thaliana]
  misc_feature (1)..(140): Homolog of NCBI NO: 10178132 NR Description: gb|AAF01512.1~gene_id:MOP10.9~similar to unknown
  misc_feature (1)..(137): Homolog of NCBI NO: 30680994 NR Description: expressed protein [Arabidopsis thaliana]
  misc_feature (1)..(139): Homolog of NCBI NO: 18149189 NR Description: 6b-interacting protein 1 [Nicotiana tabacum]
  misc_feature (34)..(133): Homolog of NCBI NO: 15231799 NR Description: expressed protein [Arabidopsis thaliana]
  misc_feature (64)..(129): Homolog of NCBI NO: 38344545 NR Description: OSJNBa0027P08.13 [Oryza sativa (japonica

SEQ ID NO: 98992 - DNA, 1005 bp, Arabidopsis thaliana
  misc_feature (1)..(1005): Ceres Seq. ID no. 13601919
  misc_feature: MA Experiment ID: 108434 Result: Up-regulated in Transcription
  misc_feature: MA Experiment 108434 PARAMETER Experiment Name: At_Root_Tips_cDNA_P Parameter: Tissue Value: Root Tips
  misc_feature: MA Experiment ID: 108595 Result: Down-regulated in Transcription
  misc_feature: MA Experiment 108595 PARAMETER Experiment Name: At_Ler-pi_Ovule_cDNA_P Parameter: Plant Line Value: null
  misc_feature: MA Experiment ID: 20000069 Result: Down-regulated in Transcription
  misc_feature: MA Experiment 20000069 PARAMETER Experiment Name: At_100uM_ABA_Mutants_cDNA_P Parameter: Plant Line Value: CS23
  misc_feature: MA Experiment 20000069 PARAMETER Experiment Name: At_100uM_ABA_Mutants_cDNA_P Parameter: Timepoint (hr) Value: 6
  misc_feature: MA Experiment 20000069 PARAMETER Experiment Name: At_100uM_ABA_Mutants_cDNA_P Parameter: Tissue Value: Aerial
  misc_feature: MA Experiment 20000069 PARAMETER Experiment Name: At_100uM_ABA_Mutants_cDNA_P Parameter: Treatment Value: 100uM ABA vs. No Treatment
  misc_feature: MA Experiment ID: 20000070 Result: Down-regulated in Transcription
  misc_feature: MA Experiment 20000070 PARAMETER Experiment Name: At_100uM_ABA_Mutants_cDNA_P Parameter: Plant Line Value: CS24
  misc_feature: MA Experiment 20000070 PARAMETER Experiment Name: At_100uM_ABA_Mutants_cDNA_P Parameter: Timepoint (hr) Value: 6
  misc_feature: MA Experiment 20000070 PARAMETER Experiment Name: At_100uM_ABA_Mutants_cDNA_P Parameter: Tissue Value: Aerial
  misc_feature: MA Experiment 20000070 PARAMETER Experiment Name: At_100uM_ABA_Mutants_cDNA_P Parameter: Treatment Value: 100uM ABA vs. No Treatment
  misc_feature: MA Experiment ID: 20000071 Result: Down-regulated in Transcription
  misc_feature: MA Experiment 20000071 PARAMETER Experiment Name: At_100uM_ABA_Mutants_cDNA_P Parameter: Plant Line Value: CS8104
  misc_feature: MA Experiment 20000071 PARAMETER Experiment Name: At_100uM_ABA_Mutants_cDNA_P Parameter: Timepoint (hr) Value: 6
  misc_feature: MA Experiment 20000071 PARAMETER Experiment Name: At_100uM_ABA_Mutants_cDNA_P Parameter: Tissue Value: Aerial
  misc_feature: MA Experiment 20000071 PARAMETER Experiment Name: At_100uM_ABA_Mutants_cDNA_P Parameter: Treatment Value: 100uM ABA vs. No Treatment
  misc_feature: MA Experiment ID: 20000072 Result: Down-regulated in Transcription
  misc_feature: MA Experiment 20000072 PARAMETER Experiment Name: At_100uM_ABA_Mutants_cDNA_P Parameter: Plant Line Value: CS8105
  misc_feature: MA Experiment 20000072 PARAMETER Experiment Name: At_100uM_ABA_Mutants_cDNA_P Parameter: Timepoint (hr) Value: 6
  misc_feature: MA Experiment 20000072 PARAMETER Experiment Name: At_100uM_ABA_Mutants_cDNA_P Parameter: Tissue Value: Aerial
  misc_feature: MA Experiment 20000072 PARAMETER Experiment Name: At_100uM_ABA_Mutants_cDNA_P Parameter: Treatment Value: 100uM ABA vs. No Treatment
  misc_feature: MA Experiment ID: 20000086 Result: Down-regulated in Transcription
  misc_feature: MA Experiment 20000086 PARAMETER Experiment Name: At_100uM_ABA_Mutants_cDNA_P Parameter: Plant Line Value: CS22
  misc_feature: MA Experiment 20000086 PARAMETER Experiment Name: At_100uM_ABA_Mutants_cDNA_P Parameter: Timepoint (hr) Value: 6
  misc_feature: MA Experiment 20000086 PARAMETER Experiment Name: At_100uM_ABA_Mutants_cDNA_P Parameter: Tissue Value: Aerial
  misc_feature: MA Experiment 20000086 PARAMETER Experiment Name: At_100uM_ABA_Mutants_cDNA_P Parameter: Treatment Value: 100uM ABA vs. No Treatment
  misc_feature: MA Experiment ID: 20000087 Result: Down-regulated in Transcription
  misc_feature: MA Experiment 20000087 PARAMETER Experiment Name: At_100uM_ABA_Mutants_cDNA_P Parameter: Plant Line Value: WS
  misc_feature: MA Experiment 20000087 PARAMETER Experiment Name: At_100uM_ABA_Mutants_cDNA_P Parameter: Timepoint (hr) Value: 6
  misc_feature: MA Experiment 20000087 PARAMETER Experiment Name: At_100uM_ABA_Mutants_cDNA_P Parameter: Tissue Value: Aerial
  misc_feature: MA Experiment 20000087 PARAMETER Experiment Name: At_100uM_ABA_Mutants_cDNA_P Parameter: Treatment Value: 100uM ABA vs. No Treatment
  misc_feature: MA Experiment ID: 20000088 Result: Down-regulated in Transcription
  misc_feature: MA Experiment 20000088 PARAMETER Experiment Name: At_100uM_ABA_Mutants_cDNA_P Parameter: Plant Line Value: Landsberg
  misc_feature: MA Experiment 20000088 PARAMETER Experiment Name: At_100uM_ABA_Mutants_cDNA_P Parameter: Timepoint (hr) Value: 6
  misc_feature: MA Experiment 20000088 PARAMETER Experiment Name: At_100uM_ABA_Mutants_cDNA_P Parameter: Tissue Value: Aerial
  misc_feature: MA Experiment 20000088 PARAMETER Experiment Name: At_100uM_ABA_Mutants_cDNA_P Parameter: Treatment Value: 100uM ABA vs. No Treatment
  misc_feature: MA Experiment ID: 20000117 Result: Down-regulated in Transcription
  misc_feature: MA Experiment 20000117 PARAMETER Experiment Name: At_100uM_ABA_Mutants_cDNA_P Parameter: Plant Line Value: Columbia
  misc_feature: MA Experiment 20000117 PARAMETER Experiment Name: At_100uM_ABA_Mutants_cDNA_P Parameter: Timepoint (hr) Value: 6
  misc_feature: MA Experiment 20000117 PARAMETER Experiment Name: At_100uM_ABA_Mutants_cDNA_P Parameter: Tissue Value: Aerial
  misc_feature: MA Experiment 20000117 PARAMETER Experiment Name: At_100uM_ABA_Mutants_cDNA_P Parameter: Treatment Value: 100uM ABA vs. No Treatment
  misc_feature: MA Experiment ID: 20000437 Result: Down-regulated in Transcription
  misc_feature: MA Experiment 20000437 PARAMETER Experiment Name: At_Drought_P Parameter: Age (day) Value: 8
  misc_feature: MA Experiment 20000437 PARAMETER Experiment Name: At_Drought_P Parameter: Organism Value: A. thaliana
  misc_feature: MA Experiment 20000437 PARAMETER Experiment Name: At_Drought_P Parameter: Plant Line Value: WS
  misc_feature: MA Experiment 20000437 PARAMETER Experiment Name: At_Drought_P Parameter: Timepoint (hr) Value: 24
  misc_feature: MA Experiment 20000437 PARAMETER Experiment Name: At_Drought_P Parameter: Tissue Value: Whole Plant
  misc_feature: MA Experiment 20000437 PARAMETER Experiment Name: At_Drought_P Parameter: Treatment Value: Drought vs. No Drought
  misc_feature: MA Experiment ID: 20000439 Result: Down-regulated in Transcription
  misc_feature: MA Experiment 20000439 PARAMETER Experiment Name: At_Roots__P Parameter: Age (day) Value: 14 vs. 21
  misc_feature: MA Experiment 20000439 PARAMETER Experiment Name: At_Roots__P Parameter: Organism Value: A. thaliana
  misc_feature: MA Experiment 20000439 PARAMETER Experiment Name: At_Roots__P Parameter: Tissue Value: Roots vs. Whole Plant
  misc_feature: MA Experiment ID: 20000794 Result: Down-regulated in Transcription
  misc_feature: MA Experiment 20000794 PARAMETER Experiment Name: At_Petals_P Parameter: Age (day) Value: 23-25 days
  misc_feature: MA Experiment 20000794 PARAMETER Experiment Name: At_Petals_P Parameter: Plant Line Value: WS
  misc_feature: MA Experiment 20000794 PARAMETER Experiment Name: At_Petals_P Parameter: Tissue Value: Petals vs. Whole plant
  misc_feature: MA Experiment ID: 20001451 Result: Down-regulated in Transcription
  misc_feature: MA Experiment 20001451 PARAMETER Experiment Name: At_Far-red-induction_P Parameter: Age (day) Value: 7
  misc_feature: MA Experiment 20001451 PARAMETER Experiment Name: At_Far-red-induction_P Parameter: Light Value: Far-red vs. White
  misc_feature: MA Experiment 20001451 PARAMETER Experiment Name: At_Far-red-induction_P Parameter: Organism Value: A. thaliana
  misc_feature: MA Experiment 20001451 PARAMETER Experiment Name: At_Far-red-induction_P Parameter: Plant Line Value: Columbia
  misc_feature: MA Experiment 20001451 PARAMETER Experiment Name: At_Far-red-induction_P Parameter: Timepoint (hr) Value: 24
  misc_feature: MA Experiment 20001451 PARAMETER Experiment Name: At_Far-red-induction_P Parameter: Tissue Value: Whole Plant
  misc_feature: MA Experiment ID: 20001557 Result: Down-regulated in Transcription
  misc_feature: MA Experiment 20001557 PARAMETER Experiment Name: At_Drought_Soil_Dry_P Parameter: Age (day) Value: 27
  misc_feature: MA Experiment 20001557 PARAMETER Experiment Name: At_Drought_Soil_Dry_P Parameter: Organism Value: A. thaliana
  misc_feature: MA Experiment 20001557 PARAMETER Experiment Name: At_Drought_Soil_Dry_P Parameter: Plant Line Value: WS
  misc_feature: MA Experiment 20001557 PARAMETER Experiment Name: At_Drought_Soil_Dry_P Parameter: Post Timepoint (hr) Value: 3
  misc_feature: MA Experiment 20001557 PARAMETER Experiment Name: At_Drought_Soil_Dry_P Parameter: Post-Treatment Value: Re-Water vs. No Drought
  misc_feature: MA Experiment 20001557 PARAMETER Experiment Name: At_Drought_Soil_Dry_P Parameter: Timepoint (day) Value: 13
  misc_feature: MA Experiment 20001557 PARAMETER Experiment Name: At_Drought_Soil_Dry_P Parameter: Treatment Value: Drought vs. No Drought
  misc_feature: MA Experiment ID: 20001757 Result: Up-regulated in Transcription
  misc_feature: MA Experiment 20001757 PARAMETER Experiment Name: At_50mM_NH4NO3_L-to-H_P Parameter: Timepoint (hr) Value: 6
  misc_feature: MA Experiment 20001757 PARAMETER Experiment Name: At_50mM_NH4NO3_L-to-H_P Parameter: Tissue Value: Leaf
  misc_feature: MA Experiment 20001757 PARAMETER Experiment Name: At_50mM_NH4NO3_L-to-H_P Parameter: Treatment Value: 50mM NH4NO3 vs 100mM Mannitol
  misc_feature: MA Experiment ID: 20001904 Result: Down-regulated in Transcription
  misc_feature: MA Experiment 20001904 PARAMETER Experiment Name: At_Drought_Reproduction_P Parameter: Age (day) Value: 37
  misc_feature: MA Experiment 20001904 PARAMETER Experiment Name: At_Drought_Reproduction_P Parameter: Organism Value: A. thaliana
  misc_feature: MA Experiment 20001904 PARAMETER Experiment Name: At_Drought_Reproduction_P Parameter: Plant Line Value: WS
  misc_feature: MA Experiment 20001904 PARAMETER Experiment Name: At_Drought_Reproduction_P Parameter: Timepoint (day) Value: 7
  misc_feature: MA Experiment 20001904 PARAMETER Experiment Name: At_Drought_Reproduction_P Parameter: Tissue Value: Rosettes
  misc_feature: MA Experiment 20001904 PARAMETER Experiment Name: At_Drought_Reproduction_P Parameter: Treatment Value: Drought vs. No Drought
  misc_feature: MA Experiment ID: 20001905 Result: Down-regulated in Transcription
  misc_feature: MA Experiment 20001905 PARAMETER Experiment Name: At_Drought_Reproduction_P Parameter: Age (day) Value: 40
  misc_feature: MA Experiment 20001905 PARAMETER Experiment Name: At_Drought_Reproduction_P Parameter: Organism Value: A. thaliana
  misc_feature: MA Experiment 20001905 PARAMETER Experiment Name: At_Drought_Reproduction_P Parameter: Plant Line Value: WS
  misc_feature: MA Experiment 20001905 PARAMETER Experiment Name: At_Drought_Reproduction_P Parameter: Timepoint (day) Value: 10
  misc_feature: MA Experiment 20001905 PARAMETER Experiment Name: At_Drought_Reproduction_P Parameter: Tissue Value: Rosettes
  misc_feature: MA Experiment 20001905 PARAMETER Experiment Name: At_Drought_Reproduction_P Parameter: Treatment Value: Drought vs. No Drought
  misc_feature: MA Experiment ID: 20001906 Result: Down-regulated in Transcription
  misc_feature: MA Experiment 20001906 PARAMETER Experiment Name: At_Drought_Reproduction_P Parameter: Age (day) Value: 35
  misc_feature: MA Experiment 20001906 PARAMETER Experiment Name: At_Drought_Reproduction_P Parameter: Organism Value: A. thaliana
  misc_feature: MA Experiment 20001906 PARAMETER Experiment Name: At_Drought_Reproduction_P Parameter: Plant Line Value: WS
  misc_feature: MA Experiment 20001906 PARAMETER Experiment Name: At_Drought_Reproduction_P Parameter: Timepoint (day) Value: 5
  misc_feature: MA Experiment 20001906 PARAMETER Experiment Name: At_Drought_Reproduction_P Parameter: Tissue Value: Siliques
  misc_feature: MA Experiment 20001906 PARAMETER Experiment Name: At_Drought_Reproduction_P Parameter: Treatment Value: Drought vs. No Drought
  misc_feature: MA Experiment ID: 20001908 Result: Down-regulated in Transcription
  misc_feature: MA Experiment 20001908 PARAMETER Experiment Name: At_Drought_Reproduction_P Parameter: Age (day) Value: 40
  misc_feature: MA Experiment 20001908 PARAMETER Experiment Name: At_Drought_Reproduction_P Parameter: Organism Value: A. thaliana
  misc_feature: MA Experiment 20001908 PARAMETER Experiment Name: At_Drought_Reproduction_P Parameter: Plant Line Value: WS
  misc_feature: MA Experiment 20001908 PARAMETER Experiment Name: At_Drought_Reproduction_P Parameter: Timepoint (day) Value: 10
  misc_feature: MA Experiment 20001908 PARAMETER Experiment Name: At_Drought_Reproduction_P Parameter: Tissue Value: Siliques
  misc_feature: MA Experiment 20001908 PARAMETER Experiment Name: At_Drought_Reproduction_P Parameter: Treatment Value: Drought vs. No Drought
  misc_feature: MA Experiment ID: 20001911 Result: Down-regulated in Transcription
  misc_feature: MA Experiment 20001911 PARAMETER Experiment Name: At_Drought_Reproduction_P Parameter: Age (day) Value: 40
  misc_feature: MA Experiment 20001911 PARAMETER Experiment Name: At_Drought_Reproduction_P Parameter: Organism Value: A. thaliana
  misc_feature: MA Experiment 20001911 PARAMETER Experiment Name: At_Drought_Reproduction_P Parameter: Plant Line Value: WS
  misc_feature: MA Experiment 20001911 PARAMETER Experiment Name: At_Drought_Reproduction_P Parameter: Timepoint (day) Value: 10
  misc_feature: MA Experiment 20001911 PARAMETER Experiment Name: At_Drought_Reproduction_P Parameter: Tissue Value: Flowers
  misc_feature: MA Experiment 20001911 PARAMETER Experiment Name: At_Drought_Reproduction_P Parameter: Treatment Value: Drought vs. No Drought
gtgattgacagatagataagagtgtttggtagctcagactcagagagtcacaaagtgtgtgtagcagcaatggcgtctgttgcttcttcaactactctcatctcttctccctcttctagggtttttccagcaaagtcttcactttcctctccatctgtttctttccttcgaaccctttcttctccttccgcatctgcttctctccgctccggatttgctcgacgctcttccctcagctccacttctcgtcggagctttgctgtcaaagcccaggccgatgatcttccactggttggaaacaaggcgcctgattttgaggcagaggctgtgtttgatcaagagttcatcaaggttaagctctctgattacattggaaagaagtatgtgattctctttttctacccattggactttactttcgtctgcccaacagagattactgccttcagtgaccggcattcagaatttgagaagttgaacaccgaagtattaggtgtttctgtcgatagtgtgttctctcaccttgcatgggtccaaacagacaggaaatctggagggcttggtgatctgaactatccccttatttcagatgtcactaaatcaatctcaaagtcgttcggagtgctcatccatgatcagggaatagcactgagaggacttttcataatcgacaaggaaggagtgatccaacattccaccatcaacaatcttggtattggccgaagcgttgatgagacaatgagaaccctccaggcattacagtacatccaggaaaacccggatgaagtctgcccagcaggatggaagccgggtgagaagtcaatgaaacccgacccaaaactcagcaaagagtacttctcagctatttagaaactctactatgatagcaaaaaggtacaatctttgttatatgtgagcagagttttttttcttgtacgctaaaacaatcctttgtttgattctcactttgtccccaaaattataataaaaaactttttccgttaa

SEQ ID NO: 98993 - protein, 266 aa, Arabidopsis thaliana; identical to SEQ ID NO: 21484
  peptide (1)..(266): Ceres Seq. ID no. 13601920
  misc_feature (75)..(226): Pfam Name: AhpC/TSA family Pfam Description: AhpC/TSA family
  misc_feature (1)..(266): Homolog of NCBI NO: 15229806 NR Description: 2-cys peroxiredoxin BAS1 precursor (thiol-specific
  misc_feature (1)..(266): Homolog of NCBI NO: 21592588 NR Description: putative 2-cys peroxiredoxin BAS1 precursor
  misc_feature (1)..(266): Homolog of NCBI NO: 3121825 NR Description: 2-cys peroxiredoxin BAS1, chloroplast precursor
  misc_feature (1)..(266): Homolog of NCBI NO: 7242491 NR Description: 2-Cys peroxiredoxin [Arabidopsis thaliana]
  misc_feature (1)..(266): Homolog of NCBI NO: 1498198 NR Description: 2-Cys peroxiredoxin bas1 [Arabidopsis thaliana]
  misc_feature (1)..(266): Homolog of NCBI NO: 18415155 NR Description: 2-cys peroxiredoxin-related protein [Arabidopsis
  misc_feature (1)..(266): Homolog of NCBI NO: 21553667 NR Description: 2-cys peroxiredoxin-like protein [Arabidopsis
  misc_feature (1)..(266): Homolog of NCBI NO: 9758409 NR Description: 2-cys peroxiredoxin-like protein [Arabidopsis
  misc_feature (1)..(266): Homolog of NCBI NO: 13265490 NR Description: AT5g06290 [Arabidopsis thaliana]
  misc_feature (1)..(266): Homolog of NCBI NO: 11119229 NR Description: 2-Cys peroxiredoxin [Brassica napus]

SEQ ID NO: 98994 - DNA, 910 bp, Arabidopsis thaliana
  misc_feature (1)..(910): Ceres Seq. ID no. 13601921
  misc_feature: MA Experiment ID: 108434 Result: Down-regulated in Transcription
  misc_feature: MA Experiment 108434 PARAMETER Experiment Name: At_Root_Tips_cDNA_P Parameter: Tissue Value: Root Tips
  misc_feature: MA Experiment ID: 108462 Result: Up-regulated in Transcription
  misc_feature: MA Experiment 108462 PARAMETER Experiment Name: At_Germinating_Seeds_cDNA_P Parameter: Age (day) Value: 2 vs. 0
  misc_feature: MA Experiment 108462 PARAMETER Experiment Name: At_Germinating_Seeds_cDNA_P Parameter: Tissue Value: Germinating Seeds
  misc_feature: MA Experiment ID: 108463 Result: Up-regulated in Transcription
  misc_feature: MA Experiment 108463 PARAMETER Experiment Name: At_Germinating_Seeds_cDNA_P Parameter: Age (day) Value: 3 vs. 0
  misc_feature: MA Experiment 108463 PARAMETER Experiment Name: At_Germinating_Seeds_cDNA_P Parameter: Tissue Value: Germinating Seeds
  misc_feature: MA Experiment ID: 108464 Result: Up-regulated in Transcription
  misc_feature: MA Experiment 108464 PARAMETER Experiment Name: At_Germinating_Seeds_cDNA_P Parameter: Age (day) Value: 4 vs. 0
  misc_feature: MA Experiment 108464 PARAMETER Experiment Name: At_Germinating_Seeds_cDNA_P Parameter: Tissue Value: Germinating Seeds
  misc_feature: MA Experiment ID: 108572 Result: Up-regulated in Transcription
  misc_feature: MA Experiment 108572 PARAMETER Experiment Name: At_Drought_cDNA_P Parameter: Timepoint (hr) Value: 1
  misc_feature: MA Experiment 108572 PARAMETER Experiment Name: At_Drought_cDNA_P Parameter: Tissue Value: Aerial
  misc_feature: MA Experiment 108572 PARAMETER Experiment Name: At_Drought_cDNA_P Parameter: Treatment Value: Drought vs. No Drought
  misc_feature: MA Experiment ID: 108573 Result: Up-regulated in Transcription
  misc_feature: MA Experiment 108573 PARAMETER Experiment Name: At_Drought_cDNA_P Parameter: Timepoint (hr) Value: 6
  misc_feature: MA Experiment 108573 PARAMETER Experiment Name: At_Drought_cDNA_P Parameter: Tissue Value: Aerial
  misc_feature: MA Experiment 108573 PARAMETER Experiment Name: At_Drought_cDNA_P Parameter: Treatment Value: Drought vs. No Drought
  misc_feature: MA Experiment ID: 20000224 Result: Up-regulated in Transcription
  misc_feature: MA Experiment ID: 20000227 Result: Down-regulated in Transcription
  misc_feature: MA Experiment 20000227 PARAMETER Experiment Name: At_Root-Tips-vs-Tops_P Parameter: Tissue Value: Root Tips vs. Root Tops
  misc_feature: MA Experiment ID: 20000265 Result: Down-regulated in Transcription
  misc_feature: MA Experiment 20000265 PARAMETER Experiment Name: At_Open_Flower_P Parameter: Age (day) Value: 21
  misc_feature: MA Experiment 20000265 PARAMETER Experiment Name: At_Open_Flower_P Parameter: Plant Line Value: WS
  misc_feature: MA Experiment 20000265 PARAMETER Experiment Name: At_Open_Flower_P Parameter: Tissue Value: Closed Flower vs. Whole Plant
  misc_feature: MA Experiment ID: 20000527 Result: Down-regulated in Transcription
  misc_feature: MA Experiment 20000527 PARAMETER Experiment Name: At_10percent_PEG_P Parameter: Age (day) Value: 20
  misc_feature: MA Experiment 20000527 PARAMETER Experiment Name: At_10percent_PEG_P Parameter: Organism Value: A. thaliana
  misc_feature: MA Experiment 20000527 PARAMETER Experiment Name: At_10percent_PEG_P Parameter: Plant Line Value: WS
  misc_feature: MA Experiment 20000527 PARAMETER Experiment Name: At_10percent_PEG_P Parameter: Timepoint (day) Value: 20
  misc_feature: MA Experiment 20000527 PARAMETER Experiment Name: At_10percent_PEG_P Parameter: Tissue Value: Whole Plant
  misc_feature: MA Experiment 20000527 PARAMETER Experiment Name: At_10percent_PEG_P Parameter: Treatment Value: 10percent PEG vs. No Treatment
  misc_feature: MA Experiment ID: 20000794 Result: Up-regulated in Transcription
  misc_feature: MA Experiment 20000794 PARAMETER Experiment Name: At_Petals_P Parameter: Age (day) Value: 23-25 days
  misc_feature: MA Experiment 20000794 PARAMETER Experiment Name: At_Petals_P Parameter: Plant Line Value: WS
  misc_feature: MA Experiment 20000794 PARAMETER Experiment Name: At_Petals_P Parameter: Tissue Value: Petals vs. Whole plant
  misc_feature: MA Experiment ID: 20001247 Result: Down-regulated in Transcription
  misc_feature: MA Experiment 20001247 PARAMETER Experiment Name: At_Far-red-induction_P Parameter: Age (day) Value: 7
  misc_feature: MA Experiment 20001247 PARAMETER Experiment Name: At_Far-red-induction_P Parameter: Light Value: Far-red vs. White
  misc_feature: MA Experiment 20001247 PARAMETER Experiment Name: At_Far-red-induction_P Parameter: Organism Value: A. thaliana
  misc_feature: MA Experiment 20001247 PARAMETER Experiment Name: At_Far-red-induction_P Parameter: Plant Line Value: Columbia
  misc_feature: MA Experiment 20001247 PARAMETER Experiment Name: At_Far-red-induction_P Parameter: Timepoint (hr) Value: 1
  misc_feature: MA Experiment 20001247 PARAMETER Experiment Name: At_Far-red-induction_P Parameter: Tissue Value: Whole Plant
  misc_feature: MA Experiment ID: 20001248 Result: Down-regulated in Transcription
  misc_feature: MA Experiment 20001248 PARAMETER Experiment Name: At_Far-red-induction_P Parameter: Age (day) Value: 7
  misc_feature: MA Experiment 20001248 PARAMETER Experiment Name: At_Far-red-induction_P Parameter: Light Value: Far-red vs. White
  misc_feature: MA Experiment 20001248 PARAMETER Experiment Name: At_Far-red-induction_P Parameter: Organism Value: A. thaliana
  misc_feature: MA Experiment 20001248 PARAMETER Experiment Name: At_Far-red-induction_P Parameter: Plant Line Value: Columbia
  misc_feature: MA Experiment 20001248 PARAMETER Experiment Name: At_Far-red-induction_P Parameter: Timepoint (hr) Value: 4
  misc_feature: MA Experiment 20001248 PARAMETER Experiment Name: At_Far-red-induction_P Parameter: Tissue Value: Whole Plant
  misc_feature: MA Experiment ID: 20001450 Result: Down-regulated in Transcription
  misc_feature: MA Experiment 20001450 PARAMETER Experiment Name: At_Far-red-induction_P Parameter: Age (day) Value: 7
  misc_feature: MA Experiment 20001450 PARAMETER Experiment Name: At_Far-red-induction_P Parameter: Light Value: Far-red vs. White
  misc_feature: MA Experiment 20001450 PARAMETER Experiment Name: At_Far-red-induction_P Parameter: Organism Value: A. thaliana
  misc_feature: MA Experiment 20001450 PARAMETER Experiment Name: At_Far-red-induction_P Parameter: Plant Line Value: Columbia
  misc_feature: MA Experiment 20001450 PARAMETER Experiment Name: At_Far-red-induction_P Parameter: Timepoint (hr) Value: 8
  misc_feature: MA Experiment 20001450 PARAMETER Experiment Name: At_Far-red-induction_P Parameter: Tissue Value: Whole Plant
  misc_feature: MA Experiment ID: 20001555 Result: Down-regulated in Transcription
  misc_feature: MA Experiment 20001555 PARAMETER Experiment Name: At_Drought_Soil_Dry_P Parameter: Age (day) Value: 24
  misc_feature: MA Experiment 20001555 PARAMETER Experiment Name: At_Drought_Soil_Dry_P Parameter: Organism Value: A. thaliana
  misc_feature: MA Experiment 20001555 PARAMETER Experiment Name: At_Drought_Soil_Dry_P Parameter: Plant Line Value: WS
  misc_feature: MA Experiment 20001555 PARAMETER Experiment Name: At_Drought_Soil_Dry_P Parameter: Post Timepoint (hr) Value: None
  misc_feature: MA Experiment 20001555 PARAMETER Experiment Name: At_Drought_Soil_Dry_P Parameter: Post-Treatment Value: None
  misc_feature: MA Experiment 20001555 PARAMETER Experiment Name: At_Drought_Soil_Dry_P Parameter: Timepoint (day) Value: 10
  misc_feature: MA Experiment 20001555 PARAMETER Experiment Name: At_Drought_Soil_Dry_P Parameter: Treatment Value: Drought vs. No Drought
  misc_feature: MA Experiment ID: 20001556 Result: Down-regulated in Transcription
  misc_feature: MA Experiment 20001556 PARAMETER Experiment Name: At_Drought_Soil_Dry_P Parameter: Age (day) Value: 26
  misc_feature: MA Experiment 20001556 PARAMETER Experiment Name: At_Drought_Soil_Dry_P Parameter: Organism Value: A. thaliana
  misc_feature: MA Experiment 20001556 PARAMETER Experiment Name: At_Drought_Soil_Dry_P Parameter: Plant Line Value: WS
  misc_feature: MA Experiment 20001556 PARAMETER Experiment Name: At_Drought_Soil_Dry_P Parameter: Post Timepoint (hr) Value: None
  misc_feature: MA Experiment 20001556 PARAMETER Experiment Name: At_Drought_Soil_Dry_P Parameter: Post-Treatment Value: None
  misc_feature: MA Experiment 20001556 PARAMETER Experiment Name: At_Drought_Soil_Dry_P Parameter: Timepoint (day) Value: 12
  misc_feature: MA Experiment 20001556 PARAMETER Experiment Name: At_Drought_Soil_Dry_P Parameter: Treatment Value: Drought vs. No Drought
  misc_feature: MA Experiment ID: 20001558 Result: Down-regulated in Transcription
  misc_feature: MA Experiment 20001558 PARAMETER Experiment Name: At_Drought_Soil_Dry_P Parameter: Age (day) Value: 27
  misc_feature: MA Experiment 20001558 PARAMETER Experiment Name: At_Drought_Soil_Dry_P Parameter: Organism Value: A. thaliana
  misc_feature: MA Experiment 20001558 PARAMETER Experiment Name: At_Drought_Soil_Dry_P Parameter: Plant Line Value: WS
  misc_feature: MA Experiment 20001558 PARAMETER Experiment Name: At_Drought_Soil_Dry_P Parameter: Post Timepoint (hr) Value: 6
  misc_feature: MA Experiment 20001558 PARAMETER Experiment Name: At_Drought_Soil_Dry_P Parameter: Post-Treatment Value: Re-Water vs. No Drought
  misc_feature: MA Experiment 20001558 PARAMETER Experiment Name: At_Drought_Soil_Dry_P Parameter: Timepoint (day) Value: 13
  misc_feature: MA Experiment 20001558 PARAMETER Experiment Name: At_Drought_Soil_Dry_P Parameter: Treatment Value: Drought vs. No Drought
  misc_feature: MA Experiment ID: 20001559 Result: Down-regulated in Transcription
  misc_feature: MA Experiment 20001559 PARAMETER Experiment Name: At_Drought_Soil_Dry_P Parameter: Age (day) Value: 28
  misc_feature: MA Experiment 20001559 PARAMETER Experiment Name: At_Drought_Soil_Dry_P Parameter: Organism Value: A. thaliana
  misc_feature: MA Experiment 20001559 PARAMETER Experiment Name: At_Drought_Soil_Dry_P Parameter: Plant Line Value: WS
  misc_feature: MA Experiment 20001559 PARAMETER Experiment Name: At_Drought_Soil_Dry_P Parameter: Post Timepoint (hr) Value: 29
  misc_feature: MA Experiment 20001559 PARAMETER Experiment Name: At_Drought_Soil_Dry_P Parameter: Post-Treatment Value: Re-Water vs. No Drought
  misc_feature: MA Experiment 20001559 PARAMETER Experiment Name: At_Drought_Soil_Dry_P Parameter: Timepoint (day) Value: 14
  misc_feature: MA Experiment 20001559 PARAMETER Experiment Name: At_Drought_Soil_Dry_P Parameter: Treatment Value: Drought vs. No Drought
  misc_feature: MA Experiment ID: 20001560 Result: Down-regulated in Transcription
  misc_feature: MA Experiment 20001560 PARAMETER Experiment Name: At_Drought_Soil_Dry_P Parameter: Age (day) Value: 28
  misc_feature: MA Experiment 20001560 PARAMETER Experiment Name: At_Drought_Soil_Dry_P Parameter: Organism Value: A. thaliana
  misc_feature: MA Experiment 20001560 PARAMETER Experiment Name: At_Drought_Soil_Dry_P Parameter: Plant Line Value: WS
  misc_feature: MA Experiment 20001560 PARAMETER Experiment Name: At_Drought_Soil_Dry_P Parameter: Post Timepoint (hr) Value: None
  misc_feature: MA Experiment 20001560 PARAMETER Experiment Name: At_Drought_Soil_Dry_P Parameter: Post-Treatment Value: None
  misc_feature: MA Experiment 20001560 PARAMETER Experiment Name: At_Drought_Soil_Dry_P Parameter: Timepoint (day) Value: 14
  misc_feature: MA Experiment 20001560 PARAMETER Experiment Name: At_Drought_Soil_Dry_P Parameter: Treatment Value: Drought vs. No Drought
  misc_feature: MA Experiment ID: 20001905 Result: Down-regulated in Transcription
  misc_feature: MA Experiment 20001905 PARAMETER Experiment Name: At_Drought_Reproduction_P Parameter: Age (day) Value: 40
  misc_feature: MA Experiment 20001905 PARAMETER Experiment Name: At_Drought_Reproduction_P Parameter: Organism Value: A. thaliana
  misc_feature: MA Experiment 20001905 PARAMETER Experiment Name: At_Drought_Reproduction_P Parameter: Plant Line Value: WS
  misc_feature: MA Experiment 20001905 PARAMETER Experiment Name: At_Drought_Reproduction_P Parameter: Timepoint (day) Value: 10
  misc_feature: MA Experiment 20001905 PARAMETER Experiment Name: At_Drought_Reproduction_P Parameter: Tissue Value: Rosettes
  misc_feature: MA Experiment 20001905 PARAMETER Experiment Name: At_Drought_Reproduction_P Parameter: Treatment Value: Drought vs. No Drought
  misc_feature: MA Experiment ID: 20001911 Result: Down-regulated in Transcription
  misc_feature: MA Experiment 20001911 PARAMETER Experiment Name: At_Drought_Reproduction_P Parameter: Age (day) Value: 40
  misc_feature: MA Experiment 20001911 PARAMETER Experiment Name: At_Drought_Reproduction_P Parameter: Organism Value: A. thaliana
  misc_feature: MA Experiment 20001911 PARAMETER Experiment Name: At_Drought_Reproduction_P Parameter: Plant Line Value: WS
  misc_feature: MA Experiment 20001911 PARAMETER Experiment Name: At_Drought_Reproduction_P Parameter: Timepoint (day) Value: 10
  misc_feature: MA Experiment 20001911 PARAMETER Experiment Name: At_Drought_Reproduction_P Parameter: Tissue Value: Flowers
  misc_feature: MA Experiment 20001911 PARAMETER Experiment Name: At_Drought_Reproduction_P Parameter: Treatment Value: Drought vs. No Drought
ctaaaacaaaaaatctcttaacaacttctccaccttctccccaccaccaccactcaccgtcggagaaagaaaaaaaacaaccaccatgaaagactgtgaaaaccacggccactctcgccggaaactaataaggcgaatattttggtcaataatcttcgtcctcttcatcatcttcctaacaatcctcctcatttgggcaattctccaaccatcaaagccacgcttcatcctccaagacgccaccgtctacgccttcaacgtctccggcaatccaccgaacctcctcacctccaacttccaaatcactctctcttcccggaaccctaacaacaaaatcggcatttactacgaccggcttgacgtctacgctacttaccggagccaacaaatcactttcccaacatcaatccctcccacgtatcagggacacaaagatgtcgacatctggtcgccgtttgtttacggaacctccgttcccatcgctccttttaacggcgttagtcttgacaccgataaagataacggtgtcgttttgttgatcattcgtgctgatggtagagtgaggtggaaggttgggacttttatcaccgggaagtatcatcttcatgtgaagtgtccagcatatataaacttcggtaacaaagctaacggagttatcgtcggagacaacgccgttaagtatacgtttaccactagttgtagtgttagtgtgtgaaacggcgacgaagaaaaataaggtaactaaacgtcttcgttaagtaatctgtcttagtgatgtgaattgtacattttgcttatacgaatagcaaatattacagattcgtgatgttgtaacgaattttaagaatttcaatatgtatactttttttttattatagttgaattctaaattctattataagttgtgatg

SEQ ID NO: 98995 - protein, 209 aa, Arabidopsis thaliana; identical to SEQ ID NO: 27986
  peptide (1)..(209): Ceres Seq. ID no. 13601922
  misc_feature (1)..(209): Homolog of NCBI NO: 18399308 NR Description: harpin-induced protein 1 family (HIN1) thaliana] >gi|6041819|gb|AAF02134.1|AC009918_6 unknown protein
  misc_feature (1)..(209): Homolog of NCBI NO: 28392929 NR Description: putative VAMP protein SEC22 [Arabidopsis thaliana]
  misc_feature (2)..(209): Homolog of NCBI NO: 15231227 NR Description: harpin-induced protein 1 family (HIN1)
  misc_feature (1)..(209): Homolog of NCBI NO: 15240001 NR Description: harpin-induced protein, putative (HIN1)
  misc_feature (1)..(209): Homolog of NCBI NO: 15227538 NR Description: harpin-induced protein 1 family (HIN1)
  misc_feature (1)..(208): Homolog of NCBI NO: 15233951 NR Description: harpin-induced protein 1 family (HIN1)
  misc_feature (1)..(208): Homolog of NCBI NO: 15227540 NR Description: harpin-induced protein 1 family (HIN1)
  misc_feature (1)..(209): Homolog of NCBI NO: 15229906 NR Description: harpin-induced protein 1 family (HIN1)
  misc_feature (1)..(209): Homolog of NCBI NO: 22326984 NR Description: harpin-induced protein 1 family (HIN1)
  misc_feature (1)..(209): Homolog of NCBI NO: 38637038 NR Description: harpin-induced protein 1 family (HIN1)-like

SEQ ID NO: 98996 - DNA, 2150 bp, Arabidopsis thaliana
  misc_feature (1)..(2150): Ceres Seq. ID no. 13601923
  misc_feature: MA Experiment ID: 108434 Result: Up-regulated in Transcription
  misc_feature: MA Experiment 108434 PARAMETER Experiment Name: At_Root_Tips_cDNA_P Parameter: Tissue Value: Root Tips
  misc_feature: MA Experiment ID: 108462 Result: Down-regulated in Transcription
  misc_feature: MA Experiment 108462 PARAMETER Experiment Name: At_Germinating_Seeds_cDNA_P Parameter: Age (day) Value: 2 vs. 0
  misc_feature: MA Experiment 108462 PARAMETER Experiment Name: At_Germinating_Seeds_cDNA_P Parameter: Tissue Value: Germinating Seeds
  misc_feature: MA Experiment ID: 108463 Result: Down-regulated in Transcription
  misc_feature: MA Experiment 108463 PARAMETER Experiment Name: At_Germinating_Seeds_cDNA_P Parameter: Age (day) Value: 3 vs. 0
  misc_feature: MA Experiment 108463 PARAMETER Experiment Name: At_Germinating_Seeds_cDNA_P Parameter: Tissue Value: Germinating Seeds
  misc_feature: MA Experiment ID: 108464 Result: Down-regulated in Transcription
  misc_feature: MA Experiment 108464 PARAMETER Experiment Name: At_Germinating_Seeds_cDNA_P Parameter: Age (day) Value: 4 vs. 0
  misc_feature: MA Experiment 108464 PARAMETER Experiment Name: At_Germinating_Seeds_cDNA_P Parameter: Tissue Value: Germinating Seeds
  misc_feature: MA Experiment ID: 20000180 Result: Down-regulated in Transcription
  misc_feature: MA Experiment 20000180 PARAMETER Experiment Name: At_Germinating_Seeds_P Parameter: Age (hr) Value: 24 vs. 0
  misc_feature: MA Experiment 20000180 PARAMETER Experiment Name: At_Germinating_Seeds_P Parameter: Tissue Value: Germinating Seeds
  misc_feature: MA Experiment ID: 20000224 Result: Up-regulated in Transcription
  misc_feature: MA Experiment ID: 20000227 Result: Up-regulated in Transcription
  misc_feature: MA Experiment 20000227 PARAMETER Experiment Name: At_Root-Tips-vs-Tops_P Parameter: Tissue Value: Root Tips vs. Root Tops
  misc_feature: MA Experiment ID: 20001557 Result: Up-regulated in Transcription
  misc_feature: MA Experiment 20001557 PARAMETER Experiment Name: At_Drought_Soil_Dry_P Parameter: Age (day) Value: 27
  misc_feature: MA Experiment 20001557 PARAMETER Experiment Name: At_Drought_Soil_Dry_P Parameter: Organism Value: A. thaliana
  misc_feature: MA Experiment 20001557 PARAMETER Experiment Name: At_Drought_Soil_Dry_P Parameter: Plant Line Value: WS
  misc_feature: MA Experiment 20001557 PARAMETER Experiment Name: At_Drought_Soil_Dry_P Parameter: Post Timepoint (hr) Value: 3
  misc_feature: MA Experiment 20001557 PARAMETER Experiment Name: At_Drought_Soil_Dry_P Parameter: Post-Treatment Value: Re-Water vs. No Drought
  misc_feature: MA Experiment 20001557 PARAMETER Experiment Name: At_Drought_Soil_Dry_P Parameter: Timepoint (day) Value: 13
  misc_feature: MA Experiment 20001557 PARAMETER Experiment Name: At_Drought_Soil_Dry_P Parameter: Treatment Value: Drought vs. No Drought
  misc_feature: MA Experiment ID: 20001558 Result: Up-regulated in Transcription
  misc_feature: MA Experiment 20001558 PARAMETER Experiment Name: At_Drought_Soil_Dry_P Parameter: Age (day) Value: 27
  misc_feature: MA Experiment 20001558 PARAMETER Experiment Name: At_Drought_Soil_Dry_P Parameter: Organism Value: A. thaliana
  misc_feature: MA Experiment 20001558 PARAMETER Experiment Name: At_Drought_Soil_Dry_P Parameter: Plant Line Value: WS
  misc_feature: MA Experiment 20001558 PARAMETER Experiment Name: At_Drought_Soil_Dry_P Parameter: Post Timepoint (hr) Value: 6
  misc_feature: MA Experiment 20001558 PARAMETER Experiment Name: At_Drought_Soil_Dry_P Parameter: Post-Treatment Value: Re-Water vs. No Drought
  misc_feature: MA Experiment 20001558 PARAMETER Experiment Name: At_Drought_Soil_Dry_P Parameter: Timepoint (day) Value: 13
  misc_feature: MA Experiment 20001558 PARAMETER Experiment Name: At_Drought_Soil_Dry_P Parameter: Treatment Value: Drought vs. No Drought
agacttaacatttcatatagagaaacttgaaacaacaatctgagcaaagagcgttttatcttgttgattttggaatctccattacgatggaaggtgcggctgatcaaactacgaaagcgttatctgaattagccatggattcttctaccaccttgaatgctgctgagtctagcgctggtgatggagctggacctcggagtaaaaatgctttgaagaaggaacagaaaatgaagcagaaagaggaagagaagagacgaaaggacgaagagaaagctgaaaaggctaaacaagcacctaaagcaagctcccagaaggcagtggcagcagatgatgaagagatggatgcaacgcaatactatgagaacagattgaaatatcttgcggctgagaaggctaaaggggagaatccatatcctcacaagttcgctgtgtcaatgtcgattcctaaatacattgagacgtatggtagtttgaacaatggagatcatgttgaaaacgctgaggagtctttagctgggcggataatgagcaagcgatcttcctcttccaagctcttcttctatgatctacacggtgatgatttcaaggtccaagtcatggctgatgcaagtaagtcaggattggatgaagctgagttcttaaagctccattcgaatgctaagcgtggtgatattgttggagtcattgggtttccaggaaaaactaagaggggagaattgagtatctttccccgatcatttattcttctgtcccattgcctccacatgatgccgagaaaggctgataatgttaatgcaaagaaacctgaaatctgggttccaggtcaaacgagaaatcctgaagcatatgttctgaaagaccaggaatcaagatatcgtcagcgtcatcttgatatgattttgaacgtggaggttcgtcagatattcaggactagagctaaaatcatctcctatgtccgcagattcctcgacaacaaaaatttcttggaggtcgagacacctatgatgaacatgattgctggtggagcagctgctagaccttttgtgacacatcacaatgatctagatatgaggctgtacatgcgaatcgcacctgaactctatctcaagcaacttattgttggtggcttggaacgtgtttacgagataggaaagcaattcagaaacgagggtatagacctgacccacaatccggagttcaccacttgcgagttctatatggcttttgcagactacaatgacctgatggaaatgactgaggttatgttgagtggcatggttaaggaattaacaggtggttataaaatcaagtataatgctaatgggtatgacaaggatccaattgaaatcgactttactccaccattcaggaggattgagatgataggagagttagagaaggttgctaagctcaatataccaaaagacttggctagcgaagaagctaacaagtatctgattgatgcatgtgcgaggtttgatgtcaaatgccctcctcctcagacaacagctcgtctgttagataaacttgttggagaatttctggaaccgacatgtgtgaacccaactttcatcatcaaccagcccgagatcatgagtcctttggctaaatggcacagatcgaagagtggattgacagagagattcgagctgttcatcaacaaacatgaactctgcaatgcctacacggagctaaacgatcctgtggtacagcgccagcgttttgctgatcagctcaaggatcgacagtctggagacgatgaagcgatggctttagatgaaacattttgtaatgctttagaatatgggttggctcctacaggtggctggggattaggaatagacagactctctatgcttttgaccgactcactgaacatcaaggaggttcttttcttcccggcaatgaggccaccacaggaggagtcagcagccgctcaagctcctttaacagaagagaagaaataaggagtctacacaagttttctgactaagcttagtcaattcgctattatgcactctgttctcaagttacttgtaattgcagaccatatttttcaaaaaaaaaataccaattaattattatcaaaaacctttgtaagacttttttgcaattagtagtgatttcacttatattgaagggcctttttt

SEQ ID NO: 98997 - protein, 626 aa, Arabidopsis thaliana; identical to SEQ ID NO: 40160
  peptide (1)..(626): Ceres Seq. ID no. 13601924
  misc_feature (258)..(609): Pfam Name: tRNA synthetases class II (D, K and N) Pfam Description: tRNA synthetases class II (D, K and N)
  misc_feature (36)..(608): Homolog of NCBI NO: 2501025 NR Description: Lysyl-tRNA synthetase (Lysine--tRNA ligase)
  misc_feature (256)..(623): Homolog of NCBI NO: 26354188 NR Description: unnamed protein product [Mus musculus]
  misc_feature (22)..(229): Homolog of NCBI NO: 26354188 NR Description: unnamed protein product [Mus musculus]
  misc_feature (256)..(623): Homolog of NCBI NO: 16716381 NR Description: lysyl-tRNA synthetase; DNA segment, Chr 8, Wayne
  misc_feature (22)..(229): Homolog of NCBI NO: 16716381 NR Description: lysyl-tRNA synthetase; DNA segment, Chr 8, Wayne
  misc_feature (256)..(623): Homolog of NCBI NO: 26355297 NR Description: unnamed protein product [Mus musculus]
  misc_feature (22)..(229): Homolog of NCBI NO: 26355297 NR Description: unnamed protein product [Mus musculus]
  misc_feature (256)..(623): Homolog of NCBI NO: 20072717 NR Description: Kars protein [Mus musculus]
  misc_feature (256)..(623): Homolog of NCBI NO: 23270695 NR Description: Kars protein [Mus musculus]
  misc_feature (39)..(229): Homolog of NCBI NO: 20072717 NR Description: Kars protein [Mus musculus]

SEQ ID NO: 98998 - protein, 610 aa, Arabidopsis thaliana; identical to SEQ ID NO: 40161
  peptide (1)..(610): Ceres Seq. ID no. 13601925
  misc_feature (242)..(593): Pfam Name: tRNA synthetases class II (D, K and N) Pfam Description: tRNA synthetases class II (D, K and N)
  misc_feature (20)..(592): Homolog of NCBI NO: 2501025 NR Description: Lysyl-tRNA synthetase (Lysine--tRNA ligase)
  misc_feature (240)..(607): Homolog of NCBI NO: 26354188 NR Description: unnamed protein product [Mus musculus]
  misc_feature (6)..(213): Homolog of NCBI NO: 26354188 NR Description: unnamed protein product [Mus musculus]
  misc_feature (240)..(607): Homolog of NCBI NO: 16716381 NR Description: lysyl-tRNA synthetase; DNA segment, Chr 8, Wayne
  misc_feature (6)..(213): Homolog of NCBI NO: 16716381 NR Description: lysyl-tRNA synthetase; DNA segment, Chr 8, Wayne
  misc_feature (240)..(607): Homolog of NCBI NO: 26355297 NR Description: unnamed protein product [Mus musculus]
  misc_feature (6)..(213): Homolog of NCBI NO: 26355297 NR Description: unnamed protein product [Mus musculus]
  misc_feature (240)..(607): Homolog of NCBI NO: 20072717 NR Description: Kars protein [Mus musculus]
  misc_feature (240)..(607): Homolog of NCBI NO: 23270695 NR Description: Kars protein [Mus musculus]
  misc_feature (23)..(213): Homolog of NCBI NO: 20072717 NR Description: Kars protein [Mus musculus]

SEQ ID NO: 98999 - protein, 579 aa, Arabidopsis thaliana; identical to SEQ ID NO: 40162
  peptide (1)..(579): Ceres Seq. ID no. 13601926
  misc_feature (211)..(562): Pfam Name: tRNA synthetases class II (D, K and N) Pfam Description: tRNA synthetases class II (D, K and N)
  misc_feature (1)..(561): Homolog of NCBI NO: 2501025 NR Description: Lysyl-tRNA synthetase (Lysine--tRNA ligase)
  misc_feature (209)..(576): Homolog of NCBI NO: 26354188 NR Description: unnamed protein product [Mus musculus]
  misc_feature (1)..(182): Homolog of NCBI NO: 26354188 NR Description: unnamed protein product [Mus musculus]
  misc_feature (209)..(576): Homolog of NCBI NO: 16716381 NR Description: lysyl-tRNA synthetase; DNA segment, Chr 8, Wayne
  misc_feature (1)..(182): Homolog of NCBI NO: 16716381 NR Description: lysyl-tRNA synthetase; DNA segment, Chr 8, Wayne
  misc_feature (209)..(576): Homolog of NCBI NO: 26355297 NR Description: unnamed protein product [Mus musculus]
  misc_feature (1)..(182): Homolog of NCBI NO: 26355297 NR Description: unnamed protein product [Mus musculus]
  misc_feature (209)..(576): Homolog of NCBI NO: 20072717 NR Description: Kars protein [Mus musculus]
  misc_feature (209)..(576): Homolog of NCBI NO: 23270695 NR Description: Kars protein [Mus musculus]
  misc_feature (1)..(182): Homolog of NCBI NO: 20072717 NR Description: Kars protein [Mus musculus]

SEQ ID NO: 99000 - DNA, 813 bp, Arabidopsis thaliana
  misc_feature (1)..(813): Ceres Seq. ID no. 13601927
  misc_feature: MA Experiment ID: 20000184 Result: Down-regulated in Transcription
  misc_feature: MA Experiment 20000184 PARAMETER Experiment Name: At_Shoots__P Parameter: Age (day) Value: 7
  misc_feature: MA Experiment 20000184 PARAMETER Experiment Name: At_Shoots__P Parameter: Tissue Value: Shoots vs. Whole Plant
attatagagaaaaagagctttttcccggaaagttgttctcatcttggaaaatcaaatctcggaaacgcagtcttcagctaaatcatgagcaacgagtacgattatctgttcaagcttttgttgatcggtgactcctctgttggaaaatcgtgtcttcttctccgattcgctgatgatgcttacattgacagctacataagcaccattggtgttgacttcaaaattaggacgattgagcaggatgggaagacgattaagctgcaaatttgggatactgctggacaggagcgtttcaggaccatcactagcagctattacagaggagctcatggaatcattattgtttatgactgtactgagatggaaagcttcaacaatgtgaagcagtggttgagtgagatcgatagatatgccaatgagagtgtttgcaagcttttaatcggtaacaagaatgatatggttgaaagcaaagttgtttccaccgaaactggaagggccttagcagatgagcttggaattccctttcttgagaccagtgccaaggattctattaacgttgaacaggcattcttaactattgctggcgagataaaaaagaaaatgggaagccaaacgaatgcaaacaagacatctggtcctggaactgtccaaatgaaaggtcagccaatccaacagaacaatggcggttgctgcggtcagtagtttaaaaaatgttttaatcaaaactatctgagactctttttttacttcctttttaactaagtgttgtgaaaaccaatggctgtttaaaacaactaagaaatgtaatattcc

SEQ ID NO: 99001 - protein, 205 aa, Arabidopsis thaliana; identical to SEQ ID NO: 36924
  peptide (1)..(205): Ceres Seq. ID no. 13601928
  misc_feature (10)..(171): Pfam Name: Ras family Pfam Description: Ras family
  misc_feature (1)..(205): Homolog of NCBI NO: 15229836 NR Description: GTP-binding protein, putative [Arabidopsis
  misc_feature (1)..(205): Homolog of NCBI NO: 7438392 NR Description: GTP-binding protein homolog - turnip
  misc_feature (1)..(204): Homolog of NCBI NO: 1053065 NR Description: small GTP-binding protein
  misc_feature (1)..(204): Homolog of NCBI NO: 7438373 NR Description: GTP-binding protein RAB1 - garden petunia
  misc_feature (1)..(204): Homolog of NCBI NO: 1370162 NR Description: RAB1A [Lotus japonicus]
  misc_feature (1)..(204): Homolog of NCBI NO: 303748 NR Description: GTP-binding protein [Pisum sativum]
  misc_feature (1)..(204): Homolog of NCBI NO: 541948 NR Description: GTP-binding protein rab1 - soybean
  misc_feature (1)..(203): Homolog of NCBI NO: 34914060 NR Description: putative RIC1_ORYSA RAS-RELATED PROTEIN RIC1
  misc_feature (1)..(203): Homolog of NCBI NO: 730510 NR Description: RAS-RELATED PROTEIN RIC1 >gi|542150|pir||S38740
  misc_feature (1)..(203): Homolog of NCBI NO: 303750 NR Description: GTP-binding protein [Pisum sativum]

SEQ ID NO: 99002 - protein, 113 aa, Arabidopsis thaliana; identical to SEQ ID NO: 36925
  peptide (1)..(113): Ceres Seq. ID no. 13601929
  misc_feature (1)..(79): Pfam Name: Ras family Pfam Description: Ras family
  misc_feature (1)..(113): Homolog of NCBI NO: 15229836 NR Description: GTP-binding protein, putative [Arabidopsis
  misc_feature (1)..(113): Homolog of NCBI NO: 7438392 NR Description: GTP-binding protein homolog - turnip
  misc_feature (1)..(112): Homolog of NCBI NO: 1053065 NR Description: small GTP-binding protein
  misc_feature (1)..(112): Homolog of NCBI NO: 7438373 NR Description: GTP-binding protein RAB1 - garden petunia
  misc_feature (1)..(112): Homolog of NCBI NO: 1370162 NR Description: RAB1A [Lotus japonicus]
  misc_feature (1)..(112): Homolog of NCBI NO: 303748 NR Description: GTP-binding protein [Pisum sativum]
  misc_feature (1)..(112): Homolog of NCBI NO: 541948 NR Description: GTP-binding protein rab1 - soybean
  misc_feature (1)..(111): Homolog of NCBI NO: 34914060 NR Description: putative RIC1_ORYSA RAS-RELATED PROTEIN RIC1
  misc_feature (1)..(111): Homolog of NCBI NO: 730510 NR Description: RAS-RELATED PROTEIN RIC1 >gi|542150|pir||S38740
  misc_feature (1)..(111): Homolog of NCBI NO: 303750 NR Description: GTP-binding protein [Pisum sativum]

SEQ ID NO: 99003 - DNA, 1111 bp, Arabidopsis thaliana
  misc_feature (1)..(1111): Ceres Seq. ID no. 13601936
  misc_feature: MA Experiment ID: 108501 Result: Up-regulated in Transcription
  misc_feature: MA Experiment 108501 PARAMETER Experiment Name: At_ap2_floral_buds_cDNA_P Parameter: Plant Line Value: ap2 (Ler.)
  misc_feature: MA Experiment 108501 PARAMETER Experiment Name: At_ap2_floral_buds_cDNA_P Parameter: Tissue Value: Closed Flower
  misc_feature: MA Experiment ID: 108576 Result: Up-regulated in Transcription
  misc_feature: MA Experiment 108576 PARAMETER Experiment Name: At_42deg_Heat_cDNA_P Parameter: Temperature (deg C) Value: 42 vs. 22
  misc_feature: MA Experiment 108576 PARAMETER Experiment Name: At_42deg_Heat_cDNA_P Parameter: Timepoint (hr) Value: 1
  misc_feature: MA Experiment 108576 PARAMETER Experiment Name: At_42deg_Heat_cDNA_P Parameter: Tissue Value: Aerial
  misc_feature: MA Experiment ID: 20000069 Result: Down-regulated in Transcription
  misc_feature: MA Experiment 20000069 PARAMETER Experiment Name: At_100uM_ABA_Mutants_cDNA_P Parameter: Plant Line Value: CS23
  misc_feature: MA Experiment 20000069 PARAMETER Experiment Name: At_100uM_ABA_Mutants_cDNA_P Parameter: Timepoint (hr) Value: 6
  misc_feature: MA Experiment 20000069 PARAMETER Experiment Name: At_100uM_ABA_Mutants_cDNA_P Parameter: Tissue Value: Aerial
  misc_feature: MA Experiment 20000069 PARAMETER Experiment Name: At_100uM_ABA_Mutants_cDNA_P Parameter: Treatment Value: 100uM ABA vs. No Treatment
  misc_feature: MA Experiment ID: 20000071 Result: Down-regulated in Transcription
  misc_feature: MA Experiment 20000071 PARAMETER Experiment Name: At_100uM_ABA_Mutants_cDNA_P Parameter: Plant Line Value: CS8104
  misc_feature: MA Experiment 20000071 PARAMETER Experiment Name: At_100uM_ABA_Mutants_cDNA_P Parameter: Timepoint (hr) Value: 6
  misc_feature: MA Experiment 20000071 PARAMETER Experiment Name: At_100uM_ABA_Mutants_cDNA_P Parameter: Tissue Value: Aerial
  misc_feature: MA Experiment 20000071 PARAMETER Experiment Name: At_100uM_ABA_Mutants_cDNA_P Parameter: Treatment Value: 100uM ABA vs. No Treatment
  misc_feature: MA Experiment ID: 20000111 Result: Up-regulated in Transcription
  misc_feature: MA Experiment 20000111 PARAMETER Experiment Name: At_42deg_Heat_cDNA_P Parameter: Temperature (deg C) Value: 42 vs. 22
  misc_feature: MA Experiment 20000111 PARAMETER Experiment Name: At_42deg_Heat_cDNA_P Parameter: Timepoint (hr) Value: 6
  misc_feature: MA Experiment 20000111 PARAMETER Experiment Name: At_42deg_Heat_cDNA_P Parameter: Tissue Value: Aerial
  misc_feature: MA Experiment ID: 20000113 Result: Up-regulated in Transcription
  misc_feature: MA Experiment 20000113 PARAMETER Experiment Name: At_42deg_Heat_cDNA_P Parameter: Temperature (deg C) Value: 42 vs. 22
  misc_feature: MA Experiment 20000113 PARAMETER Experiment Name: At_42deg_Heat_cDNA_P Parameter: Timepoint (hr) Value: 8
  misc_feature: MA Experiment 20000113 PARAMETER Experiment Name: At_42deg_Heat_cDNA_P Parameter: Tissue Value: Aerial
  misc_feature: MA Experiment ID: 20000234 Result: Up-regulated in Transcription
  misc_feature: MA Experiment 20000234 PARAMETER Experiment Name: At_Siliques_P Parameter: Age (day) Value: 21
  misc_feature: MA Experiment 20000234 PARAMETER Experiment Name: At_Siliques_P Parameter: Organism Value: A. thaliana
  misc_feature: MA Experiment 20000234 PARAMETER Experiment Name: At_Siliques_P Parameter: Plant Line Value: WS
  misc_feature: MA Experiment 20000234 PARAMETER Experiment Name: At_Siliques_P Parameter: Tissue Value: Less Than 5mm Siliques vs. Whole Plant
  misc_feature: MA Experiment ID: 20000235 Result: Up-regulated in Transcription
  misc_feature: MA Experiment 20000235 PARAMETER Experiment Name: At_Siliques_P Parameter: Age (day) Value: 21
  misc_feature: MA Experiment 20000235 PARAMETER Experiment Name: At_Siliques_P Parameter: Organism Value: A. thaliana
  misc_feature: MA Experiment 20000235 PARAMETER Experiment Name: At_Siliques_P Parameter: Plant Line Value: WS
  misc_feature: MA Experiment 20000235 PARAMETER Experiment Name: At_Siliques_P Parameter: Tissue Value: 5-10mm Siliques vs. Whole Plant
  misc_feature: MA Experiment ID: 20000264 Result: Up-regulated in Transcription
  misc_feature: MA Experiment 20000264 PARAMETER Experiment Name: At_Open_Flower_P Parameter: Age (day) Value: 21
  misc_feature: MA Experiment 20000264 PARAMETER Experiment Name: At_Open_Flower_P Parameter: Plant Line Value: WS
  misc_feature: MA Experiment 20000264 PARAMETER Experiment Name: At_Open_Flower_P Parameter: Tissue Value: Open Flower vs. Whole Plant
  misc_feature: MA Experiment ID: 20000286 Result: Up-regulated in Transcription
  misc_feature: MA Experiment 20000286 PARAMETER Experiment Name: At_Open_Flower_P Parameter: Age (day) Value: 21
  misc_feature: MA Experiment 20000286 PARAMETER Experiment Name: At_Open_Flower_P Parameter: Plant Line Value: WS
  misc_feature: MA Experiment 20000286 PARAMETER Experiment Name: At_Open_Flower_P Parameter: Tissue Value: Half Open vs. Whole Plant
  misc_feature: MA Experiment ID: 20000437 Result: Down-regulated in Transcription
  misc_feature: MA Experiment 20000437 PARAMETER Experiment Name: At_Drought_P Parameter: Age (day) Value: 8
  misc_feature: MA Experiment 20000437 PARAMETER Experiment Name: At_Drought_P Parameter: Organism Value: A. thaliana
  misc_feature: MA Experiment 20000437 PARAMETER Experiment Name: At_Drought_P Parameter: Plant Line Value: WS
  misc_feature: MA Experiment 20000437 PARAMETER Experiment Name: At_Drought_P Parameter: Timepoint (hr) Value: 24
  misc_feature: MA Experiment 20000437 PARAMETER Experiment Name: At_Drought_P Parameter: Tissue Value: Whole Plant
  misc_feature: MA Experiment 20000437 PARAMETER Experiment Name: At_Drought_P Parameter: Treatment Value: Drought vs. No Drought
  misc_feature: MA Experiment ID: 20000438 Result: Down-regulated in Transcription
  misc_feature: MA Experiment 20000438 PARAMETER Experiment Name: At_Shoots__P Parameter: Age (day) Value: 14
  misc_feature: MA Experiment 20000438 PARAMETER Experiment Name: At_Shoots__P Parameter: Tissue Value: Shoots vs. Whole Plant
  misc_feature: MA Experiment ID: 20000527 Result: Down-regulated in Transcription
  misc_feature: MA Experiment 20000527 PARAMETER Experiment Name: At_10percent_PEG_P Parameter: Age (day) Value: 20
  misc_feature: MA Experiment 20000527 PARAMETER Experiment Name: At_10percent_PEG_P Parameter: Organism Value: A. thaliana
  misc_feature: MA Experiment 20000527 PARAMETER Experiment Name: At_10percent_PEG_P Parameter: Plant Line Value: WS
  misc_feature: MA Experiment 20000527 PARAMETER Experiment Name: At_10percent_PEG_P Parameter: Timepoint (day) Value: 20
  misc_feature: MA Experiment 20000527 PARAMETER Experiment Name: At_10percent_PEG_P Parameter: Tissue Value: Whole Plant
  misc_feature: MA Experiment 20000527 PARAMETER Experiment Name: At_10percent_PEG_P Parameter: Treatment Value: 10percent PEG vs. No Treatment
  misc_feature: MA Experiment ID: 20001556 Result: Down-regulated in Transcription
  misc_feature: MA Experiment 20001556 PARAMETER Experiment Name: At_Drought_Soil_Dry_P Parameter: Age (day) Value: 26
  misc_feature: MA Experiment 20001556 PARAMETER Experiment Name: At_Drought_Soil_Dry_P Parameter: Organism Value: A. thaliana
  misc_feature: MA Experiment 20001556 PARAMETER Experiment Name: At_Drought_Soil_Dry_P Parameter: Plant Line Value: WS
  misc_feature: MA Experiment 20001556 PARAMETER Experiment Name: At_Drought_Soil_Dry_P Parameter: Post Timepoint (hr) Value: None
  misc_feature: MA Experiment 20001556 PARAMETER Experiment Name: At_Drought_Soil_Dry_P Parameter: Post-Treatment Value: None
  misc_feature: MA Experiment 20001556 PARAMETER Experiment Name: At_Drought_Soil_Dry_P Parameter: Timepoint (day) Value: 12
  misc_feature: MA Experiment 20001556 PARAMETER Experiment Name: At_Drought_Soil_Dry_P Parameter: Treatment Value: Drought vs. No Drought
  misc_feature: MA Experiment ID: 20001907 Result: Down-regulated in Transcription
  misc_feature: MA Experiment 20001907 PARAMETER Experiment Name: At_Drought_Reproduction_P Parameter: Age (day) Value: 37
  misc_feature: MA Experiment 20001907 PARAMETER Experiment Name: At_Drought_Reproduction_P Parameter: Organism Value: A. thaliana
  misc_feature: MA Experiment 20001907 PARAMETER Experiment Name: At_Drought_Reproduction_P Parameter: Plant Line Value: WS
  misc_feature: MA Experiment 20001907 PARAMETER Experiment Name: At_Drought_Reproduction_P Parameter: Timepoint (day) Value: 7
  misc_feature: MA Experiment 20001907 PARAMETER Experiment Name: At_Drought_Reproduction_P Parameter: Tissue Value: Siliques
  misc_feature: MA Experiment 20001907 PARAMETER Experiment Name: At_Drought_Reproduction_P Parameter: Treatment Value: Drought vs. No Drought
  misc_feature: MA Experiment ID: 20001911 Result: Down-regulated in Transcription
  misc_feature: MA Experiment 20001911 PARAMETER Experiment Name: At_Drought_Reproduction_P Parameter: Age (day) Value: 40
  misc_feature: MA Experiment 20001911 PARAMETER Experiment Name: At_Drought_Reproduction_P Parameter: Organism Value: A. thaliana
  misc_feature: MA Experiment 20001911 PARAMETER Experiment Name: At_Drought_Reproduction_P Parameter: Plant Line Value: WS
  misc_feature: MA Experiment 20001911 PARAMETER Experiment Name: At_Drought_Reproduction_P Parameter: Timepoint (day) Value: 10
  misc_feature: MA Experiment 20001911 PARAMETER Experiment Name: At_Drought_Reproduction_P Parameter: Tissue Value: Flowers
  misc_feature: MA Experiment 20001911 PARAMETER Experiment Name: At_Drought_Reproduction_P Parameter: Treatment Value: Drought vs. No Drought
atcataaacccaccgagacgatgtctctcatcatcgtcttcttcttcttctcactcttgctcacatccaatggacagttcttcgacgagagcaagaactatgaaggctcctccgatctcgttgaccttcaataccacttgggtccggtcatatcctcgccggtgacgagtctctacatcatttggtacggccgatggaacccaactcaccaatctataatccgagactttctctactctgtctctgcaccggcaccggctcagtacccgtcagtatccaactggtggaagacagtgaggctatacagagaccagacaggttccaacatcaccgacactcttgtcttatccggagagttccacgactcaacgtactctcatggatctcatctcactcgcttctctgttcagtctgtgatcagaactgccttgacttccaagttaccactaaacgctgtaaacggcttgtacttagtcttgacctcggatgatgtagagatgcaagagttctgcagagcgatttgcgggtttcattacttcactttcccaagcgttgtgggtgcaaccgtaccgtatgcttgggtgggcaacagtgagagacagtgtccagaaatgtgtgcgtacccatttgcacagcctaagccatttccggggagcgggtttgtagccagagagaagatgaaaccgccaaatggagaggtaggaatcgatgggatgatcagtgtgatagctcatgagctggcagaagtgtcgagtaacccgatgttaaacggatggtatggaggagaggacgcgacagcaccgacagagatagcggatttatgtttgggagtgtatgggtcaggaggaggaggaggctatatgggaagtgtgtataaggataggtggaggaatgtgtataatgtgaagggcgttaaaggaagaaagtatctaattcaatgggtttgggatcttaataggaacagatgctttggaccaaacgctatgaattagagactatcatgtttgttacctcttttcaccaaagccttgagcttgaagcttggggaaacctgtatatggtttatcttttccttgcctagtcgattctatgcatttgattgtttaagact

SEQ ID NO: 99004 - protein, 329 aa, Arabidopsis thaliana; identical to SEQ ID NO: 24227
  peptide (1)..(329): Ceres Seq. ID no. 13601937
  misc_feature (42)..(326): Pfam Name: Phosphate-induced protein 1 conserved region Pfam Description: Phosphate-induced protein 1 conserved region
  misc_feature (1)..(329): Homolog of NCBI NO: 25408357 NR Description: hypothetical protein At2g35150 [imported] -
  misc_feature (7)..(329): Homolog of NCBI NO: 18403760 NR Description: expressed protein [Arabidopsis thaliana] Expressed protein [Arabidopsis thaliana] unknown protein [Arabidopsis thaliana]
  misc_feature (30)..(329): Homolog of NCBI NO: 18398352 NR Description: expressed protein [Arabidopsis thaliana]
  misc_feature (30)..(329): Homolog of NCBI NO: 21594010 NR Description: unknown [Arabidopsis thaliana]
  misc_feature (22)..(329): Homolog of NCBI NO: 15242118 NR Description: expressed protein [Arabidopsis thaliana] gb|AAD25141.1~gene_id:K17N15.10~similar to unknown protein thaliana] >gi|16226762|gb|AAL16255.1|AF428325_1
  misc_feature (22)..(329): Homolog of NCBI NO: 16604527 NR Description: AT5g51550/K17N15_10 [Arabidopsis thaliana]
  misc_feature (22)..(329): Homolog of NCBI NO: 21592873 NR Description: unknown [Arabidopsis thaliana]
  misc_feature (37)..(327): Homolog of NCBI NO: 34901824 NR Description: putative phi-1(phosphate-induced protein 1)
  misc_feature (30)..(329): Homolog of NCBI NO: 11875173 NR Description: contains ESTs
  misc_feature (36)..(322): Homolog of NCBI NO: 15219504 NR Description: phosphate-induced (phi-1) protein -related

SEQ ID NO: 99005 - protein, 323 aa, Arabidopsis thaliana; identical to SEQ ID NO: 24228
  peptide (1)..(323): Ceres Seq. ID no. 13601938
  misc_feature (36)..(320): Pfam Name: Phosphate-induced protein 1 conserved region Pfam Description: Phosphate-induced protein 1 conserved region
  misc_feature (1)..(323): Homolog of NCBI NO: 25408357 NR Description: hypothetical protein At2g35150 [imported] -
  misc_feature (1)..(323): Homolog of NCBI NO: 18403760 NR Description: expressed protein [Arabidopsis thaliana] Expressed protein [Arabidopsis thaliana] unknown protein [Arabidopsis thaliana]
  misc_feature (24)..(323): Homolog of NCBI NO: 18398352 NR Description: expressed protein [Arabidopsis thaliana]
  misc_feature (24)..(323): Homolog of NCBI NO: 21594010 NR Description: unknown [Arabidopsis thaliana]
  misc_feature (16)..(323): Homolog of NCBI NO: 15242118 NR Description: expressed protein [Arabidopsis thaliana] gb|AAD25141.1~gene_id:K17N15.10~similar to unknown protein thaliana] >gi|16226762|gb|AAL16255.1|AF428325_1
  misc_feature (16)..(323): Homolog of NCBI NO: 16604527 NR Description: AT5g51550/K17N15_10 [Arabidopsis thaliana]
  misc_feature (16)..(323): Homolog of NCBI NO: 21592873 NR Description: unknown [Arabidopsis thaliana]
  misc_feature (31)..(321): Homolog of NCBI NO: 34901824 NR Description: putative phi-1(phosphate-induced protein 1)
  misc_feature (24)..(323): Homolog of NCBI NO: 11875173 NR Description: contains ESTs
  misc_feature (30)..(316): Homolog of NCBI NO: 15219504 NR Description: phosphate-induced (phi-1) protein -related

SEQ ID NO: 99006 - protein, 164 aa, Arabidopsis thaliana; identical to SEQ ID NO: 24229
  peptide (1)..(164): Ceres Seq. ID no. 13601939
  misc_feature (1)..(161): Pfam Name: Phosphate-induced protein 1 conserved region Pfam Description: Phosphate-induced protein 1 conserved region
  misc_feature (1)..(164): Homolog of NCBI NO: 25408357 NR Description: hypothetical protein At2g35150 [imported] -
  misc_feature (1)..(164): Homolog of NCBI NO: 18403760 NR Description: expressed protein [Arabidopsis thaliana] Expressed protein [Arabidopsis thaliana] unknown protein [Arabidopsis thaliana]
  misc_feature (1)..(164): Homolog of NCBI NO: 18398352 NR Description: expressed protein [Arabidopsis thaliana]
  misc_feature (1)..(164): Homolog of NCBI NO: 21594010 NR Description: unknown [Arabidopsis thaliana]
  misc_feature (1)..(164): Homolog of NCBI NO: 15242118 NR Description: expressed protein [Arabidopsis thaliana] gb|AAD25141.1~gene_id:K17N15.10~similar to unknown protein thaliana] >gi|16226762|gb|AAL16255.1|AF428325_1
  misc_feature (1)..(164): Homolog of NCBI NO: 16604527 NR Description: AT5g51550/K17N15_10 [Arabidopsis thaliana]
  misc_feature (1)..(164): Homolog of NCBI NO: 21592873 NR Description: unknown [Arabidopsis thaliana]
  misc_feature (1)..(162): Homolog of NCBI NO: 34901824 NR Description: putative phi-1(phosphate-induced protein 1)
  misc_feature (1)..(164): Homolog of NCBI NO: 11875173 NR Description: contains ESTs
  misc_feature (1)..(157): Homolog of NCBI NO: 15219504 NR Description: phosphate-induced (phi-1) protein -related

SEQ ID NO: 99007 - DNA, 1475 bp, Arabidopsis thaliana
  misc_feature (1)..(1475): Ceres Seq. ID no. 13601940
  misc_feature: MA Experiment ID: 108462 Result: Up-regulated in Transcription
  misc_feature: MA Experiment 108462 PARAMETER Experiment Name: At_Germinating_Seeds_cDNA_P Parameter: Age (day) Value: 2 vs. 0
  misc_feature: MA Experiment 108462 PARAMETER Experiment Name: At_Germinating_Seeds_cDNA_P Parameter: Tissue Value: Germinating Seeds
  misc_feature: MA Experiment ID: 20000171 Result: Up-regulated in Transcription
  misc_feature: MA Experiment 20000171 PARAMETER Experiment Name: At_42deg_Heat_P Parameter: Age (day) Value: 14
  misc_feature: MA Experiment 20000171 PARAMETER Experiment Name: At_42deg_Heat_P Parameter: Organism Value: A. thaliana
  misc_feature: MA Experiment 20000171 PARAMETER Experiment Name: At_42deg_Heat_P Parameter: Plant Line Value: WS
  misc_feature: MA Experiment 20000171 PARAMETER Experiment Name: At_42deg_Heat_P Parameter: Temperature (deg C) Value: 42 vs. 22
  misc_feature: MA Experiment 20000171 PARAMETER Experiment Name: At_42deg_Heat_P Parameter: Timepoint (hr) Value: 1
  misc_feature: MA Experiment 20000171 PARAMETER Experiment Name: At_42deg_Heat_P Parameter: Tissue Value: Aerial
  misc_feature: MA Experiment ID: 20000173 Result: Up-regulated in Transcription
  misc_feature: MA Experiment 20000173 PARAMETER Experiment Name: At_42deg_Heat_P Parameter: Age (day) Value: 14
  misc_feature: MA Experiment 20000173 PARAMETER Experiment Name: At_42deg_Heat_P Parameter: Organism Value: A. thaliana
  misc_feature: MA Experiment 20000173 PARAMETER Experiment Name: At_42deg_Heat_P Parameter: Plant Line Value: WS
  misc_feature: MA Experiment 20000173 PARAMETER Experiment Name: At_42deg_Heat_P Parameter: Temperature (deg C) Value: 42 vs. 22
  misc_feature: MA Experiment 20000173 PARAMETER Experiment Name: At_42deg_Heat_P Parameter: Timepoint (hr) Value: 6
  misc_feature: MA Experiment 20000173 PARAMETER Experiment Name: At_42deg_Heat_P Parameter: Tissue Value: Aerial
aagcaacctcatttataaacccctcgatttcttgcgttgttttcgaatttttattctctttcttttttttcttctcctctcgattcgaaaatttcacatctccggaattttcatttctggagaatattgtttcacatccctacaatggcgtctgagaatctgaatgacaagatctctgtttttaagaaactcaaagccaaatcagataataagatttgttttgattgcaatgcgaagaacccaacatgggcttccgttacttacgggatctttctctgcatcgattgctcagctgttcatcggagtcttggcgtccacattagcttcgtcaggtcaaccaatttagattcatggagctcagagcaattgaaaatgatgatatatggaggaaacaacagggcacaagtctttttcaaacagtacggatggagcgatggaggtaaaaccgaggctaagtatacctcaagagctgctgatttgtataaacagatacttgctaaagaagttgctaaaagcaaggctgaggaagaattggatttgcctccatctcctcctgattcaacacaagtgcctaatggactctccagcatcaaaaccagtgaagctcttaaagagagtaatactctaaagcagcaagaaaagcctgatgttgttcccgtctcaccaagaatttctcgcagcgttaagaaacctcttggtgctaagaagacaggcaaaactggcggacttggcgcccggaagctaactactaagtcgagtgggactctttatgatcaaaagccagaggaatctgttattatacaagcgacatcaccagtttcagctaaatcagccaggtcatcgttttcctctcgttttgattatgcggacaatgttcaaaacagggaagattacatgagccctcaagtcgttagtcatgtagctccaccaaaatcatcaggcttctttgaggaagagttggagatgaacggaggcaggtttcagaagaaaccaatcacaagttcctcaaaactgcaaattcaagaaacagacgaagcacggaagaaattcacaaacgccaaatcaatatcctctgctcagtactttggaaatgacaacaactctgctgatcttgaggccaaaagttcattgaagaagttttctggttcatcagcaatctctagtgctgatctgtttggagacggtgatggagatttccctcttgatctcactgcgggtgatcttctcaaccgcctatctctccaggcacaacaagacatatcatcattgaagaacatggcagaggagacaaagaagaagcttggctctgttgcttccagcttatgggtttgaaatgttcataattttctctaaagtccatcaaaacttttttattttattttttcttactctaatttccatttacaaaagcagttatcctattcttttactagggaaactctgttttgtttaattgaaagttaccaatattttgt

SEQ ID NO: 99008 - protein, 395 aa, Arabidopsis thaliana; identical to SEQ ID NO: 43409
  peptide (1)..(395): Ceres Seq. ID no. 13601941
  misc_feature (10)..(126): Pfam Name: Putative GTPase activating protein for Arf Pfam Description: Putative GTPase activating protein for Arf
  misc_feature (1)..(395): Homolog of NCBI NO: 18403775 NR Description: ARF GTPase-activating domain-containing protein
  misc_feature (1)..(394): Homolog of NCBI NO: 15237500 NR Description: ARF GTPase-activating domain-containing protein
  misc_feature (2)..(394): Homolog of NCBI NO: 7487780 NR Description: hypothetical protein T6K21.70 - Arabidopsis >gi|2894598|emb|CAA17132.1| putative protein [Arabidopsis >gi|7268541|emb|CAB78791.1| putative protein [Arabidopsis
  misc_feature (2)..(394): Homolog of NCBI NO: 18414983 NR Description: ARF GTPase-activating domain-containing protein thaliana] >gi|24030421|gb|AAN41368.1| unknown protein
  misc_feature (2)..(394): Homolog of NCBI NO: 13430530 NR Description: unknown protein [Arabidopsis thaliana]
  misc_feature (8)..(393): Homolog of NCBI NO: 37537094 NR Description: unknown protein [Oryza sativa (japonica
  misc_feature (1)..(392): Homolog of NCBI NO: 29126345 NR Description: putative zinc finger protein [Oryza sativa
  misc_feature (1)..(141): Homolog of NCBI NO: 27695479 NR Description: Similar to ADP-ribosylation factor GTPase
  misc_feature (292)..(393): Homolog of NCBI NO: 27695479 NR Description: Similar to ADP-ribosylation factor GTPase
  misc_feature (141)..(393): Homolog of NCBI NO: 37362182 NR Description: ADP-ribosylation factor GTPase activating protein

SEQ ID NO: 99009 - protein, 319 aa, Arabidopsis thaliana; identical to SEQ ID NO: 43410
  peptide (1)..(319): Ceres Seq. ID no. 13601942
  misc_feature (1)..(319): Homolog of NCBI NO: 18403775 NR Description: ARF GTPase-activating domain-containing protein
  misc_feature (1)..(318): Homolog of NCBI NO: 15237500 NR Description: ARF GTPase-activating domain-containing protein
  misc_feature (1)..(318): Homolog of NCBI NO: 7487780 NR Description: hypothetical protein T6K21.70 - Arabidopsis >gi|2894598|emb|CAA17132.1| putative protein [Arabidopsis >gi|7268541|emb|CAB78791.1| putative protein [Arabidopsis
  misc_feature (1)..(318): Homolog of NCBI NO: 18414983 NR Description: ARF GTPase-activating domain-containing protein thaliana] >gi|24030421|gb|AAN41368.1| unknown protein
  misc_feature (1)..(318): Homolog of NCBI NO: 13430530 NR Description: unknown protein [Arabidopsis thaliana]
  misc_feature (1)..(317): Homolog of NCBI NO: 37537094 NR Description: unknown protein [Oryza sativa (japonica
  misc_feature (1)..(316): Homolog of NCBI NO: 29126345 NR Description: putative zinc finger protein [Oryza sativa
  misc_feature (1)..(65): Homolog of NCBI NO: 27695479 NR Description: Similar to ADP-ribosylation factor GTPase
  misc_feature (216)..(317): Homolog of NCBI NO: 27695479 NR Description: Similar to ADP-ribosylation factor GTPase
  misc_feature (65)..(317): Homolog of NCBI NO: 37362182 NR Description: ADP-ribosylation factor GTPase activating protein

SEQ ID NO: 99010 - protein, 318 aa, Arabidopsis thaliana; identical to SEQ ID NO: 43411
  peptide (1)..(318): Ceres Seq. ID no. 13601943
  misc_feature (1)..(318): Homolog of NCBI NO: 18403775 NR Description: ARF GTPase-activating domain-containing protein
  misc_feature (1)..(317): Homolog of NCBI NO: 15237500 NR Description: ARF GTPase-activating domain-containing protein
  misc_feature (1)..(317): Homolog of NCBI NO: 7487780 NR Description: hypothetical protein T6K21.70 - Arabidopsis >gi|2894598|emb|CAA17132.1| putative protein [Arabidopsis >gi|7268541|emb|CAB78791.1| putative protein [Arabidopsis
  misc_feature (1)..(317): Homolog of NCBI NO: 18414983 NR Description: ARF GTPase-activating domain-containing protein thaliana] >gi|24030421|gb|AAN41368.1| unknown protein
  misc_feature (1)..(317): Homolog of NCBI NO: 13430530 NR Description: unknown protein [Arabidopsis thaliana]
  misc_feature (1)..(316): Homolog of NCBI NO: 37537094 NR Description: unknown protein [Oryza sativa (japonica
  misc_feature (1)..(315): Homolog of NCBI NO: 29126345 NR Description: putative zinc finger protein [Oryza sativa
  misc_feature (1)..(64): Homolog of NCBI NO: 27695479 NR Description: Similar to ADP-ribosylation factor GTPase
  misc_feature (215)..(316): Homolog of NCBI NO: 27695479 NR Description: Similar to ADP-ribosylation factor GTPase
  misc_feature (64)..(316): Homolog of NCBI NO: 37362182 NR Description: ADP-ribosylation factor GTPase activating protein

SEQ ID NO: 99011 - DNA, 875 bp, Arabidopsis thaliana
  misc_feature (1)..(875): Ceres Seq. ID no. 13601958
gggagtgagattgaaatttctggcggctctttcaaaggaaaattgtagattgtattcaaatacgttgaggaagaaagaaggtgacaaagaggaagacgaagaagaaagttgtagaaagtaatggtgttgtgggagttagctctaggaacagcttacttcttggggattaggcggacttaccggctcgcattgaagacccagcgtcggcttgttagccctaagcatccaaggattcgagattttatgcatcggaggacttatcaaatctttgatatggcacttagggtccacaagaacatacaacagagagacatggttattggtcggaatcttggaaactggattctccgggggcttgaccggatgaagccatcggctcaggttctactaccaaagaatacagagccaagcatagacaaggcgaaaagagtattacaatcaacccgtcttaaaccacatgttaacacgcagactcctcagaaccgtgaggttgataggaacttgttcatgtccttgaggaactttcggtccaaataccccattgcttcgatgatgatgatcaaacctccaagatccacgggaactactactcagtacaggccttacagtgttggtgaatccagtctgattaaaccaatttatgctagaggcgggttcaacagcgtcatcaggaaggacattttgcagtggatggtgcagaagagataaagccgccaaaattcatcaaaggcccttctgtttcttagattacaacatactcagaaggaaacacttgtctcaaccgtatcactttgtatgagtttttaataaccggtggattgataggaaaatctcctggacaactaaaaattgtgactagtattacttacttgact

SEQ ID NO: 99012 - protein, 195 aa, Arabidopsis thaliana
  peptide (1)..(195): Ceres Seq. ID no. 13601959
  misc_feature (1)..(195): Homolog of NCBI NO: 30686423 NR Description: expressed protein [Arabidopsis thaliana] unknown protein [Arabidopsis thaliana]
  misc_feature (45)..(195): Homolog of NCBI NO: 25370789 NR Description: hypothetical protein At2g35480 [imported] - thaliana >gi|3608140|gb|AAC36173.1| unknown protein [Arabidopsis
  misc_feature (1)..(194): Homolog of NCBI NO: 15222623 NR Description: expressed protein [Arabidopsis thaliana]
MVLWELALGTAYFLGIRRTYRLALKTQRRLVSPKHPRIRDFMHRRTYQIFDMALRVHKNIQQRDMVIGRNLGNWILRGLDRMKPSAQVLLPKNTEPSIDKAKRVLQSTRLKPHVNTQTPQNREVDRNLFMSLRNFRSKYPIASMMMIKPPRSTGTTTQYRPYSVGESSLIKPIYARGGFNSVIRKDILQWMVQKR

SEQ ID NO: 99013 - protein, 154 aa, Arabidopsis thaliana
  peptide (1)..(154): Ceres Seq. ID no. 13601960
  misc_feature (1)..(154): Homolog of NCBI NO: 30686423 NR Description: expressed protein [Arabidopsis thaliana] unknown protein [Arabidopsis thaliana]
  misc_feature (4)..(154): Homolog of NCBI NO: 25370789 NR Description: hypothetical protein At2g35480 [imported] - thaliana >gi|3608140|gb|AAC36173.1| unknown protein [Arabidopsis
  misc_feature (1)..(153): Homolog of NCBI NO: 15222623 NR Description: expressed protein [Arabidopsis thaliana]
MHRRTYQIFDMALRVHKNIQQRDMVIGRNLGNWILRGLDRMKPSAQVLLPKNTEPSIDKAKRVLQSTRLKPHVNTQTPQNREVDRNLFMSLRNFRSKYPIASMMMIKPPRSTGTTTQYRPYSVGESSLIKPIYARGGFNSVIRKDILQWMVQKR

SEQ ID NO: 99014 - protein, 144 aa, Arabidopsis thaliana
  peptide (1)..(144): Ceres Seq. ID no. 13601961
  misc_feature (1)..(144): Homolog of NCBI NO: 30686423 NR Description: expressed protein [Arabidopsis thaliana] unknown protein [Arabidopsis thaliana]
  misc_feature (1)..(144): Homolog of NCBI NO: 25370789 NR Description: hypothetical protein At2g35480 [imported] - thaliana >gi|3608140|gb|AAC36173.1| unknown protein [Arabidopsis
  misc_feature (1)..(143): Homolog of NCBI NO: 15222623 NR Description: expressed protein [Arabidopsis thaliana]
MALRVHKNIQQRDMVIGRNLGNWILRGLDRMKPSAQVLLPKNTEPSIDKAKRVLQSTRLKPHVNTQTPQNREVDRNLFMSLRNFRSKYPIASMMMIKPPRSTGTTTQYRPYSVGESSLIKPIYARGGFNSVIRKDILQWMVQKR

SEQ ID NO: 99015 - DNA, 1295 bp, Arabidopsis thaliana
  misc_feature (1)..(1295): Ceres Seq. ID no. 13601962
  misc_feature: MA Experiment ID: 20000307 Result: Down-regulated in Transcription
  misc_feature: MA Experiment 20000307 PARAMETER Experiment Name: At_Germinating_Seeds_Sub_P Parameter: Age (hr) Value: 24 vs. 0
  misc_feature: MA Experiment 20000307 PARAMETER Experiment Name: At_Germinating_Seeds_Sub_P Parameter: Organism Value: A. thaliana
  misc_feature: MA Experiment 20000307 PARAMETER Experiment Name: At_Germinating_Seeds_Sub_P Parameter: Plant Line Value: WS
  misc_feature: MA Experiment 20000307 PARAMETER Experiment Name: At_Germinating_Seeds_Sub_P Parameter: Tissue Value: Germinating Seeds
gagagaaagagtgctcagagtgagcgagagcatagcggtggagtgtcgccactggtaactccgacgatttttctcgtttgcgtaagccgaaagatcactctttttttggtgtcgactctgtttctgccgtatgattcttttggaaccctagtcacaggtttttgattttgcatggtttattgtagcgagttagttttttccgcatatgggtcttgattcttctttcgttaactcttctgggtttgccgattttcaatcaaacaatcttgaaagatcaaatcttttcctctacgagctgcaacgcgaaggtgtgatctttccactgaaactagctatcaagatgaattcatttcctgcacaaaaccttatgctatctgctacaaacgcaaacaaggactcaggcttgcgtacgtctaatgctcattggttacattcatgtatcgccgttccaaagaccacaggcattgatctttctcaggaacctcctgctgaaggtgtgatggtgcctcaatctcatttgtttcctcctcctattagagattccagaaacgatactgaaactgtgaaacagaagtccgtaaatcagtctccttcgaaagctttgaagccaaaaccgcaaaggaagaaacgctctgtatccaacaagtcaaagaaaacacctagcataccagaaacaaaacgtgagaaaaagaatctggacatcaacattgacatctcaagctttgatacttctggggttcctcctcctgtatgttcatgtacaggcgtttcaagggtttgctacaaatggggcatgggcggttggcaatcctcatgttgtaccatcagcatatcgacatacccactacccatgagcacaacaagacctggagctcgtcttgcaggaagaaaaatgagcaatggtgcttatgttaagctccttgcgaggcttgcggacgaaggctatgacctctctcaccctcttgatctcaagaaccattgggccagacacggtactaacaagtttgtgaccatcaagtagtcgtttcattagttgggtttgatttagatattagcttttgtggcttctttttaagtccttttcacagtcttagccttttggtatatatttgggagtactgtatttgctatagtagnggtatcctttacttgtttcccctgaagtagagtatatttcctgcaaaaatcccaacagtcgtggaaacacattatggcatgaacttgggtaacttcggtcatgcaacacattgctttggaattcacaaataaatttcaataagaaatgaatattagcg

SEQ ID NO: 99016 - protein, 271 aa, Arabidopsis thaliana
  peptide (1)..(271): Ceres Seq. ID no. 13601963
  misc_feature (1)..(271): Homolog of NCBI NO: 30686452 NR Description: expressed protein [Arabidopsis thaliana]
  misc_feature (46)..(271): Homolog of NCBI NO: 30686455 NR Description: expressed protein [Arabidopsis thaliana]
  misc_feature (91)..(271): Homolog of NCBI NO: 26190436 NR Description: barley B recombinant [Hordeum vulgare]
MGLDSSFVNSSGFADFQSNNLERSNLFLYELQREGVIFPLKLAIKMNSFPAQNLMLSATNANKDSGLRTSNAHWLHSCIAVPKTTGIDLSQEPPAEGVMVPQSHLFPPPIRDSRNDTETVKQKSVNQSPSKALKPKPQRKKRSVSNKSKKTPSIPETKREKKNLDINIDISSFDTSGVPPPVCSCTGVSRVCYKWGMGGWQSSCCTISISTYPLPMSTTRPGARLAGRKMSNGAYVKLLARLADEGYDLSHPLDLKNHWARHGTNKFVTIK

SEQ ID NO: 99017 - protein, 226 aa, Arabidopsis thaliana; identical to SEQ ID NO: 72076
  peptide (1)..(226): Ceres Seq. ID no. 13601964
  misc_feature (1)..(226): Homolog of NCBI NO: 30686452 NR Description: expressed protein [Arabidopsis thaliana]
  misc_feature (1)..(226): Homolog of NCBI NO: 30686455 NR Description: expressed protein [Arabidopsis thaliana]
  misc_feature (46)..(226): Homolog of NCBI NO: 26190436 NR Description: barley B recombinant [Hordeum vulgare]

SEQ ID NO: 99018 - protein, 217 aa, Arabidopsis thaliana; identical to SEQ ID NO: 72077
  peptide (1)..(217): Ceres Seq. ID no. 13601965
  misc_feature (1)..(217): Homolog of NCBI NO: 30686452 NR Description: expressed protein [Arabidopsis thaliana]
  misc_feature (1)..(217): Homolog of NCBI NO: 30686455 NR Description: expressed protein [Arabidopsis thaliana]
  misc_feature (37)..(217): Homolog of NCBI NO: 26190436 NR Description: barley B recombinant [Hordeum vulgare]

SEQ ID NO: 99019 - DNA, 620 bp, Arabidopsis thaliana
  misc_feature (1)..(620): Ceres Seq. ID no. 13601973
  misc_feature: MA Experiment ID: 20000234 Result: Down-regulated in Transcription
  misc_feature: MA Experiment 20000234 PARAMETER Experiment Name: At_Siliques_P Parameter: Age (day) Value: 21
  misc_feature: MA Experiment 20000234 PARAMETER Experiment Name: At_Siliques_P Parameter: Organism Value: A. thaliana
  misc_feature: MA Experiment 20000234 PARAMETER Experiment Name: At_Siliques_P Parameter: Plant Line Value: WS
  misc_feature: MA Experiment 20000234 PARAMETER Experiment Name: At_Siliques_P Parameter: Tissue Value: Less Than 5mm Siliques vs. Whole Plant
  misc_feature: MA Experiment ID: 20000235 Result: Down-regulated in Transcription
  misc_feature: MA Experiment 20000235 PARAMETER Experiment Name: At_Siliques_P Parameter: Age (day) Value: 21
  misc_feature: MA Experiment 20000235 PARAMETER Experiment Name: At_Siliques_P Parameter: Organism Value: A. thaliana
  misc_feature: MA Experiment 20000235 PARAMETER Experiment Name: At_Siliques_P Parameter: Plant Line Value: WS
  misc_feature: MA Experiment 20000235 PARAMETER Experiment Name: At_Siliques_P Parameter: Tissue Value: 5-10mm Siliques vs. Whole Plant
  misc_feature: MA Experiment ID: 20000265 Result: Down-regulated in Transcription
  misc_feature: MA Experiment 20000265 PARAMETER Experiment Name: At_Open_Flower_P Parameter: Age (day) Value: 21
  misc_feature: MA Experiment 20000265 PARAMETER Experiment Name: At_Open_Flower_P Parameter: Plant Line Value: WS
  misc_feature: MA Experiment 20000265 PARAMETER Experiment Name: At_Open_Flower_P Parameter: Tissue Value: Closed Flower vs. Whole Plant
  misc_feature: MA Experiment ID: 20000451 Result: Up-regulated in Transcription
  misc_feature: MA Experiment 20000451 PARAMETER Experiment Name: At_CS6879_Shoots-Roots_P Parameter: Age (day) Value: 14
  misc_feature: MA Experiment 20000451 PARAMETER Experiment Name: At_CS6879_Shoots-Roots_P Parameter: Organism Value: A. thaliana
  misc_feature: MA Experiment 20000451 PARAMETER Experiment Name: At_CS6879_Shoots-Roots_P Parameter: Plant Line Value: CS6879 vs. WS
  misc_feature: MA Experiment 20000451 PARAMETER Experiment Name: At_CS6879_Shoots-Roots_P Parameter: Tissue Value: Roots
  misc_feature: MA Experiment ID: 20000452 Result: Up-regulated in Transcription
  misc_feature: MA Experiment 20000452 PARAMETER Experiment Name: At_CS6879_Shoots-Roots_P Parameter: Age (day) Value: 14
  misc_feature: MA Experiment 20000452 PARAMETER Experiment Name: At_CS6879_Shoots-Roots_P Parameter: Organism Value: A. thaliana
  misc_feature: MA Experiment 20000452 PARAMETER Experiment Name: At_CS6879_Shoots-Roots_P Parameter: Plant Line Value: CS6879 vs. WS
  misc_feature: MA Experiment 20000452 PARAMETER Experiment Name: At_CS6879_Shoots-Roots_P Parameter: Tissue Value: Shoots
attccccatcgcacagacccccctaagaatccgagagagaagaagagataatgcagatcttcgtcaaaaccctcaccggcaaaactataaccctagaagttgagagcagcgacaccatcgacaatgttaaagccaaaatccaggacaaagagggcataccacctgatcaacagaggctgatttttgctggtaagcaattggaagatggccggaccttagctgattacaacatccagaaagagtctactcttcatcttgtcctcaggctcagaggtggaaccatgatcaaggtgaagacactcactggaaaagaaatcgagattgatatcgaaccaaccgacactattgatcggatcaaagaacgtgttgaagagaaagaaggcatccctcctgttcaacaaaggctcatatatgccggaaaacagcttgctgatgacaaaacggccaaagattatgcgatagagggaggctctgttcttcatttggttcttgctcttaggggtggtcttctctgatcttaataaataagcttttcaacaaacatcttttccctcactattgtcctccttatgtggaattcatgacacaccaaaattgctatgggaaattggaatattatg

SEQ ID NO: 99020 - protein, 154 aa, Arabidopsis thaliana
  peptide (1)..(154): Ceres Seq. ID no. 13601974
  misc_feature (1)..(74): Pfam Name: Ubiquitin family Pfam Description: Ubiquitin family
  misc_feature (1)..(154): Homolog of NCBI NO: 18403909 NR Description: ubiquitin family [Arabidopsis thaliana]
  misc_feature (1)..(152): Homolog of NCBI NO: 30692436 NR Description: ubiquitin family [Arabidopsis thaliana]
  misc_feature (1)..(152): Homolog of NCBI NO: 20562909 NR Description: polyubiquitin 2 [Deschampsia antarctica]
  misc_feature (1)..(154): Homolog of NCBI NO: 7862066 NR Description: polyubiquitin [Populus tremula x Populus
  misc_feature (1)..(152): Homolog of NCBI NO: 34911624 NR Description: putative polyubiquitin [Oryza sativa (japonica group)] >gi|20161535|dbj|BAB90457.1| putative polyubiquitin
  misc_feature (1)..(153): Homolog of NCBI NO: 1684857 NR Description: polyubiquitin [Phaseolus vulgaris]
  misc_feature (1)..(153): Homolog of NCBI NO: 28804499 NR Description: polyubiquitin [Aster tripolium]
  misc_feature (1)..(153): Homolog of NCBI NO: 16660459 NR Description: polyubiquitin OUB1 [Olea europaea]
  misc_feature (1)..(153): Homolog of NCBI NO: 16660462 NR Description: polyubiquitin OUB2 [Olea europaea]
  misc_feature (1)..(153): Homolog of NCBI NO: 15982787 NR Description: AT4g05320/C17L7_240 [Arabidopsis thaliana]
MQIFVKTLTGKTITLEVESSDTIDNVKAKIQDKEGIPPDQQRLIFAGKQLEDGRTLADYNIQKESTLHLVLRLRGGTMIKVKTLTGKEIEIDIEPTDTIDRIKERVEEKEGIPPVQQRLIYAGKQLADDKTAKDYAIEGGSVLHLVLALRGGLL

SEQ ID NO: 99021 - protein, 77 aa, Arabidopsis thaliana
  peptide (1)..(77): Ceres Seq. ID no. 13601975
  misc_feature (2)..(73): Pfam Name: Ubiquitin family Pfam Description: Ubiquitin family
  misc_feature (1)..(77): Homolog of NCBI NO: 18403909 NR Description: ubiquitin family [Arabidopsis thaliana]
  misc_feature (1)..(75): Homolog of NCBI NO: 30692436 NR Description: ubiquitin family [Arabidopsis thaliana]
  misc_feature (1)..(75): Homolog of NCBI NO: 20562909 NR Description: polyubiquitin 2 [Deschampsia antarctica]
  misc_feature (1)..(77): Homolog of NCBI NO: 7862066 NR Description: polyubiquitin [Populus tremula x Populus
  misc_feature (1)..(75): Homolog of NCBI NO: 34911624 NR Description: putative polyubiquitin [Oryza sativa (japonica group)] >gi|20161535|dbj|BAB90457.1| putative polyubiquitin
  misc_feature (1)..(76): Homolog of NCBI NO: 1684857 NR Description: polyubiquitin [Phaseolus vulgaris]
  misc_feature (1)..(76): Homolog of NCBI NO: 28804499 NR Description: polyubiquitin [Aster tripolium]
  misc_feature (1)..(76): Homolog of NCBI NO: 16660462 NR Description: polyubiquitin OUB2 [Olea europaea]
  misc_feature (1)..(76): Homolog of NCBI NO: 16660459 NR Description: polyubiquitin OUB1 [Olea europaea]
  misc_feature (1)..(76): Homolog of NCBI NO: 15982787 NR Description: AT4g05320/C17L7_240 [Arabidopsis thaliana]
MIKVKTLTGKEIEIDIEPTDTIDRIKERVEEKEGIPPVQQRLIYAGKQLADDKTAKDYAIEGGSVLHLVLALRGGLL

SEQ ID NO: 99022 - DNA, 1967 bp, Arabidopsis thaliana
  misc_feature (1)..(1967): Ceres Seq. ID no. 13601976
  misc_feature: MA Experiment ID: 108434 Result: Up-regulated in Transcription
  misc_feature: MA Experiment 108434 PARAMETER Experiment Name: At_Root_Tips_cDNA_P Parameter: Tissue Value: Root Tips
  misc_feature: MA Experiment ID: 108461 Result: Up-regulated in Transcription
  misc_feature: MA Experiment 108461 PARAMETER Experiment Name: At_Germinating_Seeds_cDNA_P Parameter: Age (day) Value: 1 vs. 0
  misc_feature: MA Experiment 108461 PARAMETER Experiment Name: At_Germinating_Seeds_cDNA_P Parameter: Tissue Value: Germinating Seeds
  misc_feature: MA Experiment ID: 108462 Result: Up-regulated in Transcription
  misc_feature: MA Experiment 108462 PARAMETER Experiment Name: At_Germinating_Seeds_cDNA_P Parameter: Age (day) Value: 2 vs. 0
  misc_feature: MA Experiment 108462 PARAMETER Experiment Name: At_Germinating_Seeds_cDNA_P Parameter: Tissue Value: Germinating Seeds
  misc_feature: MA Experiment ID: 108463 Result: Up-regulated in Transcription
  misc_feature: MA Experiment 108463 PARAMETER Experiment Name: At_Germinating_Seeds_cDNA_P Parameter: Age (day) Value: 3 vs. 0
  misc_feature: MA Experiment 108463 PARAMETER Experiment Name: At_Germinating_Seeds_cDNA_P Parameter: Tissue Value: Germinating Seeds
  misc_feature: MA Experiment ID: 108573 Result: Up-regulated in Transcription
  misc_feature: MA Experiment 108573 PARAMETER Experiment Name: At_Drought_cDNA_P Parameter: Timepoint (hr) Value: 6
  misc_feature: MA Experiment 108573 PARAMETER Experiment Name: At_Drought_cDNA_P Parameter: Tissue Value: Aerial
  misc_feature: MA Experiment 108573 PARAMETER Experiment Name: At_Drought_cDNA_P Parameter: Treatment Value: Drought vs. No Drought
  misc_feature: MA Experiment ID: 108576 Result: Down-regulated in Transcription
  misc_feature: MA Experiment 108576 PARAMETER Experiment Name: At_42deg_Heat_cDNA_P Parameter: Temperature (deg C) Value: 42 vs. 22
  misc_feature: MA Experiment 108576 PARAMETER Experiment Name: At_42deg_Heat_cDNA_P Parameter: Timepoint (hr) Value: 1
  misc_feature: MA Experiment 108576 PARAMETER Experiment Name: At_42deg_Heat_cDNA_P Parameter: Tissue Value: Aerial
  misc_feature: MA Experiment ID: 108595 Result: Down-regulated in Transcription
  misc_feature: MA Experiment 108595 PARAMETER Experiment Name: At_Ler-pi_Ovule_cDNA_P Parameter: Plant Line Value: null
  misc_feature: MA Experiment ID: 20000180 Result: Up-regulated in Transcription
  misc_feature: MA Experiment 20000180 PARAMETER Experiment Name: At_Germinating_Seeds_P Parameter: Age (hr) Value: 24 vs. 0
  misc_feature: MA Experiment 20000180 PARAMETER Experiment Name: At_Germinating_Seeds_P Parameter: Tissue Value: Germinating Seeds
  misc_feature: MA Experiment ID: 20000224 Result: Down-regulated in Transcription
  misc_feature: MA Experiment ID: 20000264 Result: Down-regulated in Transcription
  misc_feature: MA Experiment 20000264 PARAMETER Experiment Name: At_Open_Flower_P Parameter: Age (day) Value: 21
  misc_feature: MA Experiment 20000264 PARAMETER Experiment Name: At_Open_Flower_P Parameter: Plant Line Value: WS
  misc_feature: MA Experiment 20000264 PARAMETER Experiment Name: At_Open_Flower_P Parameter: Tissue Value: Open Flower vs. Whole Plant
  misc_feature: MA Experiment ID: 20000451 Result: Up-regulated in Transcription
  misc_feature: MA Experiment 20000451 PARAMETER Experiment Name: At_CS6879_Shoots-Roots_P Parameter: Age (day) Value: 14
  misc_feature: MA Experiment 20000451 PARAMETER Experiment Name: At_CS6879_Shoots-Roots_P Parameter: Organism Value: A. thaliana
  misc_feature: MA Experiment 20000451 PARAMETER Experiment Name: At_CS6879_Shoots-Roots_P Parameter: Plant Line Value: CS6879 vs. WS
  misc_feature: MA Experiment 20000451 PARAMETER Experiment Name: At_CS6879_Shoots-Roots_P Parameter: Tissue Value: Roots
  misc_feature: MA Experiment ID: 20000794 Result: Down-regulated in Transcription
  misc_feature: MA Experiment 20000794 PARAMETER Experiment Name: At_Petals_P Parameter: Age (day) Value: 23-25 days
  misc_feature: MA Experiment 20000794 PARAMETER Experiment Name: At_Petals_P Parameter: Plant Line Value: WS
  misc_feature: MA Experiment 20000794 PARAMETER Experiment Name: At_Petals_P Parameter: Tissue Value: Petals vs. Whole plant
atccagttgactccaaatagactagaaagagaaagaaagagagagagagagagagagagaaccagagattatcgaacacgaagcagaagacgattcgtggaagagacttggagagaatatttctcaatgtctcctctcccaatcttccatcgtcttcctcacgccacgttctcttcctttctcctctcactgtctcaagctggaagttctaaaacatcagtggcattcctcaatgccttcaaatcagaagatatcattgctcgaattggactatggtggcagcttataagggctgttgtagttgtacctgtcttcaagttcctggtgcttctatgtttggtcatgtctgtcatgttcttcgttgaggttatgtacatgggaatcgttgttttgtatgtcaagctgttcaagagaaagccagagaaattttacaaatgggaagccatggaggatgatgttgagtgtggcagtgcaagctaccctatggttcttgtgcagatacctatgtacaatgaaaaagaggtttgtgagcaatctattgcagctgcttgcaaaatctcatggccatcgaatcgtataataattcaagtgcttgatgattccacggatccagccagtaaggagttggtgaaaaaggagtgtgacagatggtctaaagaaggtgtcaacataacgtttgagataagggacaacaggaacggatacaaagctggtgcgttgagagaaggaatgaggcatagctatgtgaagcagtgtgattatgttgctatctttgatgctgatttccagcctgatcctgacttcctccaccgcactgttccattcttaattcacaatcccaagttagcacttgtacaaggccggtgggagtttgtgaacgcgggtcaatgcatgatgacgagattacaggagatgtctctaagttaccactttacaatagagcagcaagttggatcttcaacatttgccttctttgggttcaacggaactgctggcgtctggagaatctcagcattgaatgagtccgggggatggaatgaccagacaacagtagaagacatggatttagctgtacgagctacactgagaggctggaagtttctatatatcgatgatctcaaggtaaaaagtgagttaccttgttccttcaaagctctgcgtagccagcagcatcgatggacttgcggccctgccaatcttttaaggaaaatggctggacaaataataagaagcgagaatgtatctctatggaagaagtggtatatgttgtacagcttcttcttcatgcgcaagatcgtggctcacatcctcacattctgcttctactgtgttatcttgccagcaactgtattgttcccagaagtcacagttccgaaatgggctgcattttatctcccttctttgatcactctcttaatcgcaattggtagactaagatcaatccaccttttggctttctgggttctatttgagaatgcaatgtccctgctaagagcaaaggctctggtcatgggcttgttcgaaacaggaagagtacaagaatgggttgtgacggagaagttaggtgatactctcaagacgaagctgattccacaagttcctaacgtcagattcagagagagggtgcatttgctggagctattggttggagcgtacctgttattctgcggaatctacgacatcgtctatgggaagaacacactctatgtgtaccttctgtttcagtcagtggccttcttcgttgttggttttggatttgtaggaaaatatgttcctgcttcctcttacttagcataggatagatcatagagtctcaatatgtttcagaaggttttttgtttgatgtcatattgagaacaatgcctatatactactctccatttgtattaacacttgagtatctgtaaccaacgaagctcagatgtgatcgatattatttttttaacagtataaaaccacttaacact

SEQ ID NO: 99023 - protein, 598 aa, Arabidopsis thaliana
  peptide (1)..(598): Ceres Seq. ID no. 13601977
  misc_feature (164)..(339): Pfam Name: Glycosyl transferase Pfam Description: Glycosyl transferase
  misc_feature (43)..(598): Homolog of NCBI NO: 18403914 NR Description: glycosyltransferase family 2 [Arabidopsis >gi|16604559|gb|AAL24081.1| putative glucosyltransferase thaliana] >gi|20197522|gb|AAD15455.2| putative
  misc_feature (43)..(598): Homolog of NCBI NO: 21536839 NR Description: putative glucosyltransferase [Arabidopsis
  misc_feature (115)..(598): Homolog of NCBI NO: 25408401 NR Description: probable glucosyltransferase [imported] -
  misc_feature (83)..(592): Homolog of NCBI NO: 15237519 NR Description: glycosyltransferase family 2 [Arabidopsis
  misc_feature (43)..(592): Homolog of NCBI NO: 30688411 NR Description: glycosyltransferase family 2 [Arabidopsis >gi|8778578|gb|AAF79586.1|AC007945_6 F28C11.11 [Arabidopsis >gi|20466606|gb|AAM20620.1| unknown protein [Arabidopsis
  misc_feature (84)..(593): Homolog of NCBI NO: 15242959 NR Description: glycosyltransferase family 2 [Arabidopsis
  misc_feature (115)..(592): Homolog of NCBI NO: 30688416 NR Description: glycosyltransferase family 2 [Arabidopsis
  misc_feature (59)..(588): Homolog of NCBI NO: 15221657 NR Description: glycosyltransferase family 2 [Arabidopsis
  misc_feature (88)..(592): Homolog of NCBI NO: 16519223 NR Description: cellulose synthase-like protein OsCslA9 [Oryza
  misc_feature (93)..(594): Homolog of NCBI NO: 34419204 NR Description: TPA: cellulose synthase-like A1 [Oryza sativa
IQLTPNRLERERKRERERERTRDYRTRSRRRFVEETWREYFSMSPLPIFHRLPHATFSSFLLSLSQAGSSKTSVAFLNAFKSEDIIARIGLWWQLIRAVVVVPVFKFLVLLCLVMSVMFFVEVMYMGIVVLYVKLFKRKPEKFYKWEAMEDDVECGSASYPMVLVQIPMYNEKEVCEQSIAAACKISWPSNRIIIQVLDDSTDPASKELVKKECDRWSKEGVNITFEIRDNRNGYKAGALREGMRHSYVKQCDYVAIFDADFQPDPDFLHRTVPFLIHNPKLALVQGRWEFVNAGQCMMTRLQEMSLSYHFTIEQQVGSSTFAFFGFNGTAGVWRISALNESGGWNDQTTVEDMDLAVRATLRGWKFLYIDDLKVKSELPCSFKALRSQQHRWTCGPANLLRKMAGQIIRSENVSLWKKWYMLYSFFFMRKIVAHILTFCFYCVILPATVLFPEVTVPKWAAFYLPSLITLLIAIGRLRSIHLLAFWVLFENAMSLLRAKALVMGLFETGRVQEWVVTEKLGDTLKTKLIPQVPNVRFRERVHLLELLVGAYLLFCGIYDIVYGKNTLYVYLLFQSVAFFVVGFGFVGKYVPASSYLA

SEQ ID NO: 99024 - protein, 556 aa, Arabidopsis thaliana; identical to SEQ ID NO: 40206
  peptide (1)..(556): Ceres Seq. ID no. 13601978
  misc_feature (122)..(297): Pfam Name: Glycosyl transferase Pfam Description: Glycosyl transferase
  misc_feature (1)..(556): Homolog of NCBI NO: 18403914 NR Description: glycosyltransferase family 2 [Arabidopsis >gi|16604559|gb|AAL24081.1| putative glucosyltransferase thaliana] >gi|20197522|gb|AAD15455.2| putative
  misc_feature (1)..(556): Homolog of NCBI NO: 21536839 NR Description: putative glucosyltransferase [Arabidopsis
  misc_feature (73)..(556): Homolog of NCBI NO: 25408401 NR Description: probable glucosyltransferase [imported] -
  misc_feature (41)..(550): Homolog of NCBI NO: 15237519 NR Description: glycosyltransferase family 2 [Arabidopsis
  misc_feature (1)..(550): Homolog of NCBI NO: 30688411 NR Description: glycosyltransferase family 2 [Arabidopsis >gi|8778578|gb|AAF79586.1|AC007945_6 F28C11.11 [Arabidopsis >gi|20466606|gb|AAM20620.1| unknown protein [Arabidopsis
  misc_feature (42)..(551): Homolog of NCBI NO: 15242959 NR Description: glycosyltransferase family 2 [Arabidopsis
  misc_feature (73)..(550): Homolog of NCBI NO: 30688416 NR Description: glycosyltransferase family 2 [Arabidopsis
  misc_feature (17)..(546): Homolog of NCBI NO: 15221657 NR Description: glycosyltransferase family 2 [Arabidopsis
  misc_feature (46)..(550): Homolog of NCBI NO: 16519223 NR Description: cellulose synthase-like protein OsCslA9 [Oryza
  misc_feature (51)..(552): Homolog of NCBI NO: 34419204 NR Description: TPA: cellulose synthase-like A1 [Oryza sativa

SEQ ID NO: 99025 - protein, 484 aa, Arabidopsis thaliana; identical to SEQ ID NO: 40207
  peptide (1)..(484): Ceres Seq. ID no. 13601979
  misc_feature (50)..(225): Pfam Name: Glycosyl transferase Pfam Description: Glycosyl transferase
  misc_feature (1)..(484): Homolog of NCBI NO: 18403914 NR Description: glycosyltransferase family 2 [Arabidopsis >gi|16604559|gb|AAL24081.1| putative glucosyltransferase thaliana] >gi|20197522|gb|AAD15455.2| putative
  misc_feature (1)..(484): Homolog of NCBI NO: 21536839 NR Description: putative glucosyltransferase [Arabidopsis
  misc_feature (1)..(484): Homolog of NCBI NO: 25408401 NR Description: probable glucosyltransferase [imported] -
  misc_feature (1)..(478): Homolog of NCBI NO: 15237519 NR Description: glycosyltransferase family 2 [Arabidopsis
  misc_feature (1)..(478): Homolog of NCBI NO: 30688411 NR Description: glycosyltransferase family 2 [Arabidopsis >gi|8778578|gb|AAF79586.1|AC007945_6 F28C11.11 [Arabidopsis >gi|20466606|gb|AAM20620.1| unknown protein [Arabidopsis
  misc_feature (1)..(479): Homolog of NCBI NO: 15242959 NR Description: glycosyltransferase family 2 [Arabidopsis
  misc_feature (1)..(478): Homolog of NCBI NO: 30688416 NR Description: glycosyltransferase family 2 [Arabidopsis
  misc_feature (1)..(474): Homolog of NCBI NO: 15221657 NR Description: glycosyltransferase family 2 [Arabidopsis
  misc_feature (1)..(478): Homolog of NCBI NO: 16519223 NR Description: cellulose synthase-like protein OsCslA9 [Oryza
  misc_feature (1)..(480): Homolog of NCBI NO: 34419204 NR Description: TPA: cellulose synthase-like A1 [Oryza sativa

SEQ ID NO: 99026 - DNA, 1324 bp, Arabidopsis thaliana
  misc_feature (1)..(1324): Ceres Seq. ID no. 13601987
  misc_feature: MA Experiment ID: 108434 Result: Up-regulated in Transcription
  misc_feature: MA Experiment 108434 PARAMETER Experiment Name: At_Root_Tips_cDNA_P Parameter: Tissue Value: Root Tips
  misc_feature: MA Experiment ID: 108464 Result: Down-regulated in Transcription
  misc_feature: MA Experiment 108464 PARAMETER Experiment Name: At_Germinating_Seeds_cDNA_P Parameter: Age (day) Value: 4 vs. 0
  misc_feature: MA Experiment 108464 PARAMETER Experiment Name: At_Germinating_Seeds_cDNA_P Parameter: Tissue Value: Germinating Seeds
  misc_feature: MA Experiment ID: 20000112 Result: Up-regulated in Transcription
  misc_feature: MA Experiment 20000112 PARAMETER Experiment Name: At_42deg_Heat_cDNA_P Parameter: Temperature (deg C) Value: 42 vs. 22
  misc_feature: MA Experiment 20000112 PARAMETER Experiment Name: At_42deg_Heat_cDNA_P Parameter: Timepoint (hr) Value: 2
  misc_feature: MA Experiment 20000112 PARAMETER Experiment Name: At_42deg_Heat_cDNA_P Parameter: Tissue Value: Aerial
  misc_feature: MA Experiment ID: 20000113 Result: Up-regulated in Transcription
  misc_feature: MA Experiment 20000113 PARAMETER Experiment Name: At_42deg_Heat_cDNA_P Parameter: Temperature (deg C) Value: 42 vs. 22
  misc_feature: MA Experiment 20000113 PARAMETER Experiment Name: At_42deg_Heat_cDNA_P Parameter: Timepoint (hr) Value: 8
  misc_feature: MA Experiment 20000113 PARAMETER Experiment Name: At_42deg_Heat_cDNA_P Parameter: Tissue Value: Aerial
  misc_feature: MA Experiment ID: 20000144 Result: Up-regulated in Transcription
  misc_feature: MA Experiment 20000144 PARAMETER Experiment Name: At_42deg_Heat_cDNA_P Parameter: Temperature (deg C) Value: 42 vs. 22
  misc_feature: MA Experiment 20000144 PARAMETER Experiment Name: At_42deg_Heat_cDNA_P Parameter: Timepoint (hr) Value: 1
  misc_feature: MA Experiment 20000144 PARAMETER Experiment Name: At_42deg_Heat_cDNA_P Parameter: Tissue Value: Aerial
  misc_feature: MA Experiment ID: 20000184 Result: Up-regulated in Transcription
  misc_feature: MA Experiment 20000184 PARAMETER Experiment Name: At_Shoots__P Parameter: Age (day) Value: 7
  misc_feature: MA Experiment 20000184 PARAMETER Experiment Name: At_Shoots__P Parameter: Tissue Value: Shoots vs. Whole Plant
  misc_feature: MA Experiment ID: 20000185 Result: Up-regulated in Transcription
  misc_feature: MA Experiment 20000185 PARAMETER Experiment Name: At_Roots__P Parameter: Age (day) Value: 7 vs. 21
  misc_feature: MA Experiment 20000185 PARAMETER Experiment Name: At_Roots__P Parameter: Organism Value: A. thaliana
  misc_feature: MA Experiment 20000185 PARAMETER Experiment Name: At_Roots__P Parameter: Tissue Value: Roots vs. Whole Plant
  misc_feature: MA Experiment ID: 20000214 Result: Up-regulated in Transcription
  misc_feature: MA Experiment 20000214 PARAMETER Experiment Name: At_4deg_Cold_P Parameter: Timepoint (hr) Value: 6
  misc_feature: MA Experiment ID: 20000234 Result: Up-regulated in Transcription
  misc_feature: MA Experiment 20000234 PARAMETER Experiment Name: At_Siliques_P Parameter: Age (day) Value: 21
  misc_feature: MA Experiment 20000234 PARAMETER Experiment Name: At_Siliques_P Parameter: Organism Value: A. thaliana
  misc_feature: MA Experiment 20000234 PARAMETER Experiment Name: At_Siliques_P Parameter: Plant Line Value: WS
  misc_feature: MA Experiment 20000234 PARAMETER Experiment Name: At_Siliques_P Parameter: Tissue Value: Less Than 5mm Siliques vs. Whole Plant
  misc_feature: MA Experiment ID: 20000235 Result: Up-regulated in Transcription
  misc_feature: MA Experiment 20000235 PARAMETER Experiment Name: At_Siliques_P Parameter: Age (day) Value: 21
  misc_feature: MA Experiment 20000235 PARAMETER Experiment Name: At_Siliques_P Parameter: Organism Value: A. thaliana
  misc_feature: MA Experiment 20000235 PARAMETER Experiment Name: At_Siliques_P Parameter: Plant Line Value: WS
  misc_feature: MA Experiment 20000235 PARAMETER Experiment Name: At_Siliques_P Parameter: Tissue Value: 5-10mm Siliques vs. Whole Plant
  misc_feature: MA Experiment ID: 20000439 Result: Up-regulated in Transcription
  misc_feature: MA Experiment 20000439 PARAMETER Experiment Name: At_Roots__P Parameter: Age (day) Value: 14 vs. 21
  misc_feature: MA Experiment 20000439 PARAMETER Experiment Name: At_Roots__P Parameter: Organism Value: A. thaliana
  misc_feature: MA Experiment 20000439 PARAMETER Experiment Name: At_Roots__P Parameter: Tissue Value: Roots vs. Whole Plant
  misc_feature: MA Experiment ID: 20001248 Result: Down-regulated in Transcription
  misc_feature: MA Experiment 20001248 PARAMETER Experiment Name: At_Far-red-induction_P Parameter: Age (day) Value: 7
  misc_feature: MA Experiment 20001248 PARAMETER Experiment Name: At_Far-red-induction_P Parameter: Light Value: Far-red vs. White
  misc_feature: MA Experiment 20001248 PARAMETER Experiment Name: At_Far-red-induction_P Parameter: Organism Value: A. thaliana
  misc_feature: MA Experiment 20001248 PARAMETER Experiment Name: At_Far-red-induction_P Parameter: Plant Line Value: Columbia
  misc_feature: MA Experiment 20001248 PARAMETER Experiment Name: At_Far-red-induction_P Parameter: Timepoint (hr) Value: 4
  misc_feature: MA Experiment 20001248 PARAMETER Experiment Name: At_Far-red-induction_P Parameter: Tissue Value: Whole Plant
actcacctatctcactctaaaatctctctctgccaatctcatcttcaacctctctctaactctcgttttcgattctacaatggctgacaagaagattaggatcggaatcaacggattcggaagaattggtcgtttggttgctagagttgttctccagagggacgatgttgagctcgtcgctgtcaacgaccccttcatcactactgagtacatgacctacatgttcaagtacgacagtgttcacggtcaatggaaacacaatgaactcaagatcaaggatgagaagacccttctcttcggtgagaagccagtcactgttttcggcatcaggaaccctgaggatatcccatgggccgaggctggagctgactacgttgttgagtctactggtgtcttcactgacaaagacaaggctgcagctcacttgaagggtggtgccaagaaggttgttatctctgcccccagcaaagacgctccaatgtttgttgttggtgtcaacgagcacgaatacaagtccgaccttgacattgtctccaacgctagctgcaccactaactgccttgctccccttgccaaggttatcaatgacagatttggaattgttgagggtcttatgactacagtccactcaatcactgctactcagaagactgttgatgggccttcaatgaaggactggagaggtggaagagctgcttcattcaacattattcccagcagcactggagctgccaaggctgtcggaaaggtgcttccagctcttaacggaaagttgactggaatgtctttccgtgtcccaaccgttgatgtctcagttgttgaccttactgtcagactcgagaaagctgctacctacgatgaaatcaaaaaggctatcaaggaggaatccgaaggcaaactcaagggaatccttggatacaccgaggatgatgttgtctcaactgacttcgttggcgacaacaggtcgagcatttttgacgccaaggctggaattgcattgagcgacaagtttgtgaaattggtgtcatggtacgacaacgaatggggttacagttcccgtgtggtcgacttgatcgtccacatgtcaaaggcctaagctaagaagcagatctcgaatgatagggagtggaaagtcatctgttcatccccttttatggtctgaatttgtcgttttcgaataaaatttctttgaacttggaactttttttttttttggttttcttaattctcattcatgtgaggtgatgggagtttgtagaccgatgttttactggaagccctttgtttttggcttttgatatattgagttaacgttatggttttc

SEQ ID NO: 99027 - protein, 364 aa, Arabidopsis thaliana
  peptide (1)..(364): Ceres Seq. ID no. 13601988
  misc_feature (183)..(344): Pfam Name: Glyceraldehyde 3-phosphate dehydrogenase, Pfam Description: Glyceraldehyde 3-phosphate dehydrogenase,
  misc_feature (27)..(364): Homolog of NCBI NO: 15229231 NR Description: glyceraldehyde-3-phosphate dehydrogenase C
  misc_feature (27)..(364): Homolog of NCBI NO: 21593240 NR Description: glyceraldehyde-3-phosphate dehydrogenase C
  misc_feature (27)..(364): Homolog of NCBI NO: 81622 NR Description: glyceraldehyde-3-phosphate dehydrogenase
  misc_feature (27)..(364): Homolog of NCBI NO: 15222848 NR Description: glyceraldehyde-3-phosphate dehydrogenase -related
  misc_feature (27)..(364): Homolog of NCBI NO: 120675 NR Description: Glyceraldehyde 3-phosphate dehydrogenase,
  misc_feature (27)..(364): Homolog of NCBI NO: 22094840 NR Description: glyceraldehyde 3-phosphate dehydrogenase [Solanum
  misc_feature (31)..(364): Homolog of NCBI NO: 462141 NR Description: Glyceraldehyde 3-phosphate dehydrogenase (GAPDH)
  misc_feature (27)..(362): Homolog of NCBI NO: 120669 NR Description: Glyceraldehyde 3-phosphate dehydrogenase,
  misc_feature (32)..(363): Homolog of NCBI NO: 462137 NR Description: GLYCERALDEHYDE 3-PHOSPHATE DEHYDROGENASE,
  misc_feature (31)..(362): Homolog of NCBI NO: 4539543 NR Description: glyceraldehyde-3-phosphate dehydrogenase
LTYLTLKSLSANLIFNLSLTLVFDSTMADKKIRIGINGFGRIGRLVARVVLQRDDVELVAVNDPFITTEYMTYMFKYDSVHGQWKHNELKIKDEKTLLFGEKPVTVFGIRNPEDIPWAEAGADYVVESTGVFTDKDKAAAHLKGGAKKVVISAPSKDAPMFVVGVNEHEYKSDLDIVSNASCTTNCLAPLAKVINDRFGIVEGLMTTVHSITATQKTVDGPSMKDWRGGRAASFNIIPSSTGAAKAVGKVLPALNGKLTGMSFRVPTVDVSVVDLTVRLEKAATYDEIKKAIKEESEGKLKGILGYTEDDVVSTDFVGDNRSSIFDAKAGIALSDKFVKLVSWYDNEWGYSSRVVDLIVHMSKA

SEQ ID NO: 99028 - protein, 338 aa, Arabidopsis thaliana; identical to SEQ ID NO: 23957
  peptide (1)..(338): Ceres Seq. ID no. 13601989
  misc_feature (157)..(318): Pfam Name: Glyceraldehyde 3-phosphate dehydrogenase, Pfam Description: Glyceraldehyde 3-phosphate dehydrogenase,
  misc_feature (1)..(338): Homolog of NCBI NO: 15229231 NR Description: glyceraldehyde-3-phosphate dehydrogenase C
  misc_feature (1)..(338): Homolog of NCBI NO: 21593240 NR Description: glyceraldehyde-3-phosphate dehydrogenase C
  misc_feature (1)..(338): Homolog of NCBI NO: 81622 NR Description: glyceraldehyde-3-phosphate dehydrogenase
  misc_feature (1)..(338): Homolog of NCBI NO: 15222848 NR Description: glyceraldehyde-3-phosphate dehydrogenase -related
  misc_feature (1)..(338): Homolog of NCBI NO: 120675 NR Description: Glyceraldehyde 3-phosphate dehydrogenase,
  misc_feature (1)..(338): Homolog of NCBI NO: 22094840 NR Description: glyceraldehyde 3-phosphate dehydrogenase [Solanum
  misc_feature (5)..(338): Homolog of NCBI NO: 462141 NR Description: Glyceraldehyde 3-phosphate dehydrogenase (GAPDH)
  misc_feature (1)..(336): Homolog of NCBI NO: 120669 NR Description: Glyceraldehyde 3-phosphate dehydrogenase,
  misc_feature (6)..(337): Homolog of NCBI NO: 462137 NR Description: GLYCERALDEHYDE 3-PHOSPHATE DEHYDROGENASE,
  misc_feature (5)..(336): Homolog of NCBI NO: 4539543 NR Description: glyceraldehyde-3-phosphate dehydrogenase

SEQ ID NO: 99029 - protein, 294 aa, Arabidopsis thaliana; identical to SEQ ID NO: 23958
  peptide (1)..(294): Ceres Seq. ID no. 13601990
  misc_feature (113)..(274): Pfam Name: Glyceraldehyde 3-phosphate dehydrogenase, Pfam Description: Glyceraldehyde 3-phosphate dehydrogenase,
  misc_feature (1)..(294): Homolog of NCBI NO: 15229231 NR Description: glyceraldehyde-3-phosphate dehydrogenase C
  misc_feature (1)..(294): Homolog of NCBI NO: 21593240 NR Description: glyceraldehyde-3-phosphate dehydrogenase C
  misc_feature (1)..(294): Homolog of NCBI NO: 81622 NR Description: glyceraldehyde-3-phosphate dehydrogenase
  misc_feature (1)..(294): Homolog of NCBI NO: 15222848 NR Description: glyceraldehyde-3-phosphate dehydrogenase -related
  misc_feature (1)..(294): Homolog of NCBI NO: 120675 NR Description: Glyceraldehyde 3-phosphate dehydrogenase,
  misc_feature (1)..(294): Homolog of NCBI NO: 22094840 NR Description: glyceraldehyde 3-phosphate dehydrogenase [Solanum
  misc_feature (1)..(294): Homolog of NCBI NO: 462141 NR Description: Glyceraldehyde 3-phosphate dehydrogenase (GAPDH)
  misc_feature (1)..(292): Homolog of NCBI NO: 120669 NR Description: Glyceraldehyde 3-phosphate dehydrogenase,
  misc_feature (1)..(293): Homolog of NCBI NO: 462137 NR Description: GLYCERALDEHYDE 3-PHOSPHATE DEHYDROGENASE,
  misc_feature (1)..(292): Homolog of NCBI NO: 4539543 NR Description: glyceraldehyde-3-phosphate dehydrogenase

SEQ ID NO: 99030 - DNA, 1515 bp, Arabidopsis thaliana
  misc_feature (1)..(1515): Ceres Seq. ID no. 13602011
  misc_feature: MA Experiment ID: 108435 Result: Down-regulated in Transcription
  misc_feature: MA Experiment 108435 PARAMETER Experiment Name: At_stm_Mutants_cDNA_P Parameter: Plant Line Value: wt Landsburg vs stm
  misc_feature: MA Experiment 108435 PARAMETER Experiment Name: At_stm_Mutants_cDNA_P Parameter: Tissue Value: Shoot Apical Meristem Region
  misc_feature: MA Experiment ID: 108463 Result: Down-regulated in Transcription
  misc_feature: MA Experiment 108463 PARAMETER Experiment Name: At_Germinating_Seeds_cDNA_P Parameter: Age (day) Value: 3 vs. 0
  misc_feature: MA Experiment 108463 PARAMETER Experiment Name: At_Germinating_Seeds_cDNA_P Parameter: Tissue Value: Germinating Seeds
  misc_feature: MA Experiment ID: 108464 Result: Down-regulated in Transcription
  misc_feature: MA Experiment 108464 PARAMETER Experiment Name: At_Germinating_Seeds_cDNA_P Parameter: Age (day) Value: 4 vs. 0
  misc_feature: MA Experiment 108464 PARAMETER Experiment Name: At_Germinating_Seeds_cDNA_P Parameter: Tissue Value: Germinating Seeds
  misc_feature: MA Experiment ID: 108577 Result: Down-regulated in Transcription
  misc_feature: MA Experiment 108577 PARAMETER Experiment Name: At_42deg_Heat_cDNA_P Parameter: Temperature (deg C) Value: 42 vs. 22
  misc_feature: MA Experiment 108577 PARAMETER Experiment Name: At_42deg_Heat_cDNA_P Parameter: Timepoint (hr) Value: 6
  misc_feature: MA Experiment 108577 PARAMETER Experiment Name: At_42deg_Heat_cDNA_P Parameter: Tissue Value: Aerial
  misc_feature: MA Experiment ID: 108579 Result: Up-regulated in Transcription
  misc_feature: MA Experiment 108579 PARAMETER Experiment Name: At_4deg_Cold_cDNA_P Parameter: Temperature (deg C) Value: 4 vs. 22
  misc_feature: MA Experiment 108579 PARAMETER Experiment Name: At_4deg_Cold_cDNA_P Parameter: Timepoint (hr) Value: 6
  misc_feature: MA Experiment 108579 PARAMETER Experiment Name: At_4deg_Cold_cDNA_P Parameter: Tissue Value: Aerial
  misc_feature: MA Experiment ID: 108585 Result: Down-regulated in Transcription
  misc_feature: MA Experiment 108585 PARAMETER Experiment Name: At_5mM_NaNP_cDNA_P Parameter: Timepoint (hr) Value: 6
  misc_feature: MA Experiment 108585 PARAMETER Experiment Name: At_5mM_NaNP_cDNA_P Parameter: Tissue Value: Aerial
  misc_feature: MA Experiment 108585 PARAMETER Experiment Name: At_5mM_NaNP_cDNA_P Parameter: Treatment Value: null
  misc_feature: MA Experiment ID: 108595 Result: Down-regulated in Transcription
  misc_feature: MA Experiment 108595 PARAMETER Experiment Name: At_Ler-pi_Ovule_cDNA_P Parameter: Plant Line Value: null
  misc_feature: MA Experiment ID: 108605 Result: Down-regulated in Transcription
  misc_feature: MA Experiment 108605 PARAMETER Experiment Name: At_100uM_ABA_cDNA_P Parameter: Timepoint (hr) Value: 6
  misc_feature: MA Experiment 108605 PARAMETER Experiment Name: At_100uM_ABA_cDNA_P Parameter: Tissue Value: Aerial
  misc_feature: MA Experiment 108605 PARAMETER Experiment Name: At_100uM_ABA_cDNA_P Parameter: Treatment Value: 100uM ABA vs. No Treatment
  misc_feature: MA Experiment ID: 108607 Result: Down-regulated in Transcription
  misc_feature: MA Experiment 108607 PARAMETER Experiment Name: At_100uM_ABA_cDNA_P Parameter: Timepoint (hr) Value: 4
  misc_feature: MA Experiment 108607 PARAMETER Experiment Name: At_100uM_ABA_cDNA_P Parameter: Tissue Value: Aerial
  misc_feature: MA Experiment 108607 PARAMETER Experiment Name: At_100uM_ABA_cDNA_P Parameter: Treatment Value: 100uM ABA vs. No Treatment
  misc_feature: MA Experiment ID: 108668 Result: Down-regulated in Transcription
  misc_feature: MA Experiment 108668 PARAMETER Experiment Name: At_2mM_SA_cDNA_P Parameter: Plant Line Value: WS
  misc_feature: MA Experiment 108668 PARAMETER Experiment Name: At_2mM_SA_cDNA_P Parameter: Timepoint (hr) Value: 6
  misc_feature: MA Experiment 108668 PARAMETER Experiment Name: At_2mM_SA_cDNA_P Parameter: Treatment Value: 2mM SA vs. No Treatment
  misc_feature: MA Experiment ID: 20000089 Result: Up-regulated in Transcription
  misc_feature: MA Experiment ID: 20000090 Result: Up-regulated in Transcription
  misc_feature: MA Experiment ID: 20000111 Result: Down-regulated in Transcription
  misc_feature: MA Experiment 20000111 PARAMETER Experiment Name: At_42deg_Heat_cDNA_P Parameter: Temperature (deg C) Value: 42 vs. 22
  misc_feature: MA Experiment 20000111 PARAMETER Experiment Name: At_42deg_Heat_cDNA_P Parameter: Timepoint (hr) Value: 6
  misc_feature: MA Experiment 20000111 PARAMETER Experiment Name: At_42deg_Heat_cDNA_P Parameter: Tissue Value: Aerial
  misc_feature: MA Experiment ID: 20000113 Result: Down-regulated in Transcription
  misc_feature: MA Experiment 20000113 PARAMETER Experiment Name: At_42deg_Heat_cDNA_P Parameter: Temperature (deg C) Value: 42 vs. 22
  misc_feature: MA Experiment 20000113 PARAMETER Experiment Name: At_42deg_Heat_cDNA_P Parameter: Timepoint (hr) Value: 8
  misc_feature: MA Experiment 20000113 PARAMETER Experiment Name: At_42deg_Heat_cDNA_P Parameter: Tissue Value: Aerial
  misc_feature: MA Experiment ID: 20000173 Result: Down-regulated in Transcription
  misc_feature: MA Experiment 20000173 PARAMETER Experiment Name: At_42deg_Heat_P Parameter: Age (day) Value: 14
  misc_feature: MA Experiment 20000173 PARAMETER Experiment Name: At_42deg_Heat_P Parameter: Organism Value: A. thaliana
  misc_feature: MA Experiment 20000173 PARAMETER Experiment Name: At_42deg_Heat_P Parameter: Plant Line Value: WS
  misc_feature: MA Experiment 20000173 PARAMETER Experiment Name: At_42deg_Heat_P Parameter: Temperature (deg C) Value: 42 vs. 22
  misc_feature: MA Experiment 20000173 PARAMETER Experiment Name: At_42deg_Heat_P Parameter: Timepoint (hr) Value: 6
  misc_feature: MA Experiment 20000173 PARAMETER Experiment Name: At_42deg_Heat_P Parameter: Tissue Value: Aerial
  misc_feature: MA Experiment ID: 20000182 Result: Down-regulated in Transcription
  misc_feature: MA Experiment 20000182 PARAMETER Experiment Name: At_2mM_SA_P Parameter: Age (day) Value: 14
  misc_feature: MA Experiment 20000182 PARAMETER Experiment Name: At_2mM_SA_P Parameter: Organism Value: A. thaliana
  misc_feature: MA Experiment 20000182 PARAMETER Experiment Name: At_2mM_SA_P Parameter: Plant Line Value: WS
  misc_feature: MA Experiment 20000182 PARAMETER Experiment Name: At_2mM_SA_P Parameter: Timepoint (hr) Value: 6
  misc_feature: MA Experiment 20000182 PARAMETER Experiment Name: At_2mM_SA_P Parameter: Tissue Value: Aerial
  misc_feature: MA Experiment 20000182 PARAMETER Experiment Name: At_2mM_SA_P Parameter: Treatment Value: 2mM SA vs. No Treatment
  misc_feature: MA Experiment ID: 20000185 Result: Down-regulated in Transcription
  misc_feature: MA Experiment 20000185 PARAMETER Experiment Name: At_Roots__P Parameter: Age (day) Value: 7 vs. 21
  misc_feature: MA Experiment 20000185 PARAMETER Experiment Name: At_Roots__P Parameter: Organism Value: A. thaliana
  misc_feature: MA Experiment 20000185 PARAMETER Experiment Name: At_Roots__P Parameter: Tissue Value: Roots vs. Whole Plant
  misc_feature: MA Experiment ID: 20000213 Result: Up-regulated in Transcription
  misc_feature: MA Experiment 20000213 PARAMETER Experiment Name: At_4deg_Cold_P Parameter: Timepoint (hr) Value: 2
  misc_feature: MA Experiment ID: 20000437 Result: Down-regulated in Transcription
  misc_feature: MA Experiment 20000437 PARAMETER Experiment Name: At_Drought_P Parameter: Age (day) Value: 8
  misc_feature: MA Experiment 20000437 PARAMETER Experiment Name: At_Drought_P Parameter: Organism Value: A. thaliana
  misc_feature: MA Experiment 20000437 PARAMETER Experiment Name: At_Drought_P Parameter: Plant Line Value: WS
  misc_feature: MA Experiment 20000437 PARAMETER Experiment Name: At_Drought_P Parameter: Timepoint (hr) Value: 24
  misc_feature: MA Experiment 20000437 PARAMETER Experiment Name: At_Drought_P Parameter: Tissue Value: Whole Plant
  misc_feature: MA Experiment 20000437 PARAMETER Experiment Name: At_Drought_P Parameter: Treatment Value: Drought vs. No Drought
  misc_feature: MA Experiment ID: 20000439 Result: Down-regulated in Transcription
  misc_feature: MA Experiment 20000439 PARAMETER Experiment Name: At_Roots__P Parameter: Age (day) Value: 14 vs. 21
  misc_feature: MA Experiment 20000439 PARAMETER Experiment Name: At_Roots__P Parameter: Organism Value: A. thaliana
  misc_feature: MA Experiment 20000439 PARAMETER Experiment Name: At_Roots__P Parameter: Tissue Value: Roots vs. Whole Plant
  misc_feature: MA Experiment ID: 20000441 Result: Down-regulated in Transcription
  misc_feature: MA Experiment 20000441 PARAMETER Experiment Name: At_1uM_BR-BRZ__P Parameter: Tissue Value: Shoot Apices
  misc_feature: MA Experiment 20000441 PARAMETER Experiment Name: At_1uM_BR-BRZ__P Parameter: Treatment Value: 1uM BR vs. No Treatment
  misc_feature: MA Experiment ID: 20000443 Result: Down-regulated in Transcription
  misc_feature: MA Experiment 20000443 PARAMETER Experiment Name: At_1uM_BR-BRZ__P Parameter: Tissue Value: Shoot Apices
  misc_feature: MA Experiment 20000443 PARAMETER Experiment Name: At_1uM_BR-BRZ__P Parameter: Treatment Value: 1uM BRZ vs. No Treatment
  misc_feature: MA Experiment ID: 20000495 Result: Down-regulated in Transcription
  misc_feature: MA Experiment 20000495 PARAMETER Experiment Name: At_Guard_Cells_P Parameter: Harvest Date Value: 8/2/2002
  misc_feature: MA Experiment 20000495 PARAMETER Experiment Name: At_Guard_Cells_P Parameter: Organism Value: A. thaliana
  misc_feature: MA Experiment 20000495 PARAMETER Experiment Name: At_Guard_Cells_P Parameter: Tissue Value: Guard Cells vs. Leaves
  misc_feature: MA Experiment ID: 20000527 Result: Up-regulated in Transcription
  misc_feature: MA Experiment 20000527 PARAMETER Experiment Name: At_10percent_PEG_P Parameter: Age (day) Value: 20
  misc_feature: MA Experiment 20000527 PARAMETER Experiment Name: At_10percent_PEG_P Parameter: Organism Value: A. thaliana
  misc_feature: MA Experiment 20000527 PARAMETER Experiment Name: At_10percent_PEG_P Parameter: Plant Line Value: WS
  misc_feature: MA Experiment 20000527 PARAMETER Experiment Name: At_10percent_PEG_P Parameter: Timepoint (day) Value: 20
  misc_feature: MA Experiment 20000527 PARAMETER Experiment Name: At_10percent_PEG_P Parameter: Tissue Value: Whole Plant
  misc_feature: MA Experiment 20000527 PARAMETER Experiment Name: At_10percent_PEG_P Parameter: Treatment Value: 10percent PEG vs. No Treatment
  misc_feature: MA Experiment ID: 20000794 Result: Down-regulated in Transcription
  misc_feature: MA Experiment 20000794 PARAMETER Experiment Name: At_Petals_P Parameter: Age (day) Value: 23-25 days
  misc_feature: MA Experiment 20000794 PARAMETER Experiment Name: At_Petals_P Parameter: Plant Line Value: WS
  misc_feature: MA Experiment 20000794 PARAMETER Experiment Name: At_Petals_P Parameter: Tissue Value: Petals vs. Whole plant
  misc_feature: MA Experiment ID: 20001247 Result: Down-regulated in Transcription
  misc_feature: MA Experiment 20001247 PARAMETER Experiment Name: At_Far-red-induction_P Parameter: Age (day) Value: 7
  misc_feature: MA Experiment 20001247 PARAMETER Experiment Name: At_Far-red-induction_P Parameter: Light Value: Far-red vs. White
  misc_feature: MA Experiment 20001247 PARAMETER Experiment Name: At_Far-red-induction_P Parameter: Organism Value: A. thaliana
  misc_feature: MA Experiment 20001247 PARAMETER Experiment Name: At_Far-red-induction_P Parameter: Plant Line Value: Columbia
  misc_feature: MA Experiment 20001247 PARAMETER Experiment Name: At_Far-red-induction_P Parameter: Timepoint (hr) Value: 1
  misc_feature: MA Experiment 20001247 PARAMETER Experiment Name: At_Far-red-induction_P Parameter: Tissue Value: Whole Plant
  misc_feature: MA Experiment ID: 20001458 Result: Up-regulated in Transcription
  misc_feature: MA Experiment 20001458 PARAMETER Experiment Name: At_50mM_NH4NO3_L-to-H_P Parameter: Age (day) Value: Undefined
  misc_feature: MA Experiment 20001458 PARAMETER Experiment Name: At_50mM_NH4NO3_L-to-H_P Parameter: Organism Value: Undefined
  misc_feature: MA Experiment 20001458 PARAMETER Experiment Name: At_50mM_NH4NO3_L-to-H_P Parameter: Plant Line Value: Undefined
  misc_feature: MA Experiment 20001458 PARAMETER Experiment Name: At_50mM_NH4NO3_L-to-H_P Parameter: Timepoint (hr) Value: 2
  misc_feature: MA Experiment 20001458 PARAMETER Experiment Name: At_50mM_NH4NO3_L-to-H_P Parameter: Tissue Value: Siliques
  misc_feature: MA Experiment 20001458 PARAMETER Experiment Name: At_50mM_NH4NO3_L-to-H_P Parameter: Treatment Value: 50mM NH4NO3 vs. 100mM Manitol
  misc_feature: MA Experiment ID: 20001905 Result: Down-regulated in Transcription
  misc_feature: MA Experiment 20001905 PARAMETER Experiment Name: At_Drought_Reproduction_P Parameter: Age (day) Value: 40
  misc_feature: MA Experiment 20001905 PARAMETER Experiment Name: At_Drought_Reproduction_P Parameter: Organism Value: A. thaliana
  misc_feature: MA Experiment 20001905 PARAMETER Experiment Name: At_Drought_Reproduction_P Parameter: Plant Line Value: WS
  misc_feature: MA Experiment 20001905 PARAMETER Experiment Name: At_Drought_Reproduction_P Parameter: Timepoint (day) Value: 10
  misc_feature: MA Experiment 20001905 PARAMETER Experiment Name: At_Drought_Reproduction_P Parameter: Tissue Value: Rosettes
  misc_feature: MA Experiment 20001905 PARAMETER Experiment Name: At_Drought_Reproduction_P Parameter: Treatment Value: Drought vs. No Drought
acacactctgcaacacctctcactcaaatttcattcaccatgttctctctcaaatccttaatctcctcacctttcacacaatccaccactcatggattattcaccaacccgattacccgacccgttaatccattaccacgtaccgtttccttcaccgttaccgcttccatgatacccaaaagatcctcagctaacatgattcccaaaaaccctccggcgaggcaacagctctaccaaccgttccgaccaccgtcatctcccattccaacccaattccgttcactcgactccgccggtaaaatcgaaatcctcgccggtcgaatggctctctggttcgaatacgcacctcttatctcttctctttacaccgatggtttcactcctccaaccatcgaagaactcaccggaatctcaagcatcgaacagaaccgtttaatcgtcggtgcgcaagttcgtgactcaattcttcaatctatccatgaaccggagctcatttctgcgttcgacaccggtggtgcagagcttctatacgaaattcgtctccttagcaccacgcagcgtgttgcagccgccacattcatcattgatcgtaatattgattcgaaaggagcacaggatttggcacgagccatcaaggattatcctaaccgtcgtggagacgttggatggttggattttgattacaacttaccaggagattgtctttcattcttgtattacaggcagagcagagagaataagaatccatcggatcagagaacctcgatgcttctacaagcattgggggttgcagaatcagaaaaggctaagaacaggttgaacacagagctatacggggacaaggaagcagagaaggagaaggagaagaagaagaaggaagaggaagtcaaagctattcggattccagtggtgaggcttaagtttggagaagtagcagaagcgacctcggtggtagttttaccggtttgtaaagcagaggaaggggaaaagaagattcttgaagctccaatggagatcatagccggaggggattttaaggtggttgaggcggagaaaggatggaagagatgggtagtgcttccgtcgtggaacccagtggcagccattgggaaaggcggtgtggcggtttctttcagggatgatagaaaagtgctgccttgggatggaaaggaggagcctttactggtagtggccgatagggtgaggaatgttgtggaggctgatgacgggtattatctcgtggtggctgagaacggacttaagctagagaaaggatcagatttgaaggcgagagaggtgaaggagagtttagggatggttgttttggtggtgaggccgccaagagaagatgatgatgattggcagacaagtcatcagaactgggactgaattaatagaatcaatactcatatgctgtaactgattacggagtcatcatggtcatgtaaaaattttggataaaggtggtaactttttgttctaagatacaatcagaaacagagcaatatttttctc

SEQ ID NO: 99031 - protein, 462 aa, Arabidopsis thaliana; identical to SEQ ID NO: 42935
  peptide (1)..(462): Ceres Seq. ID no. 13602012
  misc_feature (14)..(462): Homolog of NCBI NO: 18396920 NR Description: expressed protein [Arabidopsis thaliana] unknown protein [Arabidopsis thaliana] unknown protein [Arabidopsis thaliana]
  misc_feature (14)..(462): Homolog of NCBI NO: 15241839 NR Description: expressed protein [Arabidopsis thaliana] contains similarity to Synechocystis sp. hypothetical protein Brevibacterium linens elongation factor Tu (GB:X76863) and
  misc_feature (25)..(462): Homolog of NCBI NO: 37534826 NR Description: unknown protein [Oryza sativa (japonica
  misc_feature (83)..(369): Homolog of NCBI NO: 23127437 NR Description: hypothetical protein [Nostoc punctiforme]
  misc_feature (83)..(369): Homolog of NCBI NO: 23042669 NR Description: hypothetical protein [Trichodesmium erythraeum
  misc_feature (83)..(273): Homolog of NCBI NO: 17232742 NR Description: hypothetical protein [Nostoc sp. PCC 7120]
  misc_feature (89)..(285): Homolog of NCBI NO: 37521728 NR Description: hypothetical protein glr2159 [Gloeobacter
  misc_feature (101)..(273): Homolog of NCBI NO: 22299309 NR Description: ORF_ID:tlr1766~hypothetical protein
  misc_feature (83)..(385): Homolog of NCBI NO: 16331838 NR Description: unknown protein [Synechocystis sp. PCC 6803]

SEQ ID NO: 99032 - protein, 449 aa, Arabidopsis thaliana; identical to SEQ ID NO: 42936
  peptide (1)..(449): Ceres Seq. ID no. 13602013
  misc_feature (1)..(449): Homolog of NCBI NO: 18396920 NR Description: expressed protein [Arabidopsis thaliana] unknown protein [Arabidopsis thaliana] unknown protein [Arabidopsis thaliana]
  misc_feature (1)..(449): Homolog of NCBI NO: 15241839 NR Description: expressed protein [Arabidopsis thaliana] contains similarity to Synechocystis sp. hypothetical protein Brevibacterium linens elongation factor Tu (GB:X76863) and
  misc_feature (12)..(449): Homolog of NCBI NO: 37534826 NR Description: unknown protein [Oryza sativa (japonica
  misc_feature (70)..(356): Homolog of NCBI NO: 23127437 NR Description: hypothetical protein [Nostoc punctiforme]
  misc_feature (70)..(356): Homolog of NCBI NO: 23042669 NR Description: hypothetical protein [Trichodesmium erythraeum
  misc_feature (70)..(260): Homolog of NCBI NO: 17232742 NR Description: hypothetical protein [Nostoc sp. PCC 7120]
  misc_feature (76)..(272): Homolog of NCBI NO: 37521728 NR Description: hypothetical protein glr2159 [Gloeobacter
  misc_feature (88)..(260): Homolog of NCBI NO: 22299309 NR Description: ORF_ID:tlr1766~hypothetical protein
  misc_feature (70)..(372): Homolog of NCBI NO: 16331838 NR Description: unknown protein [Synechocystis sp. PCC 6803]

SEQ ID NO: 99033 - protein, 406 aa, Arabidopsis thaliana; identical to SEQ ID NO: 42937
  peptide (1)..(406): Ceres Seq. ID no. 13602014
  misc_feature (1)..(406): Homolog of NCBI NO: 18396920 NR Description: expressed protein [Arabidopsis thaliana] unknown protein [Arabidopsis thaliana] unknown protein [Arabidopsis thaliana]
  misc_feature (1)..(406): Homolog of NCBI NO: 15241839 NR Description: expressed protein [Arabidopsis thaliana] contains similarity to Synechocystis sp. hypothetical protein Brevibacterium linens elongation factor Tu (GB:X76863) and
  misc_feature (1)..(406): Homolog of NCBI NO: 37534826 NR Description: unknown protein [Oryza sativa (japonica
  misc_feature (27)..(313): Homolog of NCBI NO: 23127437 NR Description: hypothetical protein [Nostoc punctiforme]
  misc_feature (27)..(313): Homolog of NCBI NO: 23042669 NR Description: hypothetical protein [Trichodesmium erythraeum
  misc_feature (27)..(217): Homolog of NCBI NO: 17232742 NR Description: hypothetical protein [Nostoc sp. PCC 7120]
  misc_feature (33)..(229): Homolog of NCBI NO: 37521728 NR Description: hypothetical protein glr2159 [Gloeobacter
  misc_feature (45)..(217): Homolog of NCBI NO: 22299309 NR Description: ORF_ID:tlr1766~hypothetical protein
  misc_feature (27)..(329): Homolog of NCBI NO: 16331838 NR Description: unknown protein [Synechocystis sp. PCC 6803]

SEQ ID NO: 99034 - DNA, 1486 bp, Arabidopsis thaliana
  misc_feature (1)..(1486): Ceres Seq. ID no. 13602015
  misc_feature: MA Experiment ID: 108434 Result: Up-regulated in Transcription
  misc_feature: MA Experiment 108434 PARAMETER Experiment Name: At_Root_Tips_cDNA_P Parameter: Tissue Value: Root Tips
  misc_feature: MA Experiment ID: 108462 Result: Down-regulated in Transcription
  misc_feature: MA Experiment 108462 PARAMETER Experiment Name: At_Germinating_Seeds_cDNA_P Parameter: Age (day) Value: 2 vs. 0
  misc_feature: MA Experiment 108462 PARAMETER Experiment Name: At_Germinating_Seeds_cDNA_P Parameter: Tissue Value: Germinating Seeds
  misc_feature: MA Experiment ID: 108463 Result: Down-regulated in Transcription
  misc_feature: MA Experiment 108463 PARAMETER Experiment Name: At_Germinating_Seeds_cDNA_P Parameter: Age (day) Value: 3 vs. 0
  misc_feature: MA Experiment 108463 PARAMETER Experiment Name: At_Germinating_Seeds_cDNA_P Parameter: Tissue Value: Germinating Seeds
  misc_feature: MA Experiment ID: 108464 Result: Down-regulated in Transcription
  misc_feature: MA Experiment 108464 PARAMETER Experiment Name: At_Germinating_Seeds_cDNA_P Parameter: Age (day) Value: 4 vs. 0
  misc_feature: MA Experiment 108464 PARAMETER Experiment Name: At_Germinating_Seeds_cDNA_P Parameter: Tissue Value: Germinating Seeds
  misc_feature: MA Experiment ID: 108573 Result: Up-regulated in Transcription
  misc_feature: MA Experiment 108573 PARAMETER Experiment Name: At_Drought_cDNA_P Parameter: Timepoint (hr) Value: 6
  misc_feature: MA Experiment 108573 PARAMETER Experiment Name: At_Drought_cDNA_P Parameter: Tissue Value: Aerial
  misc_feature: MA Experiment 108573 PARAMETER Experiment Name: At_Drought_cDNA_P Parameter: Treatment Value: Drought vs. No Drought
  misc_feature: MA Experiment ID: 108595 Result: Down-regulated in Transcription
  misc_feature: MA Experiment 108595 PARAMETER Experiment Name: At_Ler-pi_Ovule_cDNA_P Parameter: Plant Line Value: null
atgacgataattgttttaattttgggccagagagaaagggtcgcaaaaccaccgccgtatatccacggccgtcttatcaccggcaacaaccgtaggtttttgttttccgtcgcgatggaggtggataagaaggacgagagagaggctgaatcttcggagcaagtggtgaatccatgggaagtgtccgccaaagacggcgggaagatcgattacgacaagcttattgacaaatttggatgtcaaaggcttgacgagtcactgattgatcgtgttcagagactgacttctcgtcaaccacacgtgttcctccgccgtagtgtcttcttcgcccaccgggatttcaatgagattttggacgcttatgagagaggagacaagttctatctctacactggaagaggaccttcatcagaagcattgcatttggggcatttgattcctttcatgtttaccaaatacttgcaagaagctttcaaggttccccttgttatacagctcacggatgatgaaaaaagtatatggaagaacttatcggtggaggaaagtcaaagacttgccagagaaaatgcgaaagatattattgcttgtggattcgatgtaacaaagaccttcattttctcggacttcgactatgttggcggtgctttctataaaaatatggtgaaggttggcaagtgcgttacacttaataaggctatgggaatctttggcttttccggtgaagatcctatcgcgaaactcagtttccctcctgtgcaggcagttccatcttttcctagctcattcccacatttgttccctggcaaggacaatctccgctgcttgattccttgtgctattgaccaggatccttattttagaatgactcgtgatgtcgcaccccggttaggctatagcaagcccgccctgattgagtcaacattttttcctgcgttgcagggagagaatggaaaaatgtctgctagtgatccaaattctgctatctatgtgactgattccgcaaaggacattaaaaacaagataaacagatatgcgtttagtggtgggcaagactccattgagaagcaccgagaacttggagcaaatctcgaggttgacatacccgtcaagtatctgagtttcttcctcgaagacgattctgaactagaacacattaaaaaggaatatggagaaggaagaatgctaacaggagaagtaaagaagagacttacggaagtgttgacagaaattgtggagagacaccgcagggctcgagctgctgttactgatgagatggttgatgcgttcatggcggtgagacctctcccaagcatgttcgaatagaaaaagtcagaaaccctttttggctcctcagcaacttcacatcactccgtttgatttggattcagacatctttgggtgtctattgatagatttgatccttgaaattgaaccatacttgttagttacaattttcatatttacatttatttatgaatcacattct

SEQ ID NO: 99035 - protein, 440 aa, Arabidopsis thaliana
  peptide (1)..(440): Ceres Seq. ID no. 13602016
  misc_feature (39)..(440): Homolog of NCBI NO: 15229319 NR Description: tryptophanyl-tRNA synthetase -related
  misc_feature (45)..(440): Homolog of NCBI NO: 32709 NR Description: IFP53 [Homo sapiens]
  misc_feature (45)..(440): Homolog of NCBI NO: 135191 NR Description: Tryptophanyl-tRNA synthetase (Tryptophan--tRNA
  misc_feature (45)..(440): Homolog of NCBI NO: 4759316 NR Description: tryptophanyl-tRNA synthetase; interferon-induced
  misc_feature (45)..(435): Homolog of NCBI NO: 2851538 NR Description: TRYPTOPHANYL-TRNA SYNTHETASE (TRYPTOPHAN--TRNA
  misc_feature (45)..(440): Homolog of NCBI NO: 12835778 NR Description: unnamed protein product [Mus musculus]
  misc_feature (45)..(440): Homolog of NCBI NO: 34328206 NR Description: tryptophanyl-tRNA synthetase [Mus musculus]
  misc_feature (39)..(435): Homolog of NCBI NO: 28302309 NR Description: Similar to tryptophanyl-tRNA synthetase [Xenopus
  misc_feature (45)..(440): Homolog of NCBI NO: 29144895 NR Description: tryptophanyl-tRNA synthetase [Mus musculus]
  misc_feature (45)..(435): Homolog of NCBI NO: 7428462 NR Description: tryptophan-tRNA ligase (EC 6.1.1.2) [validated] -
MTIIVLILGQRERVAKPPPYIHGRLITGNNRRFLFSVAMEVDKKDEREAESSEQVVNPWEVSAKDGGKIDYDKLIDKFGCQRLDESLIDRVQRLTSRQPHVFLRRSVFFAHRDFNEILDAYERGDKFYLYTGRGPSSEALHLGHLIPFMFTKYLQEAFKVPLVIQLTDDEKSIWKNLSVEESQRLARENAKDIIACGFDVTKTFIFSDFDYVGGAFYKNMVKVGKCVTLNKAMGIFGFSGEDPIAKLSFPPVQAVPSFPSSFPHLFPGKDNLRCLIPCAIDQDPYFRMTRDVAPRLGYSKPALIESTFFPALQGENGKMSASDPNSAIYVTDSAKDIKNKINRYAFSGGQDSIEKHRELGANLEVDIPVKYLSFFLEDDSELEHIKKEYGEGRMLTGEVKKRLTEVLTEIVERHRRARAAVTDEMVDAFMAVRPLPSMFE

SEQ ID NO: 99036 - protein, 402 aa, Arabidopsis thaliana; identical to SEQ ID NO: 41624
  peptide (1)..(402): Ceres Seq. ID no. 13602017
  misc_feature (1)..(402): Homolog of NCBI NO: 15229319 NR Description: tryptophanyl-tRNA synthetase -related
  misc_feature (7)..(402): Homolog of NCBI NO: 32709 NR Description: IFP53 [Homo sapiens]
  misc_feature (7)..(402): Homolog of NCBI NO: 135191 NR Description: Tryptophanyl-tRNA synthetase (Tryptophan--tRNA
  misc_feature (7)..(402): Homolog of NCBI NO: 4759316 NR Description: tryptophanyl-tRNA synthetase; interferon-induced
  misc_feature (7)..(397): Homolog of NCBI NO: 2851538 NR Description: TRYPTOPHANYL-TRNA SYNTHETASE (TRYPTOPHAN--TRNA
  misc_feature (7)..(402): Homolog of NCBI NO: 12835778 NR Description: unnamed protein product [Mus musculus]
  misc_feature (7)..(402): Homolog of NCBI NO: 34328206 NR Description: tryptophanyl-tRNA synthetase [Mus musculus]
  misc_feature (1)..(397): Homolog of NCBI NO: 28302309 NR Description: Similar to tryptophanyl-tRNA synthetase [Xenopus
  misc_feature (7)..(402): Homolog of NCBI NO: 29144895 NR Description: tryptophanyl-tRNA synthetase [Mus musculus]
  misc_feature (7)..(397): Homolog of NCBI NO: 7428462 NR Description: tryptophan-tRNA ligase (EC 6.1.1.2) [validated] -

SEQ ID NO: 99037 - protein, 292 aa, Arabidopsis thaliana; identical to SEQ ID NO: 41625
  peptide (1)..(292): Ceres Seq. ID no. 13602018
  misc_feature (1)..(292): Homolog of NCBI NO: 15229319 NR Description: tryptophanyl-tRNA synthetase -related
  misc_feature (1)..(292): Homolog of NCBI NO: 32709 NR Description: IFP53 [Homo sapiens]
  misc_feature (1)..(292): Homolog of NCBI NO: 135191 NR Description: Tryptophanyl-tRNA synthetase (Tryptophan--tRNA
  misc_feature (1)..(292): Homolog of NCBI NO: 4759316 NR Description: tryptophanyl-tRNA synthetase; interferon-induced
  misc_feature (1)..(287): Homolog of NCBI NO: 2851538 NR Description: TRYPTOPHANYL-TRNA SYNTHETASE (TRYPTOPHAN--TRNA
  misc_feature (1)..(292): Homolog of NCBI NO: 12835778 NR Description: unnamed protein product [Mus musculus]
  misc_feature (1)..(292): Homolog of NCBI NO: 34328206 NR Description: tryptophanyl-tRNA synthetase [Mus musculus]
  misc_feature (1)..(287): Homolog of NCBI NO: 28302309 NR Description: Similar to tryptophanyl-tRNA synthetase [Xenopus
  misc_feature (1)..(292): Homolog of NCBI NO: 29144895 NR Description: tryptophanyl-tRNA synthetase [Mus musculus]
  misc_feature (1)..(287): Homolog of NCBI NO: 7428462 NR Description: tryptophan-tRNA ligase (EC 6.1.1.2) [validated] -

SEQ ID NO: 99038 - DNA, 1217 bp, Arabidopsis thaliana
  misc_feature (1)..(1217): Ceres Seq. ID no. 13602019
  misc_feature: MA Experiment ID: 108461 Result: Up-regulated in Transcription
  misc_feature: MA Experiment 108461 PARAMETER Experiment Name: At_Germinating_Seeds_cDNA_P Parameter: Age (day) Value: 1 vs. 0
  misc_feature: MA Experiment 108461 PARAMETER Experiment Name: At_Germinating_Seeds_cDNA_P Parameter: Tissue Value: Germinating Seeds
  misc_feature: MA Experiment ID: 108488 Result: Down-regulated in Transcription
  misc_feature: MA Experiment ID: 20000113 Result: Up-regulated in Transcription
  misc_feature: MA Experiment 20000113 PARAMETER Experiment Name: At_42deg_Heat_cDNA_P Parameter: Temperature (deg C) Value: 42 vs. 22
  misc_feature: MA Experiment 20000113 PARAMETER Experiment Name: At_42deg_Heat_cDNA_P Parameter: Timepoint (hr) Value: 8
  misc_feature: MA Experiment 20000113 PARAMETER Experiment Name: At_42deg_Heat_cDNA_P Parameter: Tissue Value: Aerial
  misc_feature: MA Experiment ID: 20000117 Result: Down-regulated in Transcription
  misc_feature: MA Experiment 20000117 PARAMETER Experiment Name: At_100uM_ABA_Mutants_cDNA_P Parameter: Plant Line Value: Columbia
  misc_feature: MA Experiment 20000117 PARAMETER Experiment Name: At_100uM_ABA_Mutants_cDNA_P Parameter: Timepoint (hr) Value: 6
  misc_feature: MA Experiment 20000117 PARAMETER Experiment Name: At_100uM_ABA_Mutants_cDNA_P Parameter: Tissue Value: Aerial
  misc_feature: MA Experiment 20000117 PARAMETER Experiment Name: At_100uM_ABA_Mutants_cDNA_P Parameter: Treatment Value: 100uM ABA vs. No Treatment
  misc_feature: MA Experiment ID: 20000173 Result: Up-regulated in Transcription
  misc_feature: MA Experiment 20000173 PARAMETER Experiment Name: At_42deg_Heat_P Parameter: Age (day) Value: 14
  misc_feature: MA Experiment 20000173 PARAMETER Experiment Name: At_42deg_Heat_P Parameter: Organism Value: A. thaliana
  misc_feature: MA Experiment 20000173 PARAMETER Experiment Name: At_42deg_Heat_P Parameter: Plant Line Value: WS
  misc_feature: MA Experiment 20000173 PARAMETER Experiment Name: At_42deg_Heat_P Parameter: Temperature (deg C) Value: 42 vs. 22
  misc_feature: MA Experiment 20000173 PARAMETER Experiment Name: At_42deg_Heat_P Parameter: Timepoint (hr) Value: 6
  misc_feature: MA Experiment 20000173 PARAMETER Experiment Name: At_42deg_Heat_P Parameter: Tissue Value: Aerial
  misc_feature: MA Experiment ID: 20000179 Result: Up-regulated in Transcription
  misc_feature: MA Experiment 20000179 PARAMETER Experiment Name: At_Germinating_Seeds_P Parameter: Age (hr) Value: 6 vs. 0
  misc_feature: MA Experiment 20000179 PARAMETER Experiment Name: At_Germinating_Seeds_P Parameter: Tissue Value: Germinating Seeds
  misc_feature: MA Experiment ID: 20000180 Result: Up-regulated in Transcription
  misc_feature: MA Experiment 20000180 PARAMETER Experiment Name: At_Germinating_Seeds_P Parameter: Age (hr) Value: 24 vs. 0
  misc_feature: MA Experiment 20000180 PARAMETER Experiment Name: At_Germinating_Seeds_P Parameter: Tissue Value: Germinating Seeds
  misc_feature: MA Experiment ID: 20000224 Result: Up-regulated in Transcription
  misc_feature: MA Experiment ID: 20000264 Result: Up-regulated in Transcription
  misc_feature: MA Experiment 20000264 PARAMETER Experiment Name: At_Open_Flower_P Parameter: Age (day) Value: 21
  misc_feature: MA Experiment 20000264 PARAMETER Experiment Name: At_Open_Flower_P Parameter: Plant Line Value: WS
  misc_feature: MA Experiment 20000264 PARAMETER Experiment Name: At_Open_Flower_P Parameter: Tissue Value: Open Flower vs. Whole Plant
  misc_feature: MA Experiment ID: 20001555 Result: Down-regulated in Transcription
  misc_feature: MA Experiment 20001555 PARAMETER Experiment Name: At_Drought_Soil_Dry_P Parameter: Age (day) Value: 24
  misc_feature: MA Experiment 20001555 PARAMETER Experiment Name: At_Drought_Soil_Dry_P Parameter: Organism Value: A. thaliana
  misc_feature: MA Experiment 20001555 PARAMETER Experiment Name: At_Drought_Soil_Dry_P Parameter: Plant Line Value: WS
  misc_feature: MA Experiment 20001555 PARAMETER Experiment Name: At_Drought_Soil_Dry_P Parameter: Post Timepoint (hr) Value: None
  misc_feature: MA Experiment 20001555 PARAMETER Experiment Name: At_Drought_Soil_Dry_P Parameter: Post-Treatment Value: None
  misc_feature: MA Experiment 20001555 PARAMETER Experiment Name: At_Drought_Soil_Dry_P Parameter: Timepoint (day) Value: 10
  misc_feature: MA Experiment 20001555 PARAMETER Experiment Name: At_Drought_Soil_Dry_P Parameter: Treatment Value: Drought vs. No Drought
  misc_feature: MA Experiment ID: 20001905 Result: Up-regulated in Transcription
  misc_feature: MA Experiment 20001905 PARAMETER Experiment Name: At_Drought_Reproduction_P Parameter: Age (day) Value: 40
  misc_feature: MA Experiment 20001905 PARAMETER Experiment Name: At_Drought_Reproduction_P Parameter: Organism Value: A. thaliana
  misc_feature: MA Experiment 20001905 PARAMETER Experiment Name: At_Drought_Reproduction_P Parameter: Plant Line Value: WS
  misc_feature: MA Experiment 20001905 PARAMETER Experiment Name: At_Drought_Reproduction_P Parameter: Timepoint (day) Value: 10
  misc_feature: MA Experiment 20001905 PARAMETER Experiment Name: At_Drought_Reproduction_P Parameter: Tissue Value: Rosettes
  misc_feature: MA Experiment 20001905 PARAMETER Experiment Name: At_Drought_Reproduction_P Parameter: Treatment Value: Drought vs. No Drought
agacaagtttgttctggataaaaagacaattcatttctattttaattgtctgcaaaattctcacgggccatcggagagaggagacagaggtggtgctgcacaagaatccttcctcctatatcctacaagactttggaatgggaagagaagttgttgaggtgcttatggaccgaaacgccgacgtttcaagcgctagagttcatgttgctcctaagatagctgcagaggagactgatgaggaatttgaagtcaaagaatgcacagaggagaagtctctttctgagaatgcaccaaatgttggatctgctgagagagttggagctcagaaatcacctaaaacccgtaatggaaatgctaaagtttcaaagcagcaggatgctcctcttctcgcggtgaggaagccattgcaacccgagaacaagaagcatattgatgacgaagataattgctccattgcttcttccgttgcaacttccatgaggatgggtaagtctggattgacttatggaagtgctccaacgtttaggagtgctcaacgtgctgagaaacgcaaggagtattaccaaaagctcgaggagaaaaaccaagcgcttgaagctgagaggaacgagcttgaacagaggcaaaaggatgaacaagaagcagccttgaagcaacttagaaagaatctcaagttcaaggctaaacccgtccccaacttctactacgaggcacctcctgcgaaacctgagctcaagaagcttcctttgacacgtcccaagtcgccaaaactgatcctttctcggagaaaaagcttcagcgacgcagtcagctcgtcttcccgtgaagagattctgaagacagtctctaaccggaaccgacacagcactggaacagttcagaacaaagacgatgatcacaggaacaagaacaccaatgctgcgcacgacagccctcgtgtcagatcaggcaaaggtaaatccggattgaaaccagtgaacgagtcctcagaagaagcttgaaatttcaaaagatgatgctttgttggtctaacttgatcttgccggagaaaatgtaaaatcaaagactctttgtttttcggttatttccggtatacgtttggttcactatgtaactgtcttttttcgattttaagttttaacatgaaaaactttatgttgattgttgaacaactcctcctaatgttgaaatttgtaaatctgaatgctgttggattt

SEQ ID NO: 99039 - protein, 332 aa, Arabidopsis thaliana
  peptide (1)..(332): Ceres Seq. ID no. 13602020
  misc_feature (45)..(332): Homolog of NCBI NO: 6175167 NR Description: unknown protein [Arabidopsis thaliana]
  misc_feature (46)..(332): Homolog of NCBI NO: 18396961 NR Description: expressed protein [Arabidopsis thaliana]
  misc_feature (46)..(332): Homolog of NCBI NO: 21618286 NR Description: unknown [Arabidopsis thaliana]
  misc_feature (46)..(332): Homolog of NCBI NO: 30679219 NR Description: expressed protein [Arabidopsis thaliana]
  misc_feature (90)..(288): Homolog of NCBI NO: 28453880 NR Description: WAVE-DAMPENED2 [Arabidopsis thaliana]
  misc_feature (91)..(332): Homolog of NCBI NO: 18404945 NR Description: expressed protein [Arabidopsis thaliana] At1g54460/F20D21_28 [Arabidopsis thaliana]
  misc_feature (91)..(332): Homolog of NCBI NO: 21553401 NR Description: unknown [Arabidopsis thaliana]
  misc_feature (87)..(305): Homolog of NCBI NO: 9294199 NR Description: gb|AAF04893.1~gene_id:MXC7.13~similar to unknown
  misc_feature (87)..(305): Homolog of NCBI NO: 15228950 NR Description: expressed protein [Arabidopsis thaliana]
  misc_feature (106)..(300): Homolog of NCBI NO: 34897180 NR Description: unknown protein [Oryza sativa (japonica
TSLFWIKRQFISILIVCKILTGHRREETEVVLHKNPSSYILQDFGMGREVVEVLMDRNADVSSARVHVAPKIAAEETDEEFEVKECTEEKSLSENAPNVGSAERVGAQKSPKTRNGNAKVSKQQDAPLLAVRKPLQPENKKHIDDEDNCSIASSVATSMRMGKSGLTYGSAPTFRSAQRAEKRKEYYQKLEEKNQALEAERNELEQRQKDEQEAALKQLRKNLKFKAKPVPNFYYEAPPAKPELKKLPLTRPKSPKLILSRRKSFSDAVSSSSREEILKTVSNRNRHSTGTVQNKDDDHRNKNTNAAHDSPRVRSGKGKSGLKPVNESSEEA

SEQ ID NO: 99040 - protein, 287 aa, Arabidopsis thaliana
  peptide (1)..(287): Ceres Seq. ID no. 13602021
  misc_feature (1)..(287): Homolog of NCBI NO: 6175167 NR Description: unknown protein [Arabidopsis thaliana]
  misc_feature (1)..(287): Homolog of NCBI NO: 18396961 NR Description: expressed protein [Arabidopsis thaliana]
  misc_feature (1)..(287): Homolog of NCBI NO: 21618286 NR Description: unknown [Arabidopsis thaliana]
  misc_feature (1)..(287): Homolog of NCBI NO: 30679219 NR Description: expressed protein [Arabidopsis thaliana]
  misc_feature (45)..(243): Homolog of NCBI NO: 28453880 NR Description: WAVE-DAMPENED2 [Arabidopsis thaliana]
  misc_feature (46)..(287): Homolog of NCBI NO: 18404945 NR Description: expressed protein [Arabidopsis thaliana] At1g54460/F20D21_28 [Arabidopsis thaliana]
  misc_feature (46)..(287): Homolog of NCBI NO: 21553401 NR Description: unknown [Arabidopsis thaliana]
  misc_feature (42)..(260): Homolog of NCBI NO: 9294199 NR Description: gb|AAF04893.1~gene_id:MXC7.13~similar to unknown
  misc_feature (42)..(260): Homolog of NCBI NO: 15228950 NR Description: expressed protein [Arabidopsis thaliana]
  misc_feature (61)..(255): Homolog of NCBI NO: 34897180 NR Description: unknown protein [Oryza sativa (japonica
MGREVVEVLMDRNADVSSARVHVAPKIAAEETDEEFEVKECTEEKSLSENAPNVGSAERVGAQKSPKTRNGNAKVSKQQDAPLLAVRKPLQPENKKHIDDEDNCSIASSVATSMRMGKSGLTYGSAPTFRSAQRAEKRKEYYQKLEEKNQALEAERNELEQRQKDEQEAALKQLRKNLKFKAKPVPNFYYEAPPAKPELKKLPLTRPKSPKLILSRRKSFSDAVSSSSREEILKTVSNRNRHSTGTVQNKDDDHRNKNTNAAHDSPRVRSGKGKSGLKPVNESSEEA

SEQ ID NO: 99041 - protein, 278 aa, Arabidopsis thaliana
  peptide (1)..(278): Ceres Seq. ID no. 13602022
  misc_feature (1)..(278): Homolog of NCBI NO: 6175167 NR Description: unknown protein [Arabidopsis thaliana]
  misc_feature (1)..(278): Homolog of NCBI NO: 18396961 NR Description: expressed protein [Arabidopsis thaliana]
  misc_feature (1)..(278): Homolog of NCBI NO: 21618286 NR Description: unknown [Arabidopsis thaliana]
  misc_feature (1)..(278): Homolog of NCBI NO: 30679219 NR Description: expressed protein [Arabidopsis thaliana]
  misc_feature (36)..(234): Homolog of NCBI NO: 28453880 NR Description: WAVE-DAMPENED2 [Arabidopsis thaliana]
  misc_feature (37)..(278): Homolog of NCBI NO: 18404945 NR Description: expressed protein [Arabidopsis thaliana] At1g54460/F20D21_28 [Arabidopsis thaliana]
  misc_feature (37)..(278): Homolog of NCBI NO: 21553401 NR Description: unknown [Arabidopsis thaliana]
  misc_feature (33)..(251): Homolog of NCBI NO: 9294199 NR Description: gb|AAF04893.1~gene_id:MXC7.13~similar to unknown
  misc_feature (33)..(251): Homolog of NCBI NO: 15228950 NR Description: expressed protein [Arabidopsis thaliana]
  misc_feature (52)..(246): Homolog of NCBI NO: 34897180 NR Description: unknown protein [Oryza sativa (japonica
MDRNADVSSARVHVAPKIAAEETDEEFEVKECTEEKSLSENAPNVGSAERVGAQKSPKTRNGNAKVSKQQDAPLLAVRKPLQPENKKHIDDEDNCSIASSVATSMRMGKSGLTYGSAPTFRSAQRAEKRKEYYQKLEEKNQALEAERNELEQRQKDEQEAALKQLRKNLKFKAKPVPNFYYEAPPAKPELKKLPLTRPKSPKLILSRRKSFSDAVSSSSREEILKTVSNRNRHSTGTVQNKDDDHRNKNTNAAHDSPRVRSGKGKSGLKPVNESSEEA

SEQ ID NO: 99042 - DNA, 885 bp, Arabidopsis thaliana
  misc_feature (1)..(885): Ceres Seq. ID no. 13602023
  misc_feature: MA Experiment ID: 108434 Result: Down-regulated in Transcription
  misc_feature: MA Experiment 108434 PARAMETER Experiment Name: At_Root_Tips_cDNA_P Parameter: Tissue Value: Root Tips
  misc_feature: MA Experiment ID: 108435 Result: Up-regulated in Transcription
  misc_feature: MA Experiment 108435 PARAMETER Experiment Name: At_stm_Mutants_cDNA_P Parameter: Plant Line Value: wt Landsburg vs stm
  misc_feature: MA Experiment 108435 PARAMETER Experiment Name: At_stm_Mutants_cDNA_P Parameter: Tissue Value: Shoot Apical Meristem Region
  misc_feature: MA Experiment ID: 108462 Result: Up-regulated in Transcription
  misc_feature: MA Experiment 108462 PARAMETER Experiment Name: At_Germinating_Seeds_cDNA_P Parameter: Age (day) Value: 2 vs. 0
  misc_feature: MA Experiment 108462 PARAMETER Experiment Name: At_Germinating_Seeds_cDNA_P Parameter: Tissue Value: Germinating Seeds
  misc_feature: MA Experiment ID: 108463 Result: Up-regulated in Transcription
  misc_feature: MA Experiment 108463 PARAMETER Experiment Name: At_Germinating_Seeds_cDNA_P Parameter: Age (day) Value: 3 vs. 0
  misc_feature: MA Experiment 108463 PARAMETER Experiment Name: At_Germinating_Seeds_cDNA_P Parameter: Tissue Value: Germinating Seeds
  misc_feature: MA Experiment ID: 108464 Result: Up-regulated in Transcription
  misc_feature: MA Experiment 108464 PARAMETER Experiment Name: At_Germinating_Seeds_cDNA_P Parameter: Age (day) Value: 4 vs. 0
  misc_feature: MA Experiment 108464 PARAMETER Experiment Name: At_Germinating_Seeds_cDNA_P Parameter: Tissue Value: Germinating Seeds
  misc_feature: MA Experiment ID: 108574 Result: Down-regulated in Transcription
  misc_feature: MA Experiment 108574 PARAMETER Experiment Name: At_Wounding__cDNA_P Parameter: Timepoint (hr) Value: 1
  misc_feature: MA Experiment 108574 PARAMETER Experiment Name: At_Wounding__cDNA_P Parameter: Tissue Value: Aerial
  misc_feature: MA Experiment 108574 PARAMETER Experiment Name: At_Wounding__cDNA_P Parameter: Treatment Value: Wounding vs. No Wounding
  misc_feature: MA Experiment ID: 108577 Result: Down-regulated in Transcription
  misc_feature: MA Experiment 108577 PARAMETER Experiment Name: At_42deg_Heat_cDNA_P Parameter: Temperature (deg C) Value: 42 vs. 22
  misc_feature: MA Experiment 108577 PARAMETER Experiment Name: At_42deg_Heat_cDNA_P Parameter: Timepoint (hr) Value: 6
  misc_feature: MA Experiment 108577 PARAMETER Experiment Name: At_42deg_Heat_cDNA_P Parameter: Tissue Value: Aerial
  misc_feature: MA Experiment ID: 108579 Result: Down-regulated in Transcription
  misc_feature: MA Experiment 108579 PARAMETER Experiment Name: At_4deg_Cold_cDNA_P Parameter: Temperature (deg C) Value: 4 vs. 22
  misc_feature: MA Experiment 108579 PARAMETER Experiment Name: At_4deg_Cold_cDNA_P Parameter: Timepoint (hr) Value: 6
  misc_feature: MA Experiment 108579 PARAMETER Experiment Name: At_4deg_Cold_cDNA_P Parameter: Tissue Value: Aerial
  misc_feature: MA Experiment ID: 108594 Result: Down-regulated in Transcription
  misc_feature: MA Experiment 108594 PARAMETER Experiment Name: At_Ler-rhl_Root_cDNA_P Parameter: Plant Line Value: null
  misc_feature: MA Experiment ID: 108595 Result: Down-regulated in Transcription
  misc_feature: MA Experiment 108595 PARAMETER Experiment Name: At_Ler-pi_Ovule_cDNA_P Parameter: Plant Line Value: null
  misc_feature: MA Experiment ID: 108605 Result: Down-regulated in Transcription
  misc_feature: MA Experiment 108605 PARAMETER Experiment Name: At_100uM_ABA_cDNA_P Parameter: Timepoint (hr) Value: 6
  misc_feature: MA Experiment 108605 PARAMETER Experiment Name: At_100uM_ABA_cDNA_P Parameter: Tissue Value: Aerial
  misc_feature: MA Experiment 108605 PARAMETER Experiment Name: At_100uM_ABA_cDNA_P Parameter: Treatment Value: 100uM ABA vs. No Treatment
  misc_feature: MA Experiment ID: 108607 Result: Down-regulated in Transcription
  misc_feature: MA Experiment 108607 PARAMETER Experiment Name: At_100uM_ABA_cDNA_P Parameter: Timepoint (hr) Value: 4
  misc_feature: MA Experiment 108607 PARAMETER Experiment Name: At_100uM_ABA_cDNA_P Parameter: Tissue Value: Aerial
  misc_feature: MA Experiment 108607 PARAMETER Experiment Name: At_100uM_ABA_cDNA_P Parameter: Treatment Value: 100uM ABA vs. No Treatment
  misc_feature: MA Experiment ID: 20000070 Result: Up-regulated in Transcription
  misc_feature: MA Experiment 20000070 PARAMETER Experiment Name: At_100uM_ABA_Mutants_cDNA_P Parameter: Plant Line Value: CS24
  misc_feature: MA Experiment 20000070 PARAMETER Experiment Name: At_100uM_ABA_Mutants_cDNA_P Parameter: Timepoint (hr) Value: 6
  misc_feature: MA Experiment 20000070 PARAMETER Experiment Name: At_100uM_ABA_Mutants_cDNA_P Parameter: Tissue Value: Aerial
  misc_feature: MA Experiment 20000070 PARAMETER Experiment Name: At_100uM_ABA_Mutants_cDNA_P Parameter: Treatment Value: 100uM ABA vs. No Treatment
  misc_feature: MA Experiment ID: 20000090 Result: Up-regulated in Transcription
  misc_feature: MA Experiment ID: 20000112 Result: Down-regulated in Transcription
  misc_feature: MA Experiment 20000112 PARAMETER Experiment Name: At_42deg_Heat_cDNA_P Parameter: Temperature (deg C) Value: 42 vs. 22
  misc_feature: MA Experiment 20000112 PARAMETER Experiment Name: At_42deg_Heat_cDNA_P Parameter: Timepoint (hr) Value: 2
  misc_feature: MA Experiment 20000112 PARAMETER Experiment Name: At_42deg_Heat_cDNA_P Parameter: Tissue Value: Aerial
  misc_feature: MA Experiment ID: 20000144 Result: Down-regulated in Transcription
  misc_feature: MA Experiment 20000144 PARAMETER Experiment Name: At_42deg_Heat_cDNA_P Parameter: Temperature (deg C) Value: 42 vs. 22
  misc_feature: MA Experiment 20000144 PARAMETER Experiment Name: At_42deg_Heat_cDNA_P Parameter: Timepoint (hr) Value: 1
  misc_feature: MA Experiment 20000144 PARAMETER Experiment Name: At_42deg_Heat_cDNA_P Parameter: Tissue Value: Aerial
  misc_feature: MA Experiment ID: 20000169 Result: Down-regulated in Transcription
  misc_feature: MA Experiment 20000169 PARAMETER Experiment Name: At_100uM_ABA_P Parameter: Age (day) Value: 14
  misc_feature: MA Experiment 20000169 PARAMETER Experiment Name: At_100uM_ABA_P Parameter: Organism Value: A. thaliana
  misc_feature: MA Experiment 20000169 PARAMETER Experiment Name: At_100uM_ABA_P Parameter: Plant Line Value: WS
  misc_feature: MA Experiment 20000169 PARAMETER Experiment Name: At_100uM_ABA_P Parameter: Timepoint (hr) Value: 6
  misc_feature: MA Experiment 20000169 PARAMETER Experiment Name: At_100uM_ABA_P Parameter: Tissue Value: Aerial
  misc_feature: MA Experiment 20000169 PARAMETER Experiment Name: At_100uM_ABA_P Parameter: Treatment Value: 100uM ABA vs. No Treatment
  misc_feature: MA Experiment ID: 20000171 Result: Down-regulated in Transcription
  misc_feature: MA Experiment 20000171 PARAMETER Experiment Name: At_42deg_Heat_P Parameter: Age (day) Value: 14
  misc_feature: MA Experiment 20000171 PARAMETER Experiment Name: At_42deg_Heat_P Parameter: Organism Value: A. thaliana
  misc_feature: MA Experiment 20000171 PARAMETER Experiment Name: At_42deg_Heat_P Parameter: Plant Line Value: WS
  misc_feature: MA Experiment 20000171 PARAMETER Experiment Name: At_42deg_Heat_P Parameter: Temperature (deg C) Value: 42 vs. 22
  misc_feature: MA Experiment 20000171 PARAMETER Experiment Name: At_42deg_Heat_P Parameter: Timepoint (hr) Value: 1
  misc_feature: MA Experiment 20000171 PARAMETER Experiment Name: At_42deg_Heat_P Parameter: Tissue Value: Aerial
  misc_feature: MA Experiment ID: 20000173 Result: Down-regulated in Transcription
  misc_feature: MA Experiment 20000173 PARAMETER Experiment Name: At_42deg_Heat_P Parameter: Age (day) Value: 14
  misc_feature: MA Experiment 20000173 PARAMETER Experiment Name: At_42deg_Heat_P Parameter: Organism Value: A. thaliana
  misc_feature: MA Experiment 20000173 PARAMETER Experiment Name: At_42deg_Heat_P Parameter: Plant Line Value: WS
  misc_feature: MA Experiment 20000173 PARAMETER Experiment Name: At_42deg_Heat_P Parameter: Temperature (deg C) Value: 42 vs. 22
  misc_feature: MA Experiment 20000173 PARAMETER Experiment Name: At_42deg_Heat_P Parameter: Timepoint (hr) Value: 6
  misc_feature: MA Experiment 20000173 PARAMETER Experiment Name: At_42deg_Heat_P Parameter: Tissue Value: Aerial
  misc_feature: MA Experiment ID: 20000184 Result: Down-regulated in Transcription
  misc_feature: MA Experiment 20000184 PARAMETER Experiment Name: At_Shoots__P Parameter: Age (day) Value: 7
  misc_feature: MA Experiment 20000184 PARAMETER Experiment Name: At_Shoots__P Parameter: Tissue Value: Shoots vs. Whole Plant
  misc_feature: MA Experiment ID: 20000213 Result: Down-regulated in Transcription
  misc_feature: MA Experiment 20000213 PARAMETER Experiment Name: At_4deg_Cold_P Parameter: Timepoint (hr) Value: 2
  misc_feature: MA Experiment ID: 20000227 Result: Down-regulated in Transcription
  misc_feature: MA Experiment 20000227 PARAMETER Experiment Name: At_Root-Tips-vs-Tops_P Parameter: Tissue Value: Root Tips vs. Root Tops
  misc_feature: MA Experiment ID: 20000234 Result: Down-regulated in Transcription
  misc_feature: MA Experiment 20000234 PARAMETER Experiment Name: At_Siliques_P Parameter: Age (day) Value: 21
  misc_feature: MA Experiment 20000234 PARAMETER Experiment Name: At_Siliques_P Parameter: Organism Value: A. thaliana
  misc_feature: MA Experiment 20000234 PARAMETER Experiment Name: At_Siliques_P Parameter: Plant Line Value: WS
  misc_feature: MA Experiment 20000234 PARAMETER Experiment Name: At_Siliques_P Parameter: Tissue Value: Less Than 5mm Siliques vs. Whole Plant
  misc_feature: MA Experiment ID: 20000264 Result: Down-regulated in Transcription
  misc_feature: MA Experiment 20000264 PARAMETER Experiment Name: At_Open_Flower_P Parameter: Age (day) Value: 21
  misc_feature: MA Experiment 20000264 PARAMETER Experiment Name: At_Open_Flower_P Parameter: Plant Line Value: WS
  misc_feature: MA Experiment 20000264 PARAMETER Experiment Name: At_Open_Flower_P Parameter: Tissue Value: Open Flower vs. Whole Plant
  misc_feature: MA Experiment ID: 20000265 Result: Down-regulated in Transcription
  misc_feature: MA Experiment 20000265 PARAMETER Experiment Name: At_Open_Flower_P Parameter: Age (day) Value: 21
  misc_feature: MA Experiment 20000265 PARAMETER Experiment Name: At_Open_Flower_P Parameter: Plant Line Value: WS
  misc_feature: MA Experiment 20000265 PARAMETER Experiment Name: At_Open_Flower_P Parameter: Tissue Value: Closed Flower vs. Whole Plant
  misc_feature: MA Experiment ID: 20000269 Result: Down-regulated in Transcription
  misc_feature: MA Experiment 20000269 PARAMETER Experiment Name: At_1mM_KNO3_L-vs-H_Roots_P Parameter: Age (day) Value: 7,10,12
  misc_feature: MA Experiment 20000269 PARAMETER Experiment Name: At_1mM_KNO3_L-vs-H_Roots_P Parameter: Organism Value: A. thaliana
  misc_feature: MA Experiment 20000269 PARAMETER Experiment Name: At_1mM_KNO3_L-vs-H_Roots_P Parameter: Plant Line Value: WS
  misc_feature: MA Experiment 20000269 PARAMETER Experiment Name: At_1mM_KNO3_L-vs-H_Roots_P Parameter: Timepoint (day) Value: 7,10,12
  misc_feature: MA Experiment 20000269 PARAMETER Experiment Name: At_1mM_KNO3_L-vs-H_Roots_P Parameter: Tissue Value: Roots
  misc_feature: MA Experiment 20000269 PARAMETER Experiment Name: At_1mM_KNO3_L-vs-H_Roots_P Parameter: Treatment Value: 1mM KNO3 vs. 50mM KNO3
  misc_feature: MA Experiment ID: 20000286 Result: Down-regulated in Transcription
  misc_feature: MA Experiment 20000286 PARAMETER Experiment Name: At_Open_Flower_P Parameter: Age (day) Value: 21
  misc_feature: MA Experiment 20000286 PARAMETER Experiment Name: At_Open_Flower_P Parameter: Plant Line Value: WS
  misc_feature: MA Experiment 20000286 PARAMETER Experiment Name: At_Open_Flower_P Parameter: Tissue Value: Half Open vs. Whole Plant
  misc_feature: MA Experiment ID: 20000308 Result: Up-regulated in Transcription
  misc_feature: MA Experiment 20000308 PARAMETER Experiment Name: At_100mM_NaCl__P Parameter: Age (day) Value: 17
  misc_feature: MA Experiment 20000308 PARAMETER Experiment Name: At_100mM_NaCl__P Parameter: Organism Value: A. thaliana
  misc_feature: MA Experiment 20000308 PARAMETER Experiment Name: At_100mM_NaCl__P Parameter: Plant Line Value: WS
  misc_feature: MA Experiment 20000308 PARAMETER Experiment Name: At_100mM_NaCl__P Parameter: Timepoint (hr) Value: 72
  misc_feature: MA Experiment 20000308 PARAMETER Experiment Name: At_100mM_NaCl__P Parameter: Tissue Value: Whole Plant
  misc_feature: MA Experiment 20000308 PARAMETER Experiment Name: At_100mM_NaCl__P Parameter: Treatment Value: 100mM NaCl vs. No Treatment
  misc_feature: MA Experiment ID: 20000438 Result: Down-regulated in Transcription
  misc_feature: MA Experiment 20000438 PARAMETER Experiment Name: At_Shoots__P Parameter: Age (day) Value: 14
  misc_feature: MA Experiment 20000438 PARAMETER Experiment Name: At_Shoots__P Parameter: Tissue Value: Shoots vs. Whole Plant
  misc_feature: MA Experiment ID: 20000441 Result: Up-regulated in Transcription
  misc_feature: MA Experiment 20000441 PARAMETER Experiment Name: At_1uM_BR-BRZ__P Parameter: Tissue Value: Shoot Apices
  misc_feature: MA Experiment 20000441 PARAMETER Experiment Name: At_1uM_BR-BRZ__P Parameter: Treatment Value: 1uM BR vs. No Treatment
  misc_feature: MA Experiment ID: 20000443 Result: Up-regulated in Transcription
  misc_feature: MA Experiment 20000443 PARAMETER Experiment Name: At_1uM_BR-BRZ__P Parameter: Tissue Value: Shoot Apices
  misc_feature: MA Experiment 20000443 PARAMETER Experiment Name: At_1uM_BR-BRZ__P Parameter: Treatment Value: 1uM BRZ vs. No Treatment
  misc_feature: MA Experiment ID: 20000452 Result: Up-regulated in Transcription
  misc_feature: MA Experiment 20000452 PARAMETER Experiment Name: At_CS6879_Shoots-Roots_P Parameter: Age (day) Value: 14
  misc_feature: MA Experiment 20000452 PARAMETER Experiment Name: At_CS6879_Shoots-Roots_P Parameter: Organism Value: A. thaliana
  misc_feature: MA Experiment 20000452 PARAMETER Experiment Name: At_CS6879_Shoots-Roots_P Parameter: Plant Line Value: CS6879 vs. WS
  misc_feature: MA Experiment 20000452 PARAMETER Experiment Name: At_CS6879_Shoots-Roots_P Parameter: Tissue Value: Shoots
  misc_feature: MA Experiment ID: 20000456 Result: Down-regulated in Transcription
  misc_feature: MA Experiment 20000456 PARAMETER Experiment Name: At_100uM_BA_P Parameter: Age (day) Value: 14
  misc_feature: MA Experiment 20000456 PARAMETER Experiment Name: At_100uM_BA_P Parameter: Organism Value: A. thaliana
  misc_feature: MA Experiment 20000456 PARAMETER Experiment Name: At_100uM_BA_P Parameter: Plant Line Value: WS
  misc_feature: MA Experiment 20000456 PARAMETER Experiment Name: At_100uM_BA_P Parameter: Timepoint (hr) Value: 6
  misc_feature: MA Experiment 20000456 PARAMETER Experiment Name: At_100uM_BA_P Parameter: Tissue Value: Aerial
  misc_feature: MA Experiment 20000456 PARAMETER Experiment Name: At_100uM_BA_P Parameter: Treatment Value: 100uM BA vs. No Treatment
  misc_feature: MA Experiment ID: 20000527 Result: Down-regulated in Transcription
  misc_feature: MA Experiment 20000527 PARAMETER Experiment Name: At_10percent_PEG_P Parameter: Age (day) Value: 20
  misc_feature: MA Experiment 20000527 PARAMETER Experiment Name: At_10percent_PEG_P Parameter: Organism Value: A. thaliana
  misc_feature: MA Experiment 20000527 PARAMETER Experiment Name: At_10percent_PEG_P Parameter: Plant Line Value: WS
  misc_feature: MA Experiment 20000527 PARAMETER Experiment Name: At_10percent_PEG_P Parameter: Timepoint (day) Value: 20
  misc_feature: MA Experiment 20000527 PARAMETER Experiment Name: At_10percent_PEG_P Parameter: Tissue Value: Whole Plant
  misc_feature: MA Experiment 20000527 PARAMETER Experiment Name: At_10percent_PEG_P Parameter: Treatment Value: 10percent PEG vs. No Treatment
  misc_feature: MA Experiment ID: 20000575 Result: Down-regulated in Transcription
  misc_feature: MA Experiment 20000575 PARAMETER Experiment Name: At_100uM_ABA_Mutants__P Parameter: Organism Value: A. thaliana
  misc_feature: MA Experiment 20000575 PARAMETER Experiment Name: At_100uM_ABA_Mutants__P Parameter: Plant Line Value: CS22
  misc_feature: MA Experiment 20000575 PARAMETER Experiment Name: At_100uM_ABA_Mutants__P Parameter: Timepoint (hr) Value: 6
  misc_feature: MA Experiment 20000575 PARAMETER Experiment Name: At_100uM_ABA_Mutants__P Parameter: Tissue Value: Whole Plant
  misc_feature: MA Experiment 20000575 PARAMETER Experiment Name: At_100uM_ABA_Mutants__P Parameter: Treatment Value: 1uM ABA vs. No Treatment
  misc_feature: MA Experiment ID: 20000576 Result: Down-regulated in Transcription
  misc_feature: MA Experiment 20000576 PARAMETER Experiment Name: At_100uM_ABA_Mutants__P Parameter: Organism Value: A. thaliana
  misc_feature: MA Experiment 20000576 PARAMETER Experiment Name: At_100uM_ABA_Mutants__P Parameter: Plant Line Value: CS23
  misc_feature: MA Experiment 20000576 PARAMETER Experiment Name: At_100uM_ABA_Mutants__P Parameter: Timepoint (hr) Value: 6
  misc_feature: MA Experiment 20000576 PARAMETER Experiment Name: At_100uM_ABA_Mutants__P Parameter: Tissue Value: Whole Plant
  misc_feature: MA Experiment 20000576 PARAMETER Experiment Name: At_100uM_ABA_Mutants__P Parameter: Treatment Value: 1uM ABA vs. No Treatment
  misc_feature: MA Experiment ID: 20000794 Result: Down-regulated in Transcription
  misc_feature: MA Experiment 20000794 PARAMETER Experiment Name: At_Petals_P Parameter: Age (day) Value: 23-25 days
  misc_feature: MA Experiment 20000794 PARAMETER Experiment Name: At_Petals_P Parameter: Plant Line Value: WS
  misc_feature: MA Experiment 20000794 PARAMETER Experiment Name: At_Petals_P Parameter: Tissue Value: Petals vs. Whole plant
  misc_feature: MA Experiment ID: 20001451 Result: Down-regulated in Transcription
  misc_feature: MA Experiment 20001451 PARAMETER Experiment Name: At_Far-red-induction_P Parameter: Age (day) Value: 7
  misc_feature: MA Experiment 20001451 PARAMETER Experiment Name: At_Far-red-induction_P Parameter: Light Value: Far-red vs. White
  misc_feature: MA Experiment 20001451 PARAMETER Experiment Name: At_Far-red-induction_P Parameter: Organism Value: A. thaliana
  misc_feature: MA Experiment 20001451 PARAMETER Experiment Name: At_Far-red-induction_P Parameter: Plant Line Value: Columbia
  misc_feature: MA Experiment 20001451 PARAMETER Experiment Name: At_Far-red-induction_P Parameter: Timepoint (hr) Value: 24
  misc_feature: MA Experiment 20001451 PARAMETER Experiment Name: At_Far-red-induction_P Parameter: Tissue Value: Whole Plant
  misc_feature: MA Experiment ID: 20001554 Result: Down-regulated in Transcription
  misc_feature: MA Experiment 20001554 PARAMETER Experiment Name: At_Drought_Soil_Dry_P Parameter: Age (day) Value: 21
  misc_feature: MA Experiment 20001554 PARAMETER Experiment Name: At_Drought_Soil_Dry_P Parameter: Organism Value: A. thaliana
  misc_feature: MA Experiment 20001554 PARAMETER Experiment Name: At_Drought_Soil_Dry_P Parameter: Plant Line Value: WS
  misc_feature: MA Experiment 20001554 PARAMETER Experiment Name: At_Drought_Soil_Dry_P Parameter: Post Timepoint (hr) Value: None
  misc_feature: MA Experiment 20001554 PARAMETER Experiment Name: At_Drought_Soil_Dry_P Parameter: Post-Treatment Value: None
  misc_feature: MA Experiment 20001554 PARAMETER Experiment Name: At_Drought_Soil_Dry_P Parameter: Timepoint (day) Value: 7
  misc_feature: MA Experiment 20001554 PARAMETER Experiment Name: At_Drought_Soil_Dry_P Parameter: Treatment Value: Drought vs. No Drought
  misc_feature: MA Experiment ID: 20001555 Result: Down-regulated in Transcription
  misc_feature: MA Experiment 20001555 PARAMETER Experiment Name: At_Drought_Soil_Dry_P Parameter: Age (day) Value: 24
  misc_feature: MA Experiment 20001555 PARAMETER Experiment Name: At_Drought_Soil_Dry_P Parameter: Organism Value: A. thaliana
  misc_feature: MA Experiment 20001555 PARAMETER Experiment Name: At_Drought_Soil_Dry_P Parameter: Plant Line Value: WS
  misc_feature: MA Experiment 20001555 PARAMETER Experiment Name: At_Drought_Soil_Dry_P Parameter: Post Timepoint (hr) Value: None
  misc_feature: MA Experiment 20001555 PARAMETER Experiment Name: At_Drought_Soil_Dry_P Parameter: Post-Treatment Value: None
  misc_feature: MA Experiment 20001555 PARAMETER Experiment Name: At_Drought_Soil_Dry_P Parameter: Timepoint (day) Value: 10
  misc_feature: MA Experiment 20001555 PARAMETER Experiment Name: At_Drought_Soil_Dry_P Parameter: Treatment Value: Drought vs. No Drought
  misc_feature: MA Experiment ID: 20001556 Result: Down-regulated in Transcription
  misc_feature: MA Experiment 20001556 PARAMETER Experiment Name: At_Drought_Soil_Dry_P Parameter: Age (day) Value: 26
  misc_feature: MA Experiment 20001556 PARAMETER Experiment Name: At_Drought_Soil_Dry_P Parameter: Organism Value: A. thaliana
  misc_feature: MA Experiment 20001556 PARAMETER Experiment Name: At_Drought_Soil_Dry_P Parameter: Plant Line Value: WS
  misc_feature: MA Experiment 20001556 PARAMETER Experiment Name: At_Drought_Soil_Dry_P Parameter: Post Timepoint (hr) Value: None
  misc_feature: MA Experiment 20001556 PARAMETER Experiment Name: At_Drought_Soil_Dry_P Parameter: Post-Treatment Value: None
  misc_feature: MA Experiment 20001556 PARAMETER Experiment Name: At_Drought_Soil_Dry_P Parameter: Timepoint (day) Value: 12
  misc_feature: MA Experiment 20001556 PARAMETER Experiment Name: At_Drought_Soil_Dry_P Parameter: Treatment Value: Drought vs. No Drought
  misc_feature: MA Experiment ID: 20001557 Result: Down-regulated in Transcription
  misc_feature: MA Experiment 20001557 PARAMETER Experiment Name: At_Drought_Soil_Dry_P Parameter: Age (day) Value: 27
  misc_feature: MA Experiment 20001557 PARAMETER Experiment Name: At_Drought_Soil_Dry_P Parameter: Organism Value: A. thaliana
  misc_feature: MA Experiment 20001557 PARAMETER Experiment Name: At_Drought_Soil_Dry_P Parameter: Plant Line Value: WS
  misc_feature: MA Experiment 20001557 PARAMETER Experiment Name: At_Drought_Soil_Dry_P Parameter: Post Timepoint (hr) Value: 3
  misc_feature: MA Experiment 20001557 PARAMETER Experiment Name: At_Drought_Soil_Dry_P Parameter: Post-Treatment Value: Re-Water vs. No Drought
  misc_feature: MA Experiment 20001557 PARAMETER Experiment Name: At_Drought_Soil_Dry_P Parameter: Timepoint (day) Value: 13
  misc_feature: MA Experiment 20001557 PARAMETER Experiment Name: At_Drought_Soil_Dry_P Parameter: Treatment Value: Drought vs. No Drought
  misc_feature: MA Experiment ID: 20001558 Result: Down-regulated in Transcription
  misc_feature: MA Experiment 20001558 PARAMETER Experiment Name: At_Drought_Soil_Dry_P Parameter: Age (day) Value: 27
  misc_feature: MA Experiment 20001558 PARAMETER Experiment Name: At_Drought_Soil_Dry_P Parameter: Organism Value: A. thaliana
  misc_feature: MA Experiment 20001558 PARAMETER Experiment Name: At_Drought_Soil_Dry_P Parameter: Plant Line Value: WS
  misc_feature: MA Experiment 20001558 PARAMETER Experiment Name: At_Drought_Soil_Dry_P Parameter: Post Timepoint (hr) Value: 6
  misc_feature: MA Experiment 20001558 PARAMETER Experiment Name: At_Drought_Soil_Dry_P Parameter: Post-Treatment Value: Re-Water vs. No Drought
  misc_feature: MA Experiment 20001558 PARAMETER Experiment Name: At_Drought_Soil_Dry_P Parameter: Timepoint (day) Value: 13
  misc_feature: MA Experiment 20001558 PARAMETER Experiment Name: At_Drought_Soil_Dry_P Parameter: Treatment Value: Drought vs. No Drought
  misc_feature: MA Experiment ID: 20001559 Result: Down-regulated in Transcription
  misc_feature: MA Experiment 20001559 PARAMETER Experiment Name: At_Drought_Soil_Dry_P Parameter: Age (day) Value: 28
  misc_feature: MA Experiment 20001559 PARAMETER Experiment Name: At_Drought_Soil_Dry_P Parameter: Organism Value: A. thaliana
  misc_feature: MA Experiment 20001559 PARAMETER Experiment Name: At_Drought_Soil_Dry_P Parameter: Plant Line Value: WS
  misc_feature: MA Experiment 20001559 PARAMETER Experiment Name: At_Drought_Soil_Dry_P Parameter: Post Timepoint (hr) Value: 29
  misc_feature: MA Experiment 20001559 PARAMETER Experiment Name: At_Drought_Soil_Dry_P Parameter: Post-Treatment Value: Re-Water vs. No Drought
  misc_feature: MA Experiment 20001559 PARAMETER Experiment Name: At_Drought_Soil_Dry_P Parameter: Timepoint (day) Value: 14
  misc_feature: MA Experiment 20001559 PARAMETER Experiment Name: At_Drought_Soil_Dry_P Parameter: Treatment Value: Drought vs. No Drought
  misc_feature: MA Experiment ID: 20001560 Result: Down-regulated in Transcription
  misc_feature: MA Experiment 20001560 PARAMETER Experiment Name: At_Drought_Soil_Dry_P Parameter: Age (day) Value: 28
  misc_feature: MA Experiment 20001560 PARAMETER Experiment Name: At_Drought_Soil_Dry_P Parameter: Organism Value: A. thaliana
  misc_feature: MA Experiment 20001560 PARAMETER Experiment Name: At_Drought_Soil_Dry_P Parameter: Plant Line Value: WS
  misc_feature: MA Experiment 20001560 PARAMETER Experiment Name: At_Drought_Soil_Dry_P Parameter: Post Timepoint (hr) Value: None
  misc_feature: MA Experiment 20001560 PARAMETER Experiment Name: At_Drought_Soil_Dry_P Parameter: Post-Treatment Value: None
  misc_feature: MA Experiment 20001560 PARAMETER Experiment Name: At_Drought_Soil_Dry_P Parameter: Timepoint (day) Value: 14
  misc_feature: MA Experiment 20001560 PARAMETER Experiment Name: At_Drought_Soil_Dry_P Parameter: Treatment Value: Drought vs. No Drought
  misc_feature: MA Experiment ID: 20001757 Result: Up-regulated in Transcription
  misc_feature: MA Experiment 20001757 PARAMETER Experiment Name: At_50mM_NH4NO3_L-to-H_P Parameter: Timepoint (hr) Value: 6
  misc_feature: MA Experiment 20001757 PARAMETER Experiment Name: At_50mM_NH4NO3_L-to-H_P Parameter: Tissue Value: Leaf
  misc_feature: MA Experiment 20001757 PARAMETER Experiment Name: At_50mM_NH4NO3_L-to-H_P Parameter: Treatment Value: 50mM NH4NO3 vs 100mM Mannitol
  misc_feature: MA Experiment ID: 20001760 Result: Down-regulated in Transcription
  misc_feature: MA Experiment 20001760 PARAMETER Experiment Name: At_50mM_NH4NO3_L-to-H_P Parameter: Timepoint (hr) Value: 2
  misc_feature: MA Experiment 20001760 PARAMETER Experiment Name: At_50mM_NH4NO3_L-to-H_P Parameter: Tissue Value: Siliques
  misc_feature: MA Experiment 20001760 PARAMETER Experiment Name: At_50mM_NH4NO3_L-to-H_P Parameter: Treatment Value: 50mM NH4NO3 vs 100mM Mannitol
  misc_feature: MA Experiment ID: 20001771 Result: Down-regulated in Transcription
  misc_feature: MA Experiment 20001771 PARAMETER Experiment Name: At_Far-red-enriched-adult_P Parameter: Age (day) Value: 28
  misc_feature: MA Experiment 20001771 PARAMETER Experiment Name: At_Far-red-enriched-adult_P Parameter: Light Value: Far-red enriched vs. White
  misc_feature: MA Experiment 20001771 PARAMETER Experiment Name: At_Far-red-enriched-adult_P Parameter: Organism Value: A. thaliana
  misc_feature: MA Experiment 20001771 PARAMETER Experiment Name: At_Far-red-enriched-adult_P Parameter: Plant Line Value: Columbia
  misc_feature: MA Experiment 20001771 PARAMETER Experiment Name: At_Far-red-enriched-adult_P Parameter: Timepoint (hr) Value: 16
  misc_feature: MA Experiment 20001771 PARAMETER Experiment Name: At_Far-red-enriched-adult_P Parameter: Tissue Value: Aerial
  misc_feature: MA Experiment ID: 20001774 Result: Up-regulated in Transcription
  misc_feature: MA Experiment 20001774 PARAMETER Experiment Name: At_Far-red-enriched-adult_P Parameter: Age (day) Value: 31
  misc_feature: MA Experiment 20001774 PARAMETER Experiment Name: At_Far-red-enriched-adult_P Parameter: Light Value: Far-red enriched vs. White
  misc_feature: MA Experiment 20001774 PARAMETER Experiment Name: At_Far-red-enriched-adult_P Parameter: Organism Value: A. thaliana
  misc_feature: MA Experiment 20001774 PARAMETER Experiment Name: At_Far-red-enriched-adult_P Parameter: Plant Line Value: Columbia
  misc_feature: MA Experiment 20001774 PARAMETER Experiment Name: At_Far-red-enriched-adult_P Parameter: Timepoint (hr) Value: 72
  misc_feature: MA Experiment 20001774 PARAMETER Experiment Name: At_Far-red-enriched-adult_P Parameter: Tissue Value: Aerial
  misc_feature: MA Experiment ID: 20001906 Result: Down-regulated in Transcription
  misc_feature: MA Experiment 20001906 PARAMETER Experiment Name: At_Drought_Reproduction_P Parameter: Age (day) Value: 35
  misc_feature: MA Experiment 20001906 PARAMETER Experiment Name: At_Drought_Reproduction_P Parameter: Organism Value: A. thaliana
  misc_feature: MA Experiment 20001906 PARAMETER Experiment Name: At_Drought_Reproduction_P Parameter: Plant Line Value: WS
  misc_feature: MA Experiment 20001906 PARAMETER Experiment Name: At_Drought_Reproduction_P Parameter: Timepoint (day) Value: 5
  misc_feature: MA Experiment 20001906 PARAMETER Experiment Name: At_Drought_Reproduction_P Parameter: Tissue Value: Siliques
  misc_feature: MA Experiment 20001906 PARAMETER Experiment Name: At_Drought_Reproduction_P Parameter: Treatment Value: Drought vs. No Drought
atgactttgaccagtgaccttccgttcaaagaatatcgacggttcttagacacatttttcaccggagtctcaccctcacagatagatgcattagaccaccaagaaaacaaagacttatcgatcatgaagatcagacttagcataaccatcatacttttatcatacacagtggctacggtggccggacaacaatgcggtcgtcaaggcggtggtcgaacttgtcccggtaacatctgctgcagtcagtacggttactgtggtaccaccgcggactactgttctccgaccaacaactgtcagagcaattgttggggaagtgggcctagcggaccaggggagagcgcgtcgaacgtacgcgccacctaccatttctataatccggcgcagaataattgggatttgagagccgtgagtgcttattgctccacgtgggatgctgataagccgtacgcatggcggagcaagtatggctggaccgccttctgcgggccggcaggacctcgtggtcaagcttcttgcggcaagtgtttaagggtgaagaacacaagaacaaatgctgcagtaactgtgagaatagtggaccaatgcagcaacggaggcttggatttggatgtagcaatgttcaatcaaatagacaccgatggttttggctatcaacaaggccatctcattgttgactaccaatttgtcgactgtggcaatgagctcattgggcagcctgattccagaaacatgcttgtttcggccattgatcgcgtttgatattatgtaatgattttgaggtcaatatcgatcggtctacataaaaataataaagaccgctatatatgtattgtcgagggatatatgtttcgtatcaataaggaaattttaaatattattatc

SEQ ID NO: 99043 - protein, 253 aa, Arabidopsis thaliana
  peptide (1)..(253): Ceres Seq. ID no. 13602024
  misc_feature (114)..(232): Pfam Name: Barwin family Pfam Description: Barwin family
  misc_feature (42)..(253): Homolog of NCBI NO: 15229342 NR Description: hevein-related protein precursor (PR-4)
  misc_feature (42)..(211): Homolog of NCBI NO: 24417288 NR Description: unknown [Arabidopsis thaliana]
  misc_feature (63)..(251): Homolog of NCBI NO: 6562381 NR Description: pseudo-hevein [Hevea brasiliensis]
  misc_feature (51)..(252): Homolog of NCBI NO: 139699 NR Description: Wound-induced protein WIN2 precursor
  misc_feature (50)..(252): Homolog of NCBI NO: 7442143 NR Description: wound-induced protein (clone TAB7) - tomato
  misc_feature (47)..(234): Homolog of NCBI NO: 139698 NR Description: Wound-induced protein WIN1 precursor
  misc_feature (50)..(234): Homolog of NCBI NO: 123062 NR Description: Hevein precursor (Major hevein) [Contains: Hevein
  misc_feature (47)..(252): Homolog of NCBI NO: 632736 NR Description: CBP20 [Nicotiana tabacum]
  misc_feature (63)..(234): Homolog of NCBI NO: 2832430 NR Description: prohevein [Hevea brasiliensis]
  misc_feature (47)..(252): Homolog of NCBI NO: 7442144 NR Description: CBP20 preproprotein - common tobacco
MTLTSDLPFKEYRRFLDTFFTGVSPSQIDALDHQENKDLSIMKIRLSITIILLSYTVATVAGQQCGRQGGGRTCPGNICCSQYGYCGTTADYCSPTNNCQSNCWGSGPSGPGESASNVRATYHFYNPAQNNWDLRAVSAYCSTWDADKPYAWRSKYGWTAFCGPAGPRGQASCGKCLRVKNTRTNAAVTVRIVDQCSNGGLDLDVAMFNQIDTDGFGYQQGHLIVDYQFVDCGNELIGQPDSRNMLVSAIDRV

SEQ ID NO: 99044 - protein, 212 aa, Arabidopsis thaliana; identical to SEQ ID NO: 28152
  peptide (1)..(212): Ceres Seq. ID no. 13602025
  misc_feature (73)..(191): Pfam Name: Barwin family Pfam Description: Barwin family
  misc_feature (1)..(212): Homolog of NCBI NO: 15229342 NR Description: hevein-related protein precursor (PR-4)
  misc_feature (1)..(170): Homolog of NCBI NO: 24417288 NR Description: unknown [Arabidopsis thaliana]
  misc_feature (22)..(210): Homolog of NCBI NO: 6562381 NR Description: pseudo-hevein [Hevea brasiliensis]
  misc_feature (10)..(211): Homolog of NCBI NO: 139699 NR Description: Wound-induced protein WIN2 precursor
  misc_feature (9)..(211): Homolog of NCBI NO: 7442143 NR Description: wound-induced protein (clone TAB7) - tomato
  misc_feature (6)..(193): Homolog of NCBI NO: 139698 NR Description: Wound-induced protein WIN1 precursor
  misc_feature (9)..(193): Homolog of NCBI NO: 123062 NR Description: Hevein precursor (Major hevein) [Contains: Hevein
  misc_feature (6)..(211): Homolog of NCBI NO: 632736 NR Description: CBP20 [Nicotiana tabacum]
  misc_feature (22)..(193): Homolog of NCBI NO: 2832430 NR Description: prohevein [Hevea brasiliensis]
  misc_feature (6)..(211): Homolog of NCBI NO: 7442144 NR Description: CBP20 preproprotein - common tobacco

SEQ ID NO: 99045 - DNA, 1105 bp, Arabidopsis thaliana
  misc_feature (1)..(1105): Ceres Seq. ID no. 13602030
  misc_feature: MA Experiment ID: 108462 Result: Up-regulated in Transcription
  misc_feature: MA Experiment 108462 PARAMETER Experiment Name: At_Germinating_Seeds_cDNA_P Parameter: Age (day) Value: 2 vs. 0
  misc_feature: MA Experiment 108462 PARAMETER Experiment Name: At_Germinating_Seeds_cDNA_P Parameter: Tissue Value: Germinating Seeds
  misc_feature: MA Experiment ID: 108463 Result: Up-regulated in Transcription
  misc_feature: MA Experiment 108463 PARAMETER Experiment Name: At_Germinating_Seeds_cDNA_P Parameter: Age (day) Value: 3 vs. 0
  misc_feature: MA Experiment 108463 PARAMETER Experiment Name: At_Germinating_Seeds_cDNA_P Parameter: Tissue Value: Germinating Seeds
  misc_feature: MA Experiment ID: 108464 Result: Up-regulated in Transcription
  misc_feature: MA Experiment 108464 PARAMETER Experiment Name: At_Germinating_Seeds_cDNA_P Parameter: Age (day) Value: 4 vs. 0
  misc_feature: MA Experiment 108464 PARAMETER Experiment Name: At_Germinating_Seeds_cDNA_P Parameter: Tissue Value: Germinating Seeds
  misc_feature: MA Experiment ID: 108573 Result: Up-regulated in Transcription
  misc_feature: MA Experiment 108573 PARAMETER Experiment Name: At_Drought_cDNA_P Parameter: Timepoint (hr) Value: 6
  misc_feature: MA Experiment 108573 PARAMETER Experiment Name: At_Drought_cDNA_P Parameter: Tissue Value: Aerial
  misc_feature: MA Experiment 108573 PARAMETER Experiment Name: At_Drought_cDNA_P Parameter: Treatment Value: Drought vs. No Drought
  misc_feature: MA Experiment ID: 108579 Result: Down-regulated in Transcription
  misc_feature: MA Experiment 108579 PARAMETER Experiment Name: At_4deg_Cold_cDNA_P Parameter: Temperature (deg C) Value: 4 vs. 22
  misc_feature: MA Experiment 108579 PARAMETER Experiment Name: At_4deg_Cold_cDNA_P Parameter: Timepoint (hr) Value: 6
  misc_feature: MA Experiment 108579 PARAMETER Experiment Name: At_4deg_Cold_cDNA_P Parameter: Tissue Value: Aerial
  misc_feature: MA Experiment ID: 108585 Result: Up-regulated in Transcription
  misc_feature: MA Experiment 108585 PARAMETER Experiment Name: At_5mM_NaNP_cDNA_P Parameter: Timepoint (hr) Value: 6
  misc_feature: MA Experiment 108585 PARAMETER Experiment Name: At_5mM_NaNP_cDNA_P Parameter: Tissue Value: Aerial
  misc_feature: MA Experiment 108585 PARAMETER Experiment Name: At_5mM_NaNP_cDNA_P Parameter: Treatment Value: null
  misc_feature: MA Experiment ID: 108594 Result: Down-regulated in Transcription
  misc_feature: MA Experiment 108594 PARAMETER Experiment Name: At_Ler-rhl_Root_cDNA_P Parameter: Plant Line Value: null
  misc_feature: MA Experiment ID: 20000214 Result: Down-regulated in Transcription
  misc_feature: MA Experiment 20000214 PARAMETER Experiment Name: At_4deg_Cold_P Parameter: Timepoint (hr) Value: 6
  misc_feature: MA Experiment ID: 20000224 Result: Down-regulated in Transcription
  misc_feature: MA Experiment ID: 20000496 Result: Up-regulated in Transcription
  misc_feature: MA Experiment 20000496 PARAMETER Experiment Name: At_Guard_Cells_P Parameter: Harvest Date Value: 7/19/2002
  misc_feature: MA Experiment 20000496 PARAMETER Experiment Name: At_Guard_Cells_P Parameter: Organism Value: Canola
  misc_feature: MA Experiment 20000496 PARAMETER Experiment Name: At_Guard_Cells_P Parameter: Tissue Value: Guard Cells vs. Leaves
  misc_feature: MA Experiment ID: 20001248 Result: Up-regulated in Transcription
  misc_feature: MA Experiment 20001248 PARAMETER Experiment Name: At_Far-red-induction_P Parameter: Age (day) Value: 7
  misc_feature: MA Experiment 20001248 PARAMETER Experiment Name: At_Far-red-induction_P Parameter: Light Value: Far-red vs. White
  misc_feature: MA Experiment 20001248 PARAMETER Experiment Name: At_Far-red-induction_P Parameter: Organism Value: A. thaliana
  misc_feature: MA Experiment 20001248 PARAMETER Experiment Name: At_Far-red-induction_P Parameter: Plant Line Value: Columbia
  misc_feature: MA Experiment 20001248 PARAMETER Experiment Name: At_Far-red-induction_P Parameter: Timepoint (hr) Value: 4
  misc_feature: MA Experiment 20001248 PARAMETER Experiment Name: At_Far-red-induction_P Parameter: Tissue Value: Whole Plant
  misc_feature: MA Experiment ID: 20001450 Result: Up-regulated in Transcription
  misc_feature: MA Experiment 20001450 PARAMETER Experiment Name: At_Far-red-induction_P Parameter: Age (day) Value: 7
  misc_feature: MA Experiment 20001450 PARAMETER Experiment Name: At_Far-red-induction_P Parameter: Light Value: Far-red vs. White
  misc_feature: MA Experiment 20001450 PARAMETER Experiment Name: At_Far-red-induction_P Parameter: Organism Value: A. thaliana
  misc_feature: MA Experiment 20001450 PARAMETER Experiment Name: At_Far-red-induction_P Parameter: Plant Line Value: Columbia
  misc_feature: MA Experiment 20001450 PARAMETER Experiment Name: At_Far-red-induction_P Parameter: Timepoint (hr) Value: 8
  misc_feature: MA Experiment 20001450 PARAMETER Experiment Name: At_Far-red-induction_P Parameter: Tissue Value: Whole Plant
  misc_feature: MA Experiment ID: 20001905 Result: Down-regulated in Transcription
  misc_feature: MA Experiment 20001905 PARAMETER Experiment Name: At_Drought_Reproduction_P Parameter: Age (day) Value: 40
  misc_feature: MA Experiment 20001905 PARAMETER Experiment Name: At_Drought_Reproduction_P Parameter: Organism Value: A. thaliana
  misc_feature: MA Experiment 20001905 PARAMETER Experiment Name: At_Drought_Reproduction_P Parameter: Plant Line Value: WS
  misc_feature: MA Experiment 20001905 PARAMETER Experiment Name: At_Drought_Reproduction_P Parameter: Timepoint (day) Value: 10
  misc_feature: MA Experiment 20001905 PARAMETER Experiment Name: At_Drought_Reproduction_P Parameter: Tissue Value: Rosettes
  misc_feature: MA Experiment 20001905 PARAMETER Experiment Name: At_Drought_Reproduction_P Parameter: Treatment Value: Drought vs. No Drought
aaagctctgaaaagatggccggagctgtttctgccgtcgatcaaccgttgaaaatcatcaccggagctgatgactttggagcgagcctcaaggacgcgatggtaacacacctccgctctctcggcatagacgtggaggataccggagtgtcctcttactactctgctggatctgaagtcggtcgccgcgtctccgcttcatcgtcttccgaagttcgcggcttagtctgctgcggcaccggcgtcggagttgcgatgttcgccaacaagttcccgggcgtctacgcagccacttgtctctccgtcgaagacgccgtcaacgctcgatcaataagcaattgcaatgtcctcgcattctccggcatcaaaacatccccggaaaccgccttggaaatcttcgacgcttggatcaaaactcctttcaaatctccttgtcctgcgtccggatccgaaccatggagctcagttatctcttccttcctcgacaattctctctccgagatgtctcagattggaaagtcaaccgccggcgattcaacaaccaagaagatcgatgaaacaaccgcgtcttgcgtaatttgctgcttggcgaagaacagagagttcactccagtggacatcatgccgggaggctcgatgaagatcgttagagagacgccgacgtcggcgattgtaagattcaaagcgggaagtgtggaaccggcgcatcaccacacattcggccatgaccttgtagtcataaagggaaagaaaagtgtgtggaatctgagcaagaaggagagagctgatctcgttgacggcgattacctattcactcccgccggtgatgttcaccgagtcaaatatcacgaagacactgagttcttcatcacttgggatggccattgggacatattccttgacgaagacctcgaaactgcaaagaaagccatcgaagaagaagcttgaaggtgtaaactttgtgtagtactctcttcttttgaatgttgtaagttctgagagtaaactttcttaaattgatgtactttgtaagaatctttgatttcaaaagatggtgtaatattacaaatactttctcttatgaacactatataaagggtttctac

SEQ ID NO: 99046 - protein, 314 aa, Arabidopsis thaliana; identical to SEQ ID NO: 40986
  peptide (1)..(314): Ceres Seq. ID no. 13602031
  misc_feature (73)..(150): Pfam Name: Ribose/Galactose Isomerase Pfam Description: Ribose/Galactose Isomerase
  misc_feature (5)..(314): Homolog of NCBI NO: 18397039 NR Description: DNA-damage-repair/toleration protein DRT102 thaliana] >gi|15529165|gb|AAK97677.1| AT3g04880/T9J14_17 thaliana] >gi|23505883|gb|AAN28801.1| At3g04880/T9J14_17
  misc_feature (85)..(314): Homolog of NCBI NO: 1169199 NR Description: DNA-damage-repair/toleration protein DRT102
  misc_feature (8)..(313): Homolog of NCBI NO: 34913680 NR Description: putative DNA-damage-repair/toleration protein
  misc_feature (16)..(140): Homolog of NCBI NO: 23111538 NR Description: hypothetical protein [Desulfitobacterium
  misc_feature (16)..(141): Homolog of NCBI NO: 18311180 NR Description: ribose 5-phosphate isomerase [Clostridium
  misc_feature (16)..(149): Homolog of NCBI NO: 36958662 NR Description: Ribose 5-phosphate isomerase [Rhizobium sp.
  misc_feature (12)..(141): Homolog of NCBI NO: 23021362 NR Description: hypothetical protein [Clostridium thermocellum
  misc_feature (16)..(149): Homolog of NCBI NO: 15965978 NR Description: PUTATIVE RIBOSE 5-PHOSPHATE ISOMERASE B PROTEIN
  misc_feature (16)..(141): Homolog of NCBI NO: 15896134 NR Description: Ribose 5-phosphate isomerase, RpiB [Clostridium
  misc_feature (16)..(140): Homolog of NCBI NO: 16804699 NR Description: similar to ribose 5-phosphate epimerase [Listeria

SEQ ID NO: 99047 - protein, 310 aa, Arabidopsis thaliana; identical to SEQ ID NO: 40987
  peptide (1)..(310): Ceres Seq. ID no. 13602032
  misc_feature (69)..(146): Pfam Name: Ribose/Galactose Isomerase Pfam Description: Ribose/Galactose Isomerase
  misc_feature (1)..(310): Homolog of NCBI NO: 18397039 NR Description: DNA-damage-repair/toleration protein DRT102 thaliana] >gi|15529165|gb|AAK97677.1| AT3g04880/T9J14_17 thaliana] >gi|23505883|gb|AAN28801.1| At3g04880/T9J14_17
  misc_feature (81)..(310): Homolog of NCBI NO: 1169199 NR Description: DNA-damage-repair/toleration protein DRT102
  misc_feature (4)..(309): Homolog of NCBI NO: 34913680 NR Description: putative DNA-damage-repair/toleration protein
  misc_feature (12)..(136): Homolog of NCBI NO: 23111538 NR Description: hypothetical protein [Desulfitobacterium
  misc_feature (12)..(137): Homolog of NCBI NO: 18311180 NR Description: ribose 5-phosphate isomerase [Clostridium
  misc_feature (12)..(145): Homolog of NCBI NO: 36958662 NR Description: Ribose 5-phosphate isomerase [Rhizobium sp.
  misc_feature (8)..(137): Homolog of NCBI NO: 23021362 NR Description: hypothetical protein [Clostridium thermocellum
  misc_feature (12)..(145): Homolog of NCBI NO: 15965978 NR Description: PUTATIVE RIBOSE 5-PHOSPHATE ISOMERASE B PROTEIN
  misc_feature (12)..(137): Homolog of NCBI NO: 15896134 NR Description: Ribose 5-phosphate isomerase, RpiB [Clostridium
  misc_feature (12)..(136): Homolog of NCBI NO: 16804699 NR Description: similar to ribose 5-phosphate epimerase [Listeria

SEQ ID NO: 99048 - protein, 282 aa, Arabidopsis thaliana; identical to SEQ ID NO: 40988
  peptide (1)..(282): Ceres Seq. ID no. 13602033
  misc_feature (41)..(118): Pfam Name: Ribose/Galactose Isomerase Pfam Description: Ribose/Galactose Isomerase
  misc_feature (1)..(282): Homolog of NCBI NO: 18397039 NR Description: DNA-damage-repair/toleration protein DRT102 thaliana] >gi|15529165|gb|AAK97677.1| AT3g04880/T9J14_17 thaliana] >gi|23505883|gb|AAN28801.1| At3g04880/T9J14_17
  misc_feature (53)..(282): Homolog of NCBI NO: 1169199 NR Description: DNA-damage-repair/toleration protein DRT102
  misc_feature (1)..(281): Homolog of NCBI NO: 34913680 NR Description: putative DNA-damage-repair/toleration protein
  misc_feature (1)..(108): Homolog of NCBI NO: 23111538 NR Description: hypothetical protein [Desulfitobacterium
  misc_feature (1)..(109): Homolog of NCBI NO: 18311180 NR Description: ribose 5-phosphate isomerase [Clostridium
  misc_feature (1)..(117): Homolog of NCBI NO: 36958662 NR Description: Ribose 5-phosphate isomerase [Rhizobium sp.
  misc_feature (1)..(109): Homolog of NCBI NO: 23021362 NR Description: hypothetical protein [Clostridium thermocellum
  misc_feature (1)..(117): Homolog of NCBI NO: 15965978 NR Description: PUTATIVE RIBOSE 5-PHOSPHATE ISOMERASE B PROTEIN
  misc_feature (1)..(109): Homolog of NCBI NO: 15896134 NR Description: Ribose 5-phosphate isomerase, RpiB [Clostridium
  misc_feature (1)..(108): Homolog of NCBI NO: 16804699 NR Description: similar to ribose 5-phosphate epimerase [Listeria

SEQ ID NO: 99049 - DNA, 1220 bp, Arabidopsis thaliana
  misc_feature (1)..(1220): Ceres Seq. ID no. 13602061
  misc_feature: MA Experiment ID: 108435 Result: Up-regulated in Transcription
  misc_feature: MA Experiment 108435 PARAMETER Experiment Name: At_stm_Mutants_cDNA_P Parameter: Plant Line Value: wt Landsburg vs stm
  misc_feature: MA Experiment 108435 PARAMETER Experiment Name: At_stm_Mutants_cDNA_P Parameter: Tissue Value: Shoot Apical Meristem Region
  misc_feature: MA Experiment ID: 108489 Result: Up-regulated in Transcription
  misc_feature: MA Experiment ID: 108501 Result: Down-regulated in Transcription
  misc_feature: MA Experiment 108501 PARAMETER Experiment Name: At_ap2_floral_buds_cDNA_P Parameter: Plant Line Value: ap2 (Ler.)
  misc_feature: MA Experiment 108501 PARAMETER Experiment Name: At_ap2_floral_buds_cDNA_P Parameter: Tissue Value: Closed Flower
  misc_feature: MA Experiment ID: 108577 Result: Down-regulated in Transcription
  misc_feature: MA Experiment 108577 PARAMETER Experiment Name: At_42deg_Heat_cDNA_P Parameter: Temperature (deg C) Value: 42 vs. 22
  misc_feature: MA Experiment 108577 PARAMETER Experiment Name: At_42deg_Heat_cDNA_P Parameter: Timepoint (hr) Value: 6
  misc_feature: MA Experiment 108577 PARAMETER Experiment Name: At_42deg_Heat_cDNA_P Parameter: Tissue Value: Aerial
  misc_feature: MA Experiment ID: 108585 Result: Up-regulated in Transcription
  misc_feature: MA Experiment 108585 PARAMETER Experiment Name: At_5mM_NaNP_cDNA_P Parameter: Timepoint (hr) Value: 6
  misc_feature: MA Experiment 108585 PARAMETER Experiment Name: At_5mM_NaNP_cDNA_P Parameter: Tissue Value: Aerial
  misc_feature: MA Experiment 108585 PARAMETER Experiment Name: At_5mM_NaNP_cDNA_P Parameter: Treatment Value: null
  misc_feature: MA Experiment ID: 20000111 Result: Down-regulated in Transcription
  misc_feature: MA Experiment 20000111 PARAMETER Experiment Name: At_42deg_Heat_cDNA_P Parameter: Temperature (deg C) Value: 42 vs. 22
  misc_feature: MA Experiment 20000111 PARAMETER Experiment Name: At_42deg_Heat_cDNA_P Parameter: Timepoint (hr) Value: 6
  misc_feature: MA Experiment 20000111 PARAMETER Experiment Name: At_42deg_Heat_cDNA_P Parameter: Tissue Value: Aerial
  misc_feature: MA Experiment ID: 20000112 Result: Down-regulated in Transcription
  misc_feature: MA Experiment 20000112 PARAMETER Experiment Name: At_42deg_Heat_cDNA_P Parameter: Temperature (deg C) Value: 42 vs. 22
  misc_feature: MA Experiment 20000112 PARAMETER Experiment Name: At_42deg_Heat_cDNA_P Parameter: Timepoint (hr) Value: 2
  misc_feature: MA Experiment 20000112 PARAMETER Experiment Name: At_42deg_Heat_cDNA_P Parameter: Tissue Value: Aerial
  misc_feature: MA Experiment ID: 20000113 Result: Down-regulated in Transcription
  misc_feature: MA Experiment 20000113 PARAMETER Experiment Name: At_42deg_Heat_cDNA_P Parameter: Temperature (deg C) Value: 42 vs. 22
  misc_feature: MA Experiment 20000113 PARAMETER Experiment Name: At_42deg_Heat_cDNA_P Parameter: Timepoint (hr) Value: 8
  misc_feature: MA Experiment 20000113 PARAMETER Experiment Name: At_42deg_Heat_cDNA_P Parameter: Tissue Value: Aerial
  misc_feature: MA Experiment ID: 20000144 Result: Down-regulated in Transcription
  misc_feature: MA Experiment 20000144 PARAMETER Experiment Name: At_42deg_Heat_cDNA_P Parameter: Temperature (deg C) Value: 42 vs. 22
  misc_feature: MA Experiment 20000144 PARAMETER Experiment Name: At_42deg_Heat_cDNA_P Parameter: Timepoint (hr) Value: 1
  misc_feature: MA Experiment 20000144 PARAMETER Experiment Name: At_42deg_Heat_cDNA_P Parameter: Tissue Value: Aerial
  misc_feature: MA Experiment ID: 20000224 Result: Up-regulated in Transcription
  misc_feature: MA Experiment ID: 20000437 Result: Down-regulated in Transcription
  misc_feature: MA Experiment 20000437 PARAMETER Experiment Name: At_Drought_P Parameter: Age (day) Value: 8
  misc_feature: MA Experiment 20000437 PARAMETER Experiment Name: At_Drought_P Parameter: Organism Value: A. thaliana
  misc_feature: MA Experiment 20000437 PARAMETER Experiment Name: At_Drought_P Parameter: Plant Line Value: WS
  misc_feature: MA Experiment 20000437 PARAMETER Experiment Name: At_Drought_P Parameter: Timepoint (hr) Value: 24
  misc_feature: MA Experiment 20000437 PARAMETER Experiment Name: At_Drought_P Parameter: Tissue Value: Whole Plant
  misc_feature: MA Experiment 20000437 PARAMETER Experiment Name: At_Drought_P Parameter: Treatment Value: Drought vs. No Drought
  misc_feature: MA Experiment ID: 20000438 Result: Up-regulated in Transcription
  misc_feature: MA Experiment 20000438 PARAMETER Experiment Name: At_Shoots__P Parameter: Age (day) Value: 14
  misc_feature: MA Experiment 20000438 PARAMETER Experiment Name: At_Shoots__P Parameter: Tissue Value: Shoots vs. Whole Plant
  misc_feature: MA Experiment ID: 20001248 Result: Down-regulated in Transcription
  misc_feature: MA Experiment 20001248 PARAMETER Experiment Name: At_Far-red-induction_P Parameter: Age (day) Value: 7
  misc_feature: MA Experiment 20001248 PARAMETER Experiment Name: At_Far-red-induction_P Parameter: Light Value: Far-red vs. White
  misc_feature: MA Experiment 20001248 PARAMETER Experiment Name: At_Far-red-induction_P Parameter: Organism Value: A. thaliana
  misc_feature: MA Experiment 20001248 PARAMETER Experiment Name: At_Far-red-induction_P Parameter: Plant Line Value: Columbia
  misc_feature: MA Experiment 20001248 PARAMETER Experiment Name: At_Far-red-induction_P Parameter: Timepoint (hr) Value: 4
  misc_feature: MA Experiment 20001248 PARAMETER Experiment Name: At_Far-red-induction_P Parameter: Tissue Value: Whole Plant
  misc_feature: MA Experiment ID: 20001450 Result: Down-regulated in Transcription
  misc_feature: MA Experiment 20001450 PARAMETER Experiment Name: At_Far-red-induction_P Parameter: Age (day) Value: 7
  misc_feature: MA Experiment 20001450 PARAMETER Experiment Name: At_Far-red-induction_P Parameter: Light Value: Far-red vs. White
  misc_feature: MA Experiment 20001450 PARAMETER Experiment Name: At_Far-red-induction_P Parameter: Organism Value: A. thaliana
  misc_feature: MA Experiment 20001450 PARAMETER Experiment Name: At_Far-red-induction_P Parameter: Plant Line Value: Columbia
  misc_feature: MA Experiment 20001450 PARAMETER Experiment Name: At_Far-red-induction_P Parameter: Timepoint (hr) Value: 8
  misc_feature: MA Experiment 20001450 PARAMETER Experiment Name: At_Far-red-induction_P Parameter: Tissue Value: Whole Plant
  misc_feature: MA Experiment ID: 20001451 Result: Down-regulated in Transcription
  misc_feature: MA Experiment 20001451 PARAMETER Experiment Name: At_Far-red-induction_P Parameter: Age (day) Value: 7
  misc_feature: MA Experiment 20001451 PARAMETER Experiment Name: At_Far-red-induction_P Parameter: Light Value: Far-red vs. White
  misc_feature: MA Experiment 20001451 PARAMETER Experiment Name: At_Far-red-induction_P Parameter: Organism Value: A. thaliana
  misc_feature: MA Experiment 20001451 PARAMETER Experiment Name: At_Far-red-induction_P Parameter: Plant Line Value: Columbia
  misc_feature: MA Experiment 20001451 PARAMETER Experiment Name: At_Far-red-induction_P Parameter: Timepoint (hr) Value: 24
  misc_feature: MA Experiment 20001451 PARAMETER Experiment Name: At_Far-red-induction_P Parameter: Tissue Value: Whole Plant
  misc_feature: MA Experiment ID: 20001757 Result: Up-regulated in Transcription
  misc_feature: MA Experiment 20001757 PARAMETER Experiment Name: At_50mM_NH4NO3_L-to-H_P Parameter: Timepoint (hr) Value: 6
  misc_feature: MA Experiment 20001757 PARAMETER Experiment Name: At_50mM_NH4NO3_L-to-H_P Parameter: Tissue Value: Leaf
  misc_feature: MA Experiment 20001757 PARAMETER Experiment Name: At_50mM_NH4NO3_L-to-H_P Parameter: Treatment Value: 50mM NH4NO3 vs 100mM Mannitol
aacgactcataactcatagctatatcttgtcttaaaaagaagaagcaaagagaattagtggagtacgataagcagagaagtatgttaaaggtggtgttgttgatgatgataatgatgttggcgtcacagtccgaggctcagctgaaccgtgacttttacaaggaaagctgtccatcattgttccttgtcgtgagacgagtcgtgaaacgggccgtggccagagagcctcgcatgggtgcttctctccttcgtttgttcttccatgattgttttgtcaatgggtgtgacggatccttactgttggatgacacaccgtcttttttgggagagaaaacctcaggacccagcaataactctgtgagggggttcgaagtgatcgacaaaatcaagtttaaggttgagaaaatgtgcccgggcatcgtctcatgcgcagacattctagccatcactgctcgggactccgttctcctcctaggtggaccggggtggagcgtgaaacttggaagaagagactctacgacggcgaacttcgcggccgcgaactccggagtcatccctcctccgatcactacccttagcaacctcataaaccgtttcaaagcacaaggtttgtccacacgtgacatggtcgccctctctggtgctcacaccattggacgagcccaatgtgttacattcagaaaccgaatctacaacgcaagcaatatcgacacctctttcgccatctctaaacggaggaactgtcctgccaccagtggctccggagacaacaagaaagccaatcttgacgtccgctctcccgataggttcgaccacggcttctacaagcaacttctgagcaaaaaaggtttgcttacgtcagaccaagtcctctttaataatggtcctaccgactcgctcgtcatagcttacagccacaatctcaatgccttctaccgcgactttgcaagggcaatgattaagatgggagacatcagccccctcaccggatccaatggtcagatccgccaaaactgtcggaggcccaactgaatgattctcttttatattatcccaagcccattgagctcaataatcacctcttcgtcaactgttttttcatgtgcattccccttcttcgtcaactgttaaaatacatcttcattatataaaaaacaataaacacgtaaaagtttgtgactatgcagttttccattataaattactgtctatattctctt

SEQ ID NO: 99050 - protein, 316 aa, Arabidopsis thaliana
  peptide (1)..(316): Ceres Seq. ID no. 13602062
  misc_feature (37)..(280): Pfam Name: Peroxidase Pfam Description: Peroxidase
  misc_feature (1)..(316): Homolog of NCBI NO: 15237187 NR Description: peroxidase, putative [Arabidopsis thaliana] Peroxidase 67 precursor (Atperox P67) (ATP44)
  misc_feature (1)..(316): Homolog of NCBI NO: 21537247 NR Description: peroxidase [Arabidopsis thaliana]
  misc_feature (1)..(316): Homolog of NCBI NO: 15237190 NR Description: peroxidase, putative [Arabidopsis thaliana] Peroxidase 68 precursor (Atperox P68) >gi|8777341|dbj|BAA96931.1| [Arabidopsis thaliana] >gi|26451590|dbj|BAC42892.1| putative
  misc_feature (1)..(316): Homolog of NCBI NO: 39777536 NR Description: peroxidase precursor [Quercus suber]
  misc_feature (1)..(316): Homolog of NCBI NO: 39777532 NR Description: peroxidase precursor [Quercus suber]
  misc_feature (11)..(316): Homolog of NCBI NO: 19698446 NR Description: gaiacol peroxidase [Gossypium hirsutum]
  misc_feature (4)..(316): Homolog of NCBI NO: 5381253 NR Description: peroxidase [Nicotiana tabacum]
  misc_feature (4)..(316): Homolog of NCBI NO: 32351452 NR Description: class III peroxidase [Gossypium hirsutum]
  misc_feature (17)..(316): Homolog of NCBI NO: 28400796 NR Description: peroxidase [Asparagus officinalis]
  misc_feature (17)..(316): Homolog of NCBI NO: 28400798 NR Description: peroxidase [Asparagus officinalis]
MLKVVLLMMIMMLASQSEAQLNRDFYKESCPSLFLVVRRVVKRAVAREPRMGASLLRLFFHDCFVNGCDGSLLLDDTPSFLGEKTSGPSNNSVRGFEVIDKIKFKVEKMCPGIVSCADILAITARDSVLLLGGPGWSVKLGRRDSTTANFAAANSGVIPPPITTLSNLINRFKAQGLSTRDMVALSGAHTIGRAQCVTFRNRIYNASNIDTSFAISKRRNCPATSGSGDNKKANLDVRSPDRFDHGFYKQLLSKKGLLTSDQVLFNNGPTDSLVIAYSHNLNAFYRDFARAMIKMGDISPLTGSNGQIRQNCRRPN

SEQ ID NO: 99051 - protein, 309 aa, Arabidopsis thaliana
  peptide (1)..(309): Ceres Seq. ID no. 13602063
  misc_feature (30)..(273): Pfam Name: Peroxidase Pfam Description: Peroxidase
  misc_feature (1)..(309): Homolog of NCBI NO: 15237187 NR Description: peroxidase, putative [Arabidopsis thaliana] Peroxidase 67 precursor (Atperox P67) (ATP44)
  misc_feature (1)..(309): Homolog of NCBI NO: 21537247 NR Description: peroxidase [Arabidopsis thaliana]
  misc_feature (1)..(309): Homolog of NCBI NO: 15237190 NR Description: peroxidase, putative [Arabidopsis thaliana] Peroxidase 68 precursor (Atperox P68) >gi|8777341|dbj|BAA96931.1| [Arabidopsis thaliana] >gi|26451590|dbj|BAC42892.1| putative
  misc_feature (1)..(309): Homolog of NCBI NO: 39777536 NR Description: peroxidase precursor [Quercus suber]
  misc_feature (1)..(309): Homolog of NCBI NO: 39777532 NR Description: peroxidase precursor [Quercus suber]
  misc_feature (4)..(309): Homolog of NCBI NO: 19698446 NR Description: gaiacol peroxidase [Gossypium hirsutum]
  misc_feature (1)..(309): Homolog of NCBI NO: 5381253 NR Description: peroxidase [Nicotiana tabacum]
  misc_feature (1)..(309): Homolog of NCBI NO: 32351452 NR Description: class III peroxidase [Gossypium hirsutum]
  misc_feature (10)..(309): Homolog of NCBI NO: 28400796 NR Description: peroxidase [Asparagus officinalis]
  misc_feature (10)..(309): Homolog of NCBI NO: 28400798 NR Description: peroxidase [Asparagus officinalis]
MMIMMLASQSEAQLNRDFYKESCPSLFLVVRRVVKRAVAREPRMGASLLRLFFHDCFVNGCDGSLLLDDTPSFLGEKTSGPSNNSVRGFEVIDKIKFKVEKMCPGIVSCADILAITARDSVLLLGGPGWSVKLGRRDSTTANFAAANSGVIPPPITTLSNLINRFKAQGLSTRDMVALSGAHTIGRAQCVTFRNRIYNASNIDTSFAISKRRNCPATSGSGDNKKANLDVRSPDRFDHGFYKQLLSKKGLLTSDQVLFNNGPTDSLVIAYSHNLNAFYRDFARAMIKMGDISPLTGSNGQIRQNCRRPN

SEQ ID NO: 99052 - protein, 308 aa, Arabidopsis thaliana
  peptide (1)..(308): Ceres Seq. ID no. 13602064
  misc_feature (29)..(272): Pfam Name: Peroxidase Pfam Description: Peroxidase
  misc_feature (1)..(308): Homolog of NCBI NO: 15237187 NR Description: peroxidase, putative [Arabidopsis thaliana] Peroxidase 67 precursor (Atperox P67) (ATP44)
  misc_feature (1)..(308): Homolog of NCBI NO: 21537247 NR Description: peroxidase [Arabidopsis thaliana]
  misc_feature (1)..(308): Homolog of NCBI NO: 15237190 NR Description: peroxidase, putative [Arabidopsis thaliana] Peroxidase 68 precursor (Atperox P68) >gi|8777341|dbj|BAA96931.1| [Arabidopsis thaliana] >gi|26451590|dbj|BAC42892.1| putative
  misc_feature (1)..(308): Homolog of NCBI NO: 39777536 NR Description: peroxidase precursor [Quercus suber]
  misc_feature (1)..(308): Homolog of NCBI NO: 39777532 NR Description: peroxidase precursor [Quercus suber]
  misc_feature (3)..(308): Homolog of NCBI NO: 19698446 NR Description: gaiacol peroxidase [Gossypium hirsutum]
  misc_feature (1)..(308): Homolog of NCBI NO: 5381253 NR Description: peroxidase [Nicotiana tabacum]
  misc_feature (1)..(308): Homolog of NCBI NO: 32351452 NR Description: class III peroxidase [Gossypium hirsutum]
  misc_feature (9)..(308): Homolog of NCBI NO: 28400796 NR Description: peroxidase [Asparagus officinalis]
  misc_feature (9)..(308): Homolog of NCBI NO: 28400798 NR Description: peroxidase [Asparagus officinalis]
MIMMLASQSEAQLNRDFYKESCPSLFLVVRRVVKRAVAREPRMGASLLRLFFHDCFVNGCDGSLLLDDTPSFLGEKTSGPSNNSVRGFEVIDKIKFKVEKMCPGIVSCADILAITARDSVLLLGGPGWSVKLGRRDSTTANFAAANSGVIPPPITTLSNLINRFKAQGLSTRDMVALSGAHTIGRAQCVTFRNRIYNASNIDTSFAISKRRNCPATSGSGDNKKANLDVRSPDRFDHGFYKQLLSKKGLLTSDQVLFNNGPTDSLVIAYSHNLNAFYRDFARAMIKMGDISPLTGSNGQIRQNCRRPN

SEQ ID NO: 99053 - DNA, 956 bp, Arabidopsis thaliana
  misc_feature (1)..(956): Ceres Seq. ID no. 13602069
  misc_feature: MA Experiment ID: 108433 Result: Up-regulated in Transcription
  misc_feature: MA Experiment 108433 PARAMETER Experiment Name: At_rhl_Mutant2_cDNA_P Parameter: Age (day) Value: 7
  misc_feature: MA Experiment 108433 PARAMETER Experiment Name: At_rhl_Mutant2_cDNA_P Parameter: Organism Value: A. thaliana
  misc_feature: MA Experiment 108433 PARAMETER Experiment Name: At_rhl_Mutant2_cDNA_P Parameter: Plant Line Value: rhl Mutant vs. wt landsburg
  misc_feature: MA Experiment 108433 PARAMETER Experiment Name: At_rhl_Mutant2_cDNA_P Parameter: Tissue Value: Roots
  misc_feature: MA Experiment ID: 20000184 Result: Down-regulated in Transcription
  misc_feature: MA Experiment 20000184 PARAMETER Experiment Name: At_Shoots__P Parameter: Age (day) Value: 7
  misc_feature: MA Experiment 20000184 PARAMETER Experiment Name: At_Shoots__P Parameter: Tissue Value: Shoots vs. Whole Plant
  misc_feature: MA Experiment ID: 20000227 Result: Down-regulated in Transcription
  misc_feature: MA Experiment 20000227 PARAMETER Experiment Name: At_Root-Tips-vs-Tops_P Parameter: Tissue Value: Root Tips vs. Root Tops
  misc_feature: MA Experiment ID: 20000264 Result: Up-regulated in Transcription
  misc_feature: MA Experiment 20000264 PARAMETER Experiment Name: At_Open_Flower_P Parameter: Age (day) Value: 21
  misc_feature: MA Experiment 20000264 PARAMETER Experiment Name: At_Open_Flower_P Parameter: Plant Line Value: WS
  misc_feature: MA Experiment 20000264 PARAMETER Experiment Name: At_Open_Flower_P Parameter: Tissue Value: Open Flower vs. Whole Plant
  misc_feature: MA Experiment ID: 20000286 Result: Up-regulated in Transcription
  misc_feature: MA Experiment 20000286 PARAMETER Experiment Name: At_Open_Flower_P Parameter: Age (day) Value: 21
  misc_feature: MA Experiment 20000286 PARAMETER Experiment Name: At_Open_Flower_P Parameter: Plant Line Value: WS
  misc_feature: MA Experiment 20000286 PARAMETER Experiment Name: At_Open_Flower_P Parameter: Tissue Value: Half Open vs. Whole Plant
  misc_feature: MA Experiment ID: 20000573 Result: Up-regulated in Transcription
  misc_feature: MA Experiment 20000573 PARAMETER Experiment Name: At_100uM_ABA_Mutants__P Parameter: Organism Value: A. thaliana
  misc_feature: MA Experiment 20000573 PARAMETER Experiment Name: At_100uM_ABA_Mutants__P Parameter: Plant Line Value: CS22 vs. Ler wt
  misc_feature: MA Experiment 20000573 PARAMETER Experiment Name: At_100uM_ABA_Mutants__P Parameter: Timepoint (hr) Value: N/A
  misc_feature: MA Experiment 20000573 PARAMETER Experiment Name: At_100uM_ABA_Mutants__P Parameter: Tissue Value: Whole Plant
  misc_feature: MA Experiment 20000573 PARAMETER Experiment Name: At_100uM_ABA_Mutants__P Parameter: Treatment Value: None
  misc_feature: MA Experiment ID: 20000794 Result: Up-regulated in Transcription
  misc_feature: MA Experiment 20000794 PARAMETER Experiment Name: At_Petals_P Parameter: Age (day) Value: 23-25 days
  misc_feature: MA Experiment 20000794 PARAMETER Experiment Name: At_Petals_P Parameter: Plant Line Value: WS
  misc_feature: MA Experiment 20000794 PARAMETER Experiment Name: At_Petals_P Parameter: Tissue Value: Petals vs. Whole plant
  misc_feature: MA Experiment ID: 20001248 Result: Up-regulated in Transcription
  misc_feature: MA Experiment 20001248 PARAMETER Experiment Name: At_Far-red-induction_P Parameter: Age (day) Value: 7
  misc_feature: MA Experiment 20001248 PARAMETER Experiment Name: At_Far-red-induction_P Parameter: Light Value: Far-red vs. White
  misc_feature: MA Experiment 20001248 PARAMETER Experiment Name: At_Far-red-induction_P Parameter: Organism Value: A. thaliana
  misc_feature: MA Experiment 20001248 PARAMETER Experiment Name: At_Far-red-induction_P Parameter: Plant Line Value: Columbia
  misc_feature: MA Experiment 20001248 PARAMETER Experiment Name: At_Far-red-induction_P Parameter: Timepoint (hr) Value: 4
  misc_feature: MA Experiment 20001248 PARAMETER Experiment Name: At_Far-red-induction_P Parameter: Tissue Value: Whole Plant
  misc_feature: MA Experiment ID: 20001450 Result: Up-regulated in Transcription
  misc_feature: MA Experiment 20001450 PARAMETER Experiment Name: At_Far-red-induction_P Parameter: Age (day) Value: 7
  misc_feature: MA Experiment 20001450 PARAMETER Experiment Name: At_Far-red-induction_P Parameter: Light Value: Far-red vs. White
  misc_feature: MA Experiment 20001450 PARAMETER Experiment Name: At_Far-red-induction_P Parameter: Organism Value: A. thaliana
  misc_feature: MA Experiment 20001450 PARAMETER Experiment Name: At_Far-red-induction_P Parameter: Plant Line Value: Columbia
  misc_feature: MA Experiment 20001450 PARAMETER Experiment Name: At_Far-red-induction_P Parameter: Timepoint (hr) Value: 8
  misc_feature: MA Experiment 20001450 PARAMETER Experiment Name: At_Far-red-induction_P Parameter: Tissue Value: Whole Plant
atgattggtggtttcttcgccgatgtaaaattcaacagatcgagagagaaaaaactctctctccctcctccgttcaccgtcgcgactcggctctacagtacattttgttgagcaatctcgtatttagaggattccaatgtctggcgcagaggataataaatcttcccatgctcagctttcgtcccaaatttttcttgatcttgtggattcggtgatagctgatgtagcatctgagtgtcatcgggtagcacgactaggacttgatcgtgatttggatatagtagaagaagagttgagattgtcagtggaagcgcgtgcgaagatcgctgatcctagcaacaacctcgaaaccaacaccaaatatgttgttgatatatttgggcagactcaccctcctgtagctagtgaagtgttcaattgcatgaactgtgggcgacaaattgttgcaggaaggtttgctcctcatctcgaaaaatgcatgggaaagggaagaaaggctcgtgccaagacaaccagaagcacaacggctgcacagaaccggaatgcacgacgcagccccaatccacgatattctccttatccaaattctgctagtgagaaccagttagcaagtggatcacctggtgttgcaggtgaagactgctcaaatttcacagttcgagagaacgtgaaaggagactgaagtacaactgatgagaggcttatactgattactgaacgacaatgtggctagtaactgactcgaccagactggtataaatcgaattgctaggtttatattcagttcacaaaaaaagagagaaaagcggcgcaaaaggaaaagtagcggaggttcataatgtagctatttctacagcttactaatggggtatcaatatattagtacatgcaccatcatgttataattacaaaaaactctgtagagtcctcaatcaaacagttcccactgttgtgtt

SEQ ID NO: 99054 - protein, 181 aa, Arabidopsis thaliana; identical to SEQ ID NO: 38473
  peptide (1)..(181): Ceres Seq. ID no. 13602070
  misc_feature (14)..(181): Homolog of NCBI NO: 8843778 NR Description: emb|CAB85555.1~gene_id:MZN1.2~similar to unknown
  misc_feature (1)..(181): Homolog of NCBI NO: 22327952 NR Description: expressed protein [Arabidopsis thaliana] AT5g58570/mzn1_20 [Arabidopsis thaliana]
  misc_feature (1)..(140): Homolog of NCBI NO: 26984622 NR Description: SI:dZ180G5.4 (novel protein) [Danio rerio]

SEQ ID NO: 99055 - DNA, 1019 bp, Arabidopsis thaliana
  misc_feature (1)..(1019): Ceres Seq. ID no. 13602082
  misc_feature: MA Experiment ID: 20000093 Result: Up-regulated in Transcription
  misc_feature: MA Experiment 20000093 PARAMETER Experiment Name: At_42deg_Heat_cDNA_P Parameter: Temperature (deg C) Value: 42 vs. 22
  misc_feature: MA Experiment 20000093 PARAMETER Experiment Name: At_42deg_Heat_cDNA_P Parameter: Timepoint (hr) Value: 0.5
  misc_feature: MA Experiment 20000093 PARAMETER Experiment Name: At_42deg_Heat_cDNA_P Parameter: Tissue Value: Aerial
  misc_feature: MA Experiment ID: 20000111 Result: Up-regulated in Transcription
  misc_feature: MA Experiment 20000111 PARAMETER Experiment Name: At_42deg_Heat_cDNA_P Parameter: Temperature (deg C) Value: 42 vs. 22
  misc_feature: MA Experiment 20000111 PARAMETER Experiment Name: At_42deg_Heat_cDNA_P Parameter: Timepoint (hr) Value: 6
  misc_feature: MA Experiment 20000111 PARAMETER Experiment Name: At_42deg_Heat_cDNA_P Parameter: Tissue Value: Aerial
  misc_feature: MA Experiment ID: 20000171 Result: Up-regulated in Transcription
  misc_feature: MA Experiment 20000171 PARAMETER Experiment Name: At_42deg_Heat_P Parameter: Age (day) Value: 14
  misc_feature: MA Experiment 20000171 PARAMETER Experiment Name: At_42deg_Heat_P Parameter: Organism Value: A. thaliana
  misc_feature: MA Experiment 20000171 PARAMETER Experiment Name: At_42deg_Heat_P Parameter: Plant Line Value: WS
  misc_feature: MA Experiment 20000171 PARAMETER Experiment Name: At_42deg_Heat_P Parameter: Temperature (deg C) Value: 42 vs. 22
  misc_feature: MA Experiment 20000171 PARAMETER Experiment Name: At_42deg_Heat_P Parameter: Timepoint (hr) Value: 1
  misc_feature: MA Experiment 20000171 PARAMETER Experiment Name: At_42deg_Heat_P Parameter: Tissue Value: Aerial
  misc_feature: MA Experiment ID: 20000234 Result: Up-regulated in Transcription
  misc_feature: MA Experiment 20000234 PARAMETER Experiment Name: At_Siliques_P Parameter: Age (day) Value: 21
  misc_feature: MA Experiment 20000234 PARAMETER Experiment Name: At_Siliques_P Parameter: Organism Value: A. thaliana
  misc_feature: MA Experiment 20000234 PARAMETER Experiment Name: At_Siliques_P Parameter: Plant Line Value: WS
  misc_feature: MA Experiment 20000234 PARAMETER Experiment Name: At_Siliques_P Parameter: Tissue Value: Less Than 5mm Siliques vs. Whole Plant
  misc_feature: MA Experiment ID: 20000235 Result: Up-regulated in Transcription
  misc_feature: MA Experiment 20000235 PARAMETER Experiment Name: At_Siliques_P Parameter: Age (day) Value: 21
  misc_feature: MA Experiment 20000235 PARAMETER Experiment Name: At_Siliques_P Parameter: Organism Value: A. thaliana
  misc_feature: MA Experiment 20000235 PARAMETER Experiment Name: At_Siliques_P Parameter: Plant Line Value: WS
  misc_feature: MA Experiment 20000235 PARAMETER Experiment Name: At_Siliques_P Parameter: Tissue Value: 5-10mm Siliques vs. Whole Plant
  misc_feature: MA Experiment ID: 20000264 Result: Up-regulated in Transcription
  misc_feature: MA Experiment 20000264 PARAMETER Experiment Name: At_Open_Flower_P Parameter: Age (day) Value: 21
  misc_feature: MA Experiment 20000264 PARAMETER Experiment Name: At_Open_Flower_P Parameter: Plant Line Value: WS
  misc_feature: MA Experiment 20000264 PARAMETER Experiment Name: At_Open_Flower_P Parameter: Tissue Value: Open Flower vs. Whole Plant
  misc_feature: MA Experiment ID: 20000286 Result: Up-regulated in Transcription
  misc_feature: MA Experiment 20000286 PARAMETER Experiment Name: At_Open_Flower_P Parameter: Age (day) Value: 21
  misc_feature: MA Experiment 20000286 PARAMETER Experiment Name: At_Open_Flower_P Parameter: Plant Line Value: WS
  misc_feature: MA Experiment 20000286 PARAMETER Experiment Name: At_Open_Flower_P Parameter: Tissue Value: Half Open vs. Whole Plant
  misc_feature: MA Experiment ID: 20001457 Result: Up-regulated in Transcription
  misc_feature: MA Experiment 20001457 PARAMETER Experiment Name: At_50mM_NH4NO3_L-to-H_P Parameter: Age (day) Value: Undefined
  misc_feature: MA Experiment 20001457 PARAMETER Experiment Name: At_50mM_NH4NO3_L-to-H_P Parameter: Organism Value: Undefined
  misc_feature: MA Experiment 20001457 PARAMETER Experiment Name: At_50mM_NH4NO3_L-to-H_P Parameter: Plant Line Value: Undefined
  misc_feature: MA Experiment 20001457 PARAMETER Experiment Name: At_50mM_NH4NO3_L-to-H_P Parameter: Timepoint (hr) Value: 0.5
  misc_feature: MA Experiment 20001457 PARAMETER Experiment Name: At_50mM_NH4NO3_L-to-H_P Parameter: Tissue Value: Siliques
  misc_feature: MA Experiment 20001457 PARAMETER Experiment Name: At_50mM_NH4NO3_L-to-H_P Parameter: Treatment Value: 50mM NH4NO3 vs. 100mM Manitol
  misc_feature: MA Experiment ID: 20001906 Result: Down-regulated in Transcription
  misc_feature: MA Experiment 20001906 PARAMETER Experiment Name: At_Drought_Reproduction_P Parameter: Age (day) Value: 35
  misc_feature: MA Experiment 20001906 PARAMETER Experiment Name: At_Drought_Reproduction_P Parameter: Organism Value: A. thaliana
  misc_feature: MA Experiment 20001906 PARAMETER Experiment Name: At_Drought_Reproduction_P Parameter: Plant Line Value: WS
  misc_feature: MA Experiment 20001906 PARAMETER Experiment Name: At_Drought_Reproduction_P Parameter: Timepoint (day) Value: 5
  misc_feature: MA Experiment 20001906 PARAMETER Experiment Name: At_Drought_Reproduction_P Parameter: Tissue Value: Siliques
  misc_feature: MA Experiment 20001906 PARAMETER Experiment Name: At_Drought_Reproduction_P Parameter: Treatment Value: Drought vs. No Drought
aaatcacttgctagtactcttcacactctctacaatgttgtctatgctctggttccttctatctcttctctctcttcttctacttccttgtctccgaccttgctttcctgctaaaggatctctgaaaaacaaaaagaagattgacaagggaacttatgtggtcggagaggaggagacacctaaagagcttcagagagagctgatgccgagacacgtggcagtgataatggacggaaaccggagatgggctaaacagaccggattgttgacgtcacaaggctacgaggctggagctaaacggcttctcgagttcgctgacctctgcttcaaactagggataaatactgtctcagcttttgctttctccactgagaattggggaagacacaagattgaagtcaaatgcttgatgtatttgttccaacgttacctcaagtcaaagatccaatttttccagagcaaggaaatccgagtttctgttatcgggaatcttgcgaagatccctgagtctctcctccgaacagttcacgagttagaggaagctacaaagagttacaagaagaagcatctcatcttggccatagattacagcgggagattcgacatcttgggtgcttgcaagaacattgtgaagaaatcagaacaaggtttgatccgagaggaagacgtggacgagacgttgttcgagagagagcttcagactcggtgtaccgagttcccaagtcctgatctcttgattaggactagtggggaacagaggattagtaacttcttcttgtggcagctcgcttataccgagtttttcttttcgcctgtactttggcctgatttcgataagcagaagtttatagaggccctggtttcgtatcagcgcagggatagacgatttggctcccggctttgatccacatttgatcctatggtctgtcatgtttcctctgttttgttctgtttctctctgtgtctttatgttcatctgacttttgcagaaataattatactgtctagtctctcgtaga

SEQ ID NO: 99056 - protein, 300 aa, Arabidopsis thaliana; identical to SEQ ID NO: 28639
  peptide (1)..(300): Ceres Seq. ID no. 13602083
  misc_feature (75)..(298): Pfam Name: Putative undecaprenyl diphosphate synthase Pfam Description: Putative undecaprenyl diphosphate synthase
  misc_feature (12)..(300): Homolog of NCBI NO: 18424146 NR Description: dehydrodolichyl diphosphate synthase [DEDOL-PP putative [Arabidopsis thaliana] >gi|26450940|dbj|BAC42577.1| mzn1 dehydrodolichyl diphosphate synthase [Arabidopsis thaliana]
  misc_feature (12)..(300): Homolog of NCBI NO: 21618322 NR Description: undecaprenyl pyrophosphate synthetase-like
  misc_feature (3)..(300): Homolog of NCBI NO: 18424144 NR Description: dehydrodolichyl diphosphate synthase [DEDOL-PP putative [Arabidopsis thaliana] >gi|19699277|gb|AAL91250.1| [Arabidopsis thaliana] >gi|28416467|gb|AAO42764.1|
  misc_feature (68)..(300): Homolog of NCBI NO: 8843799 NR Description: undecaprenyl pyrophosphate synthetase-like
  misc_feature (76)..(300): Homolog of NCBI NO: 8843798 NR Description: undecaprenyl pyrophosphate synthetase-like
  misc_feature (12)..(300): Homolog of NCBI NO: 18400264 NR Description: dehydrodolichyl diphosphate synthase [DEDOL-PP [Arabidopsis thaliana] >gi|25453539|pir||T52648 dehydrodolichyl
  misc_feature (18)..(300): Homolog of NCBI NO: 7447521 NR Description: hypothetical protein At2g23410 [imported] -
  misc_feature (12)..(300): Homolog of NCBI NO: 8843800 NR Description: cis-prenyltransferase homolog-like; undecaprenyl
  misc_feature (65)..(300): Homolog of NCBI NO: 18424148 NR Description: dehydrodolichyl diphosphate synthase [DEDOL-PP
  misc_feature (46)..(299): Homolog of NCBI NO: 15237748 NR Description: dehydrodolichyl diphosphate synthase [DEDOL-PP putative [Arabidopsis thaliana] >gi|8843797|dbj|BAA97345.1| similarity to unknown protein~gb|AAF22257.1~gene_id:MZN1.21

SEQ ID NO: 99057 - protein, 289 aa, Arabidopsis thaliana; identical to SEQ ID NO: 28640
  peptide (1)..(289): Ceres Seq. ID no. 13602084
  misc_feature (64)..(287): Pfam Name: Putative undecaprenyl diphosphate synthase Pfam Description: Putative undecaprenyl diphosphate synthase
  misc_feature (1)..(289): Homolog of NCBI NO: 18424146 NR Description: dehydrodolichyl diphosphate synthase [DEDOL-PP putative [Arabidopsis thaliana] >gi|26450940|dbj|BAC42577.1| mzn1 dehydrodolichyl diphosphate synthase [Arabidopsis thaliana]
  misc_feature (1)..(289): Homolog of NCBI NO: 21618322 NR Description: undecaprenyl pyrophosphate synthetase-like
  misc_feature (1)..(289): Homolog of NCBI NO: 18424144 NR Description: dehydrodolichyl diphosphate synthase [DEDOL-PP putative [Arabidopsis thaliana] >gi|19699277|gb|AAL91250.1| [Arabidopsis thaliana] >gi|28416467|gb|AAO42764.1|
  misc_feature (57)..(289): Homolog of NCBI NO: 8843799 NR Description: undecaprenyl pyrophosphate synthetase-like
  misc_feature (65)..(289): Homolog of NCBI NO: 8843798 NR Description: undecaprenyl pyrophosphate synthetase-like
  misc_feature (1)..(289): Homolog of NCBI NO: 18400264 NR Description: dehydrodolichyl diphosphate synthase [DEDOL-PP [Arabidopsis thaliana] >gi|25453539|pir||T52648 dehydrodolichyl
  misc_feature (7)..(289): Homolog of NCBI NO: 7447521 NR Description: hypothetical protein At2g23410 [imported] -
  misc_feature (1)..(289): Homolog of NCBI NO: 8843800 NR Description: cis-prenyltransferase homolog-like; undecaprenyl
  misc_feature (54)..(289): Homolog of NCBI NO: 18424148 NR Description: dehydrodolichyl diphosphate synthase [DEDOL-PP
  misc_feature (35)..(288): Homolog of NCBI NO: 15237748 NR Description: dehydrodolichyl diphosphate synthase [DEDOL-PP putative [Arabidopsis thaliana] >gi|8843797|dbj|BAA97345.1| similarity to unknown protein~gb|AAF22257.1~gene_id:MZN1.21

SEQ ID NO: 99058 - protein, 286 aa, Arabidopsis thaliana; identical to SEQ ID NO: 28641
  peptide (1)..(286): Ceres Seq. ID no. 13602085
  misc_feature (61)..(284): Pfam Name: Putative undecaprenyl diphosphate synthase Pfam Description: Putative undecaprenyl diphosphate synthase
  misc_feature (1)..(286): Homolog of NCBI NO: 18424146 NR Description: dehydrodolichyl diphosphate synthase [DEDOL-PP putative [Arabidopsis thaliana] >gi|26450940|dbj|BAC42577.1| mzn1 dehydrodolichyl diphosphate synthase [Arabidopsis thaliana]
  misc_feature (1)..(286): Homolog of NCBI NO: 21618322 NR Description: undecaprenyl pyrophosphate synthetase-like
  misc_feature (1)..(286): Homolog of NCBI NO: 18424144 NR Description: dehydrodolichyl diphosphate synthase [DEDOL-PP putative [Arabidopsis thaliana] >gi|19699277|gb|AAL91250.1| [Arabidopsis thaliana] >gi|28416467|gb|AAO42764.1|
  misc_feature (54)..(286): Homolog of NCBI NO: 8843799 NR Description: undecaprenyl pyrophosphate synthetase-like
  misc_feature (62)..(286): Homolog of NCBI NO: 8843798 NR Description: undecaprenyl pyrophosphate synthetase-like
  misc_feature (1)..(286): Homolog of NCBI NO: 18400264 NR Description: dehydrodolichyl diphosphate synthase [DEDOL-PP [Arabidopsis thaliana] >gi|25453539|pir||T52648 dehydrodolichyl
  misc_feature (4)..(286): Homolog of NCBI NO: 7447521 NR Description: hypothetical protein At2g23410 [imported] -
  misc_feature (1)..(286): Homolog of NCBI NO: 8843800 NR Description: cis-prenyltransferase homolog-like; undecaprenyl
  misc_feature (51)..(286): Homolog of NCBI NO: 18424148 NR Description: dehydrodolichyl diphosphate synthase [DEDOL-PP
  misc_feature (32)..(285): Homolog of NCBI NO: 15237748 NR Description: dehydrodolichyl diphosphate synthase [DEDOL-PP putative [Arabidopsis thaliana] >gi|8843797|dbj|BAA97345.1| similarity to unknown protein~gb|AAF22257.1~gene_id:MZN1.21

SEQ ID NO: 99059 - DNA, 1243 bp, Arabidopsis thaliana
  misc_feature (1)..(1243): Ceres Seq. ID no. 13602090
  misc_feature: MA Experiment ID: 20000111 Result: Down-regulated in Transcription
  misc_feature: MA Experiment 20000111 PARAMETER Experiment Name: At_42deg_Heat_cDNA_P Parameter: Temperature (deg C) Value: 42 vs. 22
  misc_feature: MA Experiment 20000111 PARAMETER Experiment Name: At_42deg_Heat_cDNA_P Parameter: Timepoint (hr) Value: 6
  misc_feature: MA Experiment 20000111 PARAMETER Experiment Name: At_42deg_Heat_cDNA_P Parameter: Tissue Value: Aerial
  misc_feature: MA Experiment ID: 20000113 Result: Down-regulated in Transcription
  misc_feature: MA Experiment 20000113 PARAMETER Experiment Name: At_42deg_Heat_cDNA_P Parameter: Temperature (deg C) Value: 42 vs. 22
  misc_feature: MA Experiment 20000113 PARAMETER Experiment Name: At_42deg_Heat_cDNA_P Parameter: Timepoint (hr) Value: 8
  misc_feature: MA Experiment 20000113 PARAMETER Experiment Name: At_42deg_Heat_cDNA_P Parameter: Tissue Value: Aerial
  misc_feature: MA Experiment ID: 20000173 Result: Down-regulated in Transcription
  misc_feature: MA Experiment 20000173 PARAMETER Experiment Name: At_42deg_Heat_P Parameter: Age (day) Value: 14
  misc_feature: MA Experiment 20000173 PARAMETER Experiment Name: At_42deg_Heat_P Parameter: Organism Value: A. thaliana
  misc_feature: MA Experiment 20000173 PARAMETER Experiment Name: At_42deg_Heat_P Parameter: Plant Line Value: WS
  misc_feature: MA Experiment 20000173 PARAMETER Experiment Name: At_42deg_Heat_P Parameter: Temperature (deg C) Value: 42 vs. 22
  misc_feature: MA Experiment 20000173 PARAMETER Experiment Name: At_42deg_Heat_P Parameter: Timepoint (hr) Value: 6
  misc_feature: MA Experiment 20000173 PARAMETER Experiment Name: At_42deg_Heat_P Parameter: Tissue Value: Aerial
  misc_feature: MA Experiment ID: 20000235 Result: Up-regulated in Transcription
  misc_feature: MA Experiment 20000235 PARAMETER Experiment Name: At_Siliques_P Parameter: Age (day) Value: 21
  misc_feature: MA Experiment 20000235 PARAMETER Experiment Name: At_Siliques_P Parameter: Organism Value: A. thaliana
  misc_feature: MA Experiment 20000235 PARAMETER Experiment Name: At_Siliques_P Parameter: Plant Line Value: WS
  misc_feature: MA Experiment 20000235 PARAMETER Experiment Name: At_Siliques_P Parameter: Tissue Value: 5-10mm Siliques vs. Whole Plant
  misc_feature: MA Experiment ID: 20000265 Result: Up-regulated in Transcription
  misc_feature: MA Experiment 20000265 PARAMETER Experiment Name: At_Open_Flower_P Parameter: Age (day) Value: 21
  misc_feature: MA Experiment 20000265 PARAMETER Experiment Name: At_Open_Flower_P Parameter: Plant Line Value: WS
  misc_feature: MA Experiment 20000265 PARAMETER Experiment Name: At_Open_Flower_P Parameter: Tissue Value: Closed Flower vs. Whole Plant
actcctaaaaactataatcattgagaaacccattttaagattacatcaatcatcatcgctgttagagagaaactggagcaacttctcaaattttagcctttttttgtttttgcattttgcctaatcggtgcttctccagatttcgcttatcttgttcctatagcataacaatggcggatttcaaaccaaggatcgagatttcgttccttgaaaccttcatttgcagcgctttcgctgcttgttttgctgagttatgtactataccgttggacacagccaaagttagacttcagcttcaaagaaagattcccactggagatggtgagaatttgcccaagtatagaggatcaattggtactctagctaccatagctagagaagaaggtatttcaggtctttggaaaggtgttattgcaggacttcatcgccaatgtatctatggtggcttaaggattgggttatatgagcctgtgaagacacttttggttggaagtgactttattggcgatattcctttatatcaaaagattcttgcagctttgttaactggagctatagctattattgtagctaatccaactgatcttgttaaagttcggcttcaatcagaaggaaagttaccggctggggttcctaggcgttatgcaggagctgtagacgcttatttcaccattgtgaagctggaaggagttagtgcgctatggactggacttggtcccaatattgcccggaatgctattgtaaatgctgcagagttagctagttatgatcaaataaaggagacaattatgaaaattccgttcttcagagacagtgttttaactcatctactagctggtttagctgcaggcttcttcgctgtctgcatcggttctccaattgatgtggtgaaatctagaatgatgggagactctacttaccgaaacacagtcgattgcttcatcaaaacgatgaagaccgaggggattatggcattctacaaaggatttctcccgaattttacacggctaggaacctggaatgccattatgttcctcacattagaacaagtgaaaaaagtgtttctaagagaagtcttgtacgattgattctcagatccctagtcgaaaaccataccttattacataatcccttctataaaactttgaattgttagaattaaaacatatatactttctatgttatgtgagctttgttatttagattagtatagaaacattttatccaaaaaaaaattctttgc

SEQ ID NO: 99060 - protein, 305 aa, Arabidopsis thaliana; identical to SEQ ID NO: 37846
  peptide (1)..(305): Ceres Seq. ID no. 13602091
  misc_feature (1)..(305): Homolog of NCBI NO: 18424178 NR Description: uncoupling protein (AtUCP2) [Arabidopsis >gi|4063007|dbj|BAA36222.1| uncoupling protein [Arabidopsis >gi|9759228|dbj|BAB09640.1| uncoupling protein [Arabidopsis
  misc_feature (1)..(302): Homolog of NCBI NO: 7106157 NR Description: SfUCPa [Symplocarpus foetidus]
  misc_feature (7)..(301): Homolog of NCBI NO: 22002462 NR Description: mitochondrial uncoupling protein [Helicodiceros
  misc_feature (3)..(302): Homolog of NCBI NO: 18921040 NR Description: putative uncoupling protein [Lycopersicon
  misc_feature (3)..(302): Homolog of NCBI NO: 7489287 NR Description: uncoupling protein (clone StUCP7), mitochonrial - >gi|2398829|emb|CAA72107.1| mitochondrial uncoupling protein
  misc_feature (9)..(302): Homolog of NCBI NO: 15232420 NR Description: uncoupling protein (ucp/PUMP) [Arabidopsis
  misc_feature (9)..(302): Homolog of NCBI NO: 25295878 NR Description: uncoupling protein [imported] - Arabidopsis >gi|3115108|emb|CAA11757.1| plant uncoupling mitochondrial
  misc_feature (9)..(301): Homolog of NCBI NO: 19401698 NR Description: uncoupling protein [Zea mays]
  misc_feature (5)..(301): Homolog of NCBI NO: 13537347 NR Description: uncoupling protein [Oryza sativa (japonica
  misc_feature (1)..(215): Homolog of NCBI NO: 7106159 NR Description: SfUCPb [Symplocarpus foetidus]

SEQ ID NO: 99061 - DNA, 870 bp, Arabidopsis thaliana
  misc_feature (1)..(870): Ceres Seq. ID no. 13602092
  misc_feature: MA Experiment ID: 20000184 Result: Up-regulated in Transcription
  misc_feature: MA Experiment 20000184 PARAMETER Experiment Name: At_Shoots__P Parameter: Age (day) Value: 7
  misc_feature: MA Experiment 20000184 PARAMETER Experiment Name: At_Shoots__P Parameter: Tissue Value: Shoots vs. Whole Plant
  misc_feature: MA Experiment ID: 20000439 Result: Down-regulated in Transcription
  misc_feature: MA Experiment 20000439 PARAMETER Experiment Name: At_Roots__P Parameter: Age (day) Value: 14 vs. 21
  misc_feature: MA Experiment 20000439 PARAMETER Experiment Name: At_Roots__P Parameter: Organism Value: A. thaliana
  misc_feature: MA Experiment 20000439 PARAMETER Experiment Name: At_Roots__P Parameter: Tissue Value: Roots vs. Whole Plant
  misc_feature: MA Experiment ID: 20000441 Result: Up-regulated in Transcription
  misc_feature: MA Experiment 20000441 PARAMETER Experiment Name: At_1uM_BR-BRZ__P Parameter: Tissue Value: Shoot Apices
  misc_feature: MA Experiment 20000441 PARAMETER Experiment Name: At_1uM_BR-BRZ__P Parameter: Treatment Value: 1uM BR vs. No Treatment
  misc_feature: MA Experiment ID: 20000451 Result: Up-regulated in Transcription
  misc_feature: MA Experiment 20000451 PARAMETER Experiment Name: At_CS6879_Shoots-Roots_P Parameter: Age (day) Value: 14
  misc_feature: MA Experiment 20000451 PARAMETER Experiment Name: At_CS6879_Shoots-Roots_P Parameter: Organism Value: A. thaliana
  misc_feature: MA Experiment 20000451 PARAMETER Experiment Name: At_CS6879_Shoots-Roots_P Parameter: Plant Line Value: CS6879 vs. WS
  misc_feature: MA Experiment 20000451 PARAMETER Experiment Name: At_CS6879_Shoots-Roots_P Parameter: Tissue Value: Roots
  misc_feature: MA Experiment ID: 20001451 Result: Up-regulated in Transcription
  misc_feature: MA Experiment 20001451 PARAMETER Experiment Name: At_Far-red-induction_P Parameter: Age (day) Value: 7
  misc_feature: MA Experiment 20001451 PARAMETER Experiment Name: At_Far-red-induction_P Parameter: Light Value: Far-red vs. White
  misc_feature: MA Experiment 20001451 PARAMETER Experiment Name: At_Far-red-induction_P Parameter: Organism Value: A. thaliana
  misc_feature: MA Experiment 20001451 PARAMETER Experiment Name: At_Far-red-induction_P Parameter: Plant Line Value: Columbia
  misc_feature: MA Experiment 20001451 PARAMETER Experiment Name: At_Far-red-induction_P Parameter: Timepoint (hr) Value: 24
  misc_feature: MA Experiment 20001451 PARAMETER Experiment Name: At_Far-red-induction_P Parameter: Tissue Value: Whole Plant
  misc_feature: MA Experiment ID: 20001555 Result: Down-regulated in Transcription
  misc_feature: MA Experiment 20001555 PARAMETER Experiment Name: At_Drought_Soil_Dry_P Parameter: Age (day) Value: 24
  misc_feature: MA Experiment 20001555 PARAMETER Experiment Name: At_Drought_Soil_Dry_P Parameter: Organism Value: A. thaliana
  misc_feature: MA Experiment 20001555 PARAMETER Experiment Name: At_Drought_Soil_Dry_P Parameter: Plant Line Value: WS
  misc_feature: MA Experiment 20001555 PARAMETER Experiment Name: At_Drought_Soil_Dry_P Parameter: Post Timepoint (hr) Value: None
  misc_feature: MA Experiment 20001555 PARAMETER Experiment Name: At_Drought_Soil_Dry_P Parameter: Post-Treatment Value: None
  misc_feature: MA Experiment 20001555 PARAMETER Experiment Name: At_Drought_Soil_Dry_P Parameter: Timepoint (day) Value: 10
  misc_feature: MA Experiment 20001555 PARAMETER Experiment Name: At_Drought_Soil_Dry_P Parameter: Treatment Value: Drought vs. No Drought
  misc_feature: MA Experiment ID: 20001556 Result: Down-regulated in Transcription
  misc_feature: MA Experiment 20001556 PARAMETER Experiment Name: At_Drought_Soil_Dry_P Parameter: Age (day) Value: 26
  misc_feature: MA Experiment 20001556 PARAMETER Experiment Name: At_Drought_Soil_Dry_P Parameter: Organism Value: A. thaliana
  misc_feature: MA Experiment 20001556 PARAMETER Experiment Name: At_Drought_Soil_Dry_P Parameter: Plant Line Value: WS
  misc_feature: MA Experiment 20001556 PARAMETER Experiment Name: At_Drought_Soil_Dry_P Parameter: Post Timepoint (hr) Value: None
  misc_feature: MA Experiment 20001556 PARAMETER Experiment Name: At_Drought_Soil_Dry_P Parameter: Post-Treatment Value: None
  misc_feature: MA Experiment 20001556 PARAMETER Experiment Name: At_Drought_Soil_Dry_P Parameter: Timepoint (day) Value: 12
  misc_feature: MA Experiment 20001556 PARAMETER Experiment Name: At_Drought_Soil_Dry_P Parameter: Treatment Value: Drought vs. No Drought
  misc_feature: MA Experiment ID: 20001559 Result: Down-regulated in Transcription
  misc_feature: MA Experiment 20001559 PARAMETER Experiment Name: At_Drought_Soil_Dry_P Parameter: Age (day) Value: 28
  misc_feature: MA Experiment 20001559 PARAMETER Experiment Name: At_Drought_Soil_Dry_P Parameter: Organism Value: A. thaliana
  misc_feature: MA Experiment 20001559 PARAMETER Experiment Name: At_Drought_Soil_Dry_P Parameter: Plant Line Value: WS
  misc_feature: MA Experiment 20001559 PARAMETER Experiment Name: At_Drought_Soil_Dry_P Parameter: Post Timepoint (hr) Value: 29
  misc_feature: MA Experiment 20001559 PARAMETER Experiment Name: At_Drought_Soil_Dry_P Parameter: Post-Treatment Value: Re-Water vs. No Drought
  misc_feature: MA Experiment 20001559 PARAMETER Experiment Name: At_Drought_Soil_Dry_P Parameter: Timepoint (day) Value: 14
  misc_feature: MA Experiment 20001559 PARAMETER Experiment Name: At_Drought_Soil_Dry_P Parameter: Treatment Value: Drought vs. No Drought
  misc_feature: MA Experiment ID: 20001560 Result: Down-regulated in Transcription
  misc_feature: MA Experiment 20001560 PARAMETER Experiment Name: At_Drought_Soil_Dry_P Parameter: Age (day) Value: 28
  misc_feature: MA Experiment 20001560 PARAMETER Experiment Name: At_Drought_Soil_Dry_P Parameter: Organism Value: A. thaliana
  misc_feature: MA Experiment 20001560 PARAMETER Experiment Name: At_Drought_Soil_Dry_P Parameter: Plant Line Value: WS
  misc_feature: MA Experiment 20001560 PARAMETER Experiment Name: At_Drought_Soil_Dry_P Parameter: Post Timepoint (hr) Value: None
  misc_feature: MA Experiment 20001560 PARAMETER Experiment Name: At_Drought_Soil_Dry_P Parameter: Post-Treatment Value: None
  misc_feature: MA Experiment 20001560 PARAMETER Experiment Name: At_Drought_Soil_Dry_P Parameter: Timepoint (day) Value: 14
  misc_feature: MA Experiment 20001560 PARAMETER Experiment Name: At_Drought_Soil_Dry_P Parameter: Treatment Value: Drought vs. No Drought
aaataccaagcaaccaatttcttgcaattttcctctcctcccaaccaaaacacaagagccaagaacaaagaaaccatggatcatgatcacatgcatggaatgcctcgaccatcatcatcatcatcatcatcaccatcatccatgatgaacaatggatccatgaacgaaggaggaggacatcaccacatgaagatgatgatgcacatgaccttcttttggggcaagaacacggaggttctcttctccggttggcccggaacaagctccggcatgtatgctctttgtcttatctttgtcttctttctcgccgtcctcaccgaatggcttgctcattcctctctcctccgtggctccaccggagattcggctaatcgtgccgccgggttaatccaaaccgccgtgtataccctccgtatcggcctcgcctatctagtcatgctcgccgtcatgtcgtttaacgccggtgtgtttctcgtcgctctggccggtcatgccgttggtttcatgttgttcggaagccaaactttccggaatacctccgatgaccggaaaactaactatgttcctccctcaggttgtgcttgttgatgataatatcaatgctttatatatatgtatggattgatccatgcttgtgattcaaattaaagatctagggtttgtagttttcttggttattttatggattgttcttgaggttcatgtgtgtgtgaatgtgaggaggaggaatatttgatattttctatcgtttgcttaattttttttgcttttgttttattctgctggctaatggtgaaagctgagtatacaatttactacttttgggctccaatttgttttttttttctctcagaatttcatatataattt

SEQ ID NO: 99062 - protein, 195 aa, Arabidopsis thaliana; identical to SEQ ID NO: 25018
  peptide (1)..(195): Ceres Seq. ID no. 13602093
  misc_feature (67)..(183): Pfam Name: Ctr copper transporter family Pfam Description: Ctr copper transporter family
  misc_feature (26)..(195): Homolog of NCBI NO: 15237802 NR Description: copper transport protein [Arabidopsis thaliana]
  misc_feature (26)..(195): Homolog of NCBI NO: 11288418 NR Description: copper transport protein [imported] - Arabidopsis >gi|1082054|emb|CAA90018.1| copper transporter protein
  misc_feature (26)..(195): Homolog of NCBI NO: 15232677 NR Description: copper transport protein - like protein
  misc_feature (43)..(184): Homolog of NCBI NO: 30683324 NR Description: copper transport protein -related protein thaliana] >gi|26452466|dbj|BAC43318.1| putative copper transport [Arabidopsis thaliana] >gi|28827258|gb|AAO50473.1| putative
  misc_feature (31)..(185): Homolog of NCBI NO: 15237804 NR Description: copper transport protein - like [Arabidopsis >gi|10177632|dbj|BAB10780.1| gene_id:K18B18.3~pir||T12958~similar
  misc_feature (31)..(185): Homolog of NCBI NO: 21592951 NR Description: copper transport protein-like [Arabidopsis
  misc_feature (60)..(185): Homolog of NCBI NO: 18496854 NR Description: copper transporter-like protein COPT3
  misc_feature (58)..(171): Homolog of NCBI NO: 34909916 NR Description: P0665A11.18 [Oryza sativa (japonica
  misc_feature (62)..(178): Homolog of NCBI NO: 30687312 NR Description: COPT4 protein [Arabidopsis thaliana]
  misc_feature (62)..(178): Homolog of NCBI NO: 18496856 NR Description: COPT4 [Arabidopsis thaliana]

SEQ ID NO: 99063 - protein, 170 aa, Arabidopsis thaliana; identical to SEQ ID NO: 25019
  peptide (1)..(170): Ceres Seq. ID no. 13602094
  misc_feature (42)..(158): Pfam Name: Ctr copper transporter family Pfam Description: Ctr copper transporter family
  misc_feature (1)..(170): Homolog of NCBI NO: 15237802 NR Description: copper transport protein [Arabidopsis thaliana]
  misc_feature (1)..(170): Homolog of NCBI NO: 11288418 NR Description: copper transport protein [imported] - Arabidopsis >gi|1082054|emb|CAA90018.1| copper transporter protein
  misc_feature (1)..(170): Homolog of NCBI NO: 15232677 NR Description: copper transport protein - like protein
  misc_feature (18)..(159): Homolog of NCBI NO: 30683324 NR Description: copper transport protein -related protein thaliana] >gi|26452466|dbj|BAC43318.1| putative copper transport [Arabidopsis thaliana] >gi|28827258|gb|AAO50473.1| putative
  misc_feature (6)..(160): Homolog of NCBI NO: 15237804 NR Description: copper transport protein - like [Arabidopsis >gi|10177632|dbj|BAB10780.1| gene_id:K18B18.3~pir||T12958~similar
  misc_feature (6)..(160): Homolog of NCBI NO: 21592951 NR Description: copper transport protein-like [Arabidopsis
  misc_feature (35)..(160): Homolog of NCBI NO: 18496854 NR Description: copper transporter-like protein COPT3
  misc_feature (33)..(146): Homolog of NCBI NO: 34909916 NR Description: P0665A11.18 [Oryza sativa (japonica
  misc_feature (37)..(153): Homolog of NCBI NO: 30687312 NR Description: COPT4 protein [Arabidopsis thaliana]
  misc_feature (37)..(153): Homolog of NCBI NO: 18496856 NR Description: COPT4 [Arabidopsis thaliana]

SEQ ID NO: 99064 - protein, 165 aa, Arabidopsis thaliana; identical to SEQ ID NO: 25020
  peptide (1)..(165): Ceres Seq. ID no. 13602095
  misc_feature (37)..(153): Pfam Name: Ctr copper transporter family Pfam Description: Ctr copper transporter family
  misc_feature (1)..(165): Homolog of NCBI NO: 15237802 NR Description: copper transport protein [Arabidopsis thaliana]
  misc_feature (1)..(165): Homolog of NCBI NO: 11288418 NR Description: copper transport protein [imported] - Arabidopsis >gi|1082054|emb|CAA90018.1| copper transporter protein
  misc_feature (1)..(165): Homolog of NCBI NO: 15232677 NR Description: copper transport protein - like protein
  misc_feature (13)..(154): Homolog of NCBI NO: 30683324 NR Description: copper transport protein -related protein thaliana] >gi|26452466|dbj|BAC43318.1| putative copper transport [Arabidopsis thaliana] >gi|28827258|gb|AAO50473.1| putative
  misc_feature (1)..(155): Homolog of NCBI NO: 15237804 NR Description: copper transport protein - like [Arabidopsis >gi|10177632|dbj|BAB10780.1| gene_id:K18B18.3~pir||T12958~similar
  misc_feature (1)..(155): Homolog of NCBI NO: 21592951 NR Description: copper transport protein-like [Arabidopsis
  misc_feature (30)..(155): Homolog of NCBI NO: 18496854 NR Description: copper transporter-like protein COPT3
  misc_feature (28)..(141): Homolog of NCBI NO: 34909916 NR Description: P0665A11.18 [Oryza sativa (japonica
  misc_feature (32)..(148): Homolog of NCBI NO: 30687312 NR Description: COPT4 protein [Arabidopsis thaliana]
  misc_feature (32)..(148): Homolog of NCBI NO: 18496856 NR Description: COPT4 [Arabidopsis thaliana]

SEQ ID NO: 99065 - DNA, 574 bp, Arabidopsis thaliana
  misc_feature (1)..(574): Ceres Seq. ID no. 13602096
  misc_feature: MA Experiment ID: 108501 Result: Down-regulated in Transcription
  misc_feature: MA Experiment 108501 PARAMETER Experiment Name: At_ap2_floral_buds_cDNA_P Parameter: Plant Line Value: ap2 (Ler.)
  misc_feature: MA Experiment 108501 PARAMETER Experiment Name: At_ap2_floral_buds_cDNA_P Parameter: Tissue Value: Closed Flower
  misc_feature: MA Experiment ID: 20000265 Result: Up-regulated in Transcription
  misc_feature: MA Experiment 20000265 PARAMETER Experiment Name: At_Open_Flower_P Parameter: Age (day) Value: 21
  misc_feature: MA Experiment 20000265 PARAMETER Experiment Name: At_Open_Flower_P Parameter: Plant Line Value: WS
  misc_feature: MA Experiment 20000265 PARAMETER Experiment Name: At_Open_Flower_P Parameter: Tissue Value: Closed Flower vs. Whole Plant
  misc_feature: MA Experiment ID: 20001910 Result: Down-regulated in Transcription
  misc_feature: MA Experiment 20001910 PARAMETER Experiment Name: At_Drought_Reproduction_P Parameter: Age (day) Value: 37
  misc_feature: MA Experiment 20001910 PARAMETER Experiment Name: At_Drought_Reproduction_P Parameter: Organism Value: A. thaliana
  misc_feature: MA Experiment 20001910 PARAMETER Experiment Name: At_Drought_Reproduction_P Parameter: Plant Line Value: WS
  misc_feature: MA Experiment 20001910 PARAMETER Experiment Name: At_Drought_Reproduction_P Parameter: Timepoint (day) Value: 7
  misc_feature: MA Experiment 20001910 PARAMETER Experiment Name: At_Drought_Reproduction_P Parameter: Tissue Value: Flowers
  misc_feature: MA Experiment 20001910 PARAMETER Experiment Name: At_Drought_Reproduction_P Parameter: Treatment Value: Drought vs. No Drought
aaaatcttcacattgcacgtaaaaaatatctttatacaatgaacggcatgagtggatcttctccggcggctccggctccttcaccatcatcgttcttccaacatcgccaccgtcacggtggtatgatgcatatgactttcttttggggaaaaaccacggaggttctattcgacggatggccagggaccagtctgaaaatgtattgggtctgtctcgccgtcatttttgttatttccgctttctccgagtgtctatcgcggtgcggtttcatgaaatccggtccggctagcttgggaggcgggctattacagactgcggtttacaccgtgagggctgctttgtcttatttggtcatgctggctgtgatgtcgttcaatggaggagtcttcgtggctgcgatggctggttttggattagggtttatgatttttggaagtagggcttttagggccactagcagtaacagtcacaccgaggttcaatcacattgttgatttttgtcttagatcgtttttattttccttgtttcccgttgaaataatgattaggaaaataaaaaaattcacgtttttgg

SEQ ID NO: 99066 - protein, 163 aa, Arabidopsis thaliana
  peptide (1)..(163): Ceres Seq. ID no. 13602097
  misc_feature (42)..(155): Pfam Name: Ctr copper transporter family Pfam Description: Ctr copper transporter family
  misc_feature (13)..(163): Homolog of NCBI NO: 15237804 NR Description: copper transport protein - like [Arabidopsis >gi|10177632|dbj|BAB10780.1| gene_id:K18B18.3~pir||T12958~similar
  misc_feature (13)..(163): Homolog of NCBI NO: 21592951 NR Description: copper transport protein-like [Arabidopsis
  misc_feature (32)..(163): Homolog of NCBI NO: 18496854 NR Description: copper transporter-like protein COPT3
  misc_feature (24)..(154): Homolog of NCBI NO: 30683324 NR Description: copper transport protein -related protein thaliana] >gi|26452466|dbj|BAC43318.1| putative copper transport [Arabidopsis thaliana] >gi|28827258|gb|AAO50473.1| putative
  misc_feature (24)..(157): Homolog of NCBI NO: 15232677 NR Description: copper transport protein - like protein
  misc_feature (13)..(157): Homolog of NCBI NO: 11288418 NR Description: copper transport protein [imported] - Arabidopsis >gi|1082054|emb|CAA90018.1| copper transporter protein
  misc_feature (13)..(157): Homolog of NCBI NO: 15237802 NR Description: copper transport protein [Arabidopsis thaliana]
  misc_feature (33)..(149): Homolog of NCBI NO: 30687312 NR Description: COPT4 protein [Arabidopsis thaliana]
  misc_feature (33)..(149): Homolog of NCBI NO: 18496856 NR Description: COPT4 [Arabidopsis thaliana]
  misc_feature (33)..(143): Homolog of NCBI NO: 25408576 NR Description: hypothetical protein At2g37920 [imported] -
NLHIARKKYLYTMNGMSGSSPAAPAPSPSSFFQHRHRHGGMMHMTFFWGKTTEVLFDGWPGTSLKMYWVCLAVIFVISAFSECLSRCGFMKSGPASLGGGLLQTAVYTVRAALSYLVMLAVMSFNGGVFVAAMAGFGLGFMIFGSRAFRATSSNSHTEVQSHC

SEQ ID NO: 99067 - protein, 151 aa, Arabidopsis thaliana
  peptide (1)..(151): Ceres Seq. ID no. 13602098
  misc_feature (30)..(143): Pfam Name: Ctr copper transporter family Pfam Description: Ctr copper transporter family
  misc_feature (1)..(151): Homolog of NCBI NO: 15237804 NR Description: copper transport protein - like [Arabidopsis >gi|10177632|dbj|BAB10780.1| gene_id:K18B18.3~pir||T12958~similar
  misc_feature (1)..(151): Homolog of NCBI NO: 21592951 NR Description: copper transport protein-like [Arabidopsis
  misc_feature (20)..(151): Homolog of NCBI NO: 18496854 NR Description: copper transporter-like protein COPT3
  misc_feature (12)..(142): Homolog of NCBI NO: 30683324 NR Description: copper transport protein -related protein thaliana] >gi|26452466|dbj|BAC43318.1| putative copper transport [Arabidopsis thaliana] >gi|28827258|gb|AAO50473.1| putative
  misc_feature (12)..(145): Homolog of NCBI NO: 15232677 NR Description: copper transport protein - like protein
  misc_feature (1)..(145): Homolog of NCBI NO: 11288418 NR Description: copper transport protein [imported] - Arabidopsis >gi|1082054|emb|CAA90018.1| copper transporter protein
  misc_feature (1)..(145): Homolog of NCBI NO: 15237802 NR Description: copper transport protein [Arabidopsis thaliana]
  misc_feature (21)..(137): Homolog of NCBI NO: 30687312 NR Description: COPT4 protein [Arabidopsis thaliana]
  misc_feature (21)..(137): Homolog of NCBI NO: 18496856 NR Description: COPT4 [Arabidopsis thaliana]
  misc_feature (21)..(131): Homolog of NCBI NO: 25408576 NR Description: hypothetical protein At2g37920 [imported] -
MNGMSGSSPAAPAPSPSSFFQHRHRHGGMMHMTFFWGKTTEVLFDGWPGTSLKMYWVCLAVIFVISAFSECLSRCGFMKSGPASLGGGLLQTAVYTVRAALSYLVMLAVMSFNGGVFVAAMAGFGLGFMIFGSRAFRATSSNSHTEVQSHC

SEQ ID NO: 99068 - protein, 148 aa, Arabidopsis thaliana
  peptide (1)..(148): Ceres Seq. ID no. 13602099
  misc_feature (27)..(140): Pfam Name: Ctr copper transporter family Pfam Description: Ctr copper transporter family
  misc_feature (1)..(148): Homolog of NCBI NO: 15237804 NR Description: copper transport protein - like [Arabidopsis >gi|10177632|dbj|BAB10780.1| gene_id:K18B18.3~pir||T12958~similar
  misc_feature (1)..(148): Homolog of NCBI NO: 21592951 NR Description: copper transport protein-like [Arabidopsis
  misc_feature (17)..(148): Homolog of NCBI NO: 18496854 NR Description: copper transporter-like protein COPT3
  misc_feature (9)..(139): Homolog of NCBI NO: 30683324 NR Description: copper transport protein -related protein thaliana] >gi|26452466|dbj|BAC43318.1| putative copper transport [Arabidopsis thaliana] >gi|28827258|gb|AAO50473.1| putative
  misc_feature (9)..(142): Homolog of NCBI NO: 15232677 NR Description: copper transport protein - like protein
  misc_feature (1)..(142): Homolog of NCBI NO: 11288418 NR Description: copper transport protein [imported] - Arabidopsis >gi|1082054|emb|CAA90018.1| copper transporter protein
  misc_feature (1)..(142): Homolog of NCBI NO: 15237802 NR Description: copper transport protein [Arabidopsis thaliana]
  misc_feature (18)..(134): Homolog of NCBI NO: 30687312 NR Description: COPT4 protein [Arabidopsis thaliana]
  misc_feature (18)..(134): Homolog of NCBI NO: 18496856 NR Description: COPT4 [Arabidopsis thaliana]
  misc_feature (18)..(128): Homolog of NCBI NO: 25408576 NR Description: hypothetical protein At2g37920 [imported] -
MSGSSPAAPAPSPSSFFQHRHRHGGMMHMTFFWGKTTEVLFDGWPGTSLKMYWVCLAVIFVISAFSECLSRCGFMKSGPASLGGGLLQTAVYTVRAALSYLVMLAVMSFNGGVFVAAMAGFGLGFMIFGSRAFRATSSNSHTEVQSHC

SEQ ID NO: 99069 - DNA, 1432 bp, Arabidopsis thaliana
  misc_feature (1)..(1432): Ceres Seq. ID no. 13602108
  misc_feature: MA Experiment ID: 108576 Result: Down-regulated in Transcription
  misc_feature: MA Experiment 108576 PARAMETER Experiment Name: At_42deg_Heat_cDNA_P Parameter: Temperature (deg C) Value: 42 vs. 22
  misc_feature: MA Experiment 108576 PARAMETER Experiment Name: At_42deg_Heat_cDNA_P Parameter: Timepoint (hr) Value: 1
  misc_feature: MA Experiment 108576 PARAMETER Experiment Name: At_42deg_Heat_cDNA_P Parameter: Tissue Value: Aerial
  misc_feature: MA Experiment ID: 108577 Result: Down-regulated in Transcription
  misc_feature: MA Experiment 108577 PARAMETER Experiment Name: At_42deg_Heat_cDNA_P Parameter: Temperature (deg C) Value: 42 vs. 22
  misc_feature: MA Experiment 108577 PARAMETER Experiment Name: At_42deg_Heat_cDNA_P Parameter: Timepoint (hr) Value: 6
  misc_feature: MA Experiment 108577 PARAMETER Experiment Name: At_42deg_Heat_cDNA_P Parameter: Tissue Value: Aerial
  misc_feature: MA Experiment ID: 20000144 Result: Down-regulated in Transcription
  misc_feature: MA Experiment 20000144 PARAMETER Experiment Name: At_42deg_Heat_cDNA_P Parameter: Temperature (deg C) Value: 42 vs. 22
  misc_feature: MA Experiment 20000144 PARAMETER Experiment Name: At_42deg_Heat_cDNA_P Parameter: Timepoint (hr) Value: 1
  misc_feature: MA Experiment 20000144 PARAMETER Experiment Name: At_42deg_Heat_cDNA_P Parameter: Tissue Value: Aerial
  misc_feature: MA Experiment ID: 20000180 Result: Up-regulated in Transcription
  misc_feature: MA Experiment 20000180 PARAMETER Experiment Name: At_Germinating_Seeds_P Parameter: Age (hr) Value: 24 vs. 0
  misc_feature: MA Experiment 20000180 PARAMETER Experiment Name: At_Germinating_Seeds_P Parameter: Tissue Value: Germinating Seeds
tagggaaaaactttttagggaaaaactttttaggtccaaagatcgagagagaagagaagattttgaattttttttgttttataaagtttcgtcttaagcgatcgattttttgtgcgaaagattgaaactttttggtaagataattgtgttgtgtggttggatcgtggaggtgggtcttctttcgaatggcgcaacaagggcagggaagcatggaccctgccgctctcgatgatatcattcgtcgtttgttggattacagaaaccctaagcctggtaccaaacaggctatgctcaacgagtctgagatccgtcagctttgcatcgtctctagagagatttttcttcaacagcctaaccttcttgagctcgaagctcctatcaagatctgcggtgatattcatggacaatactcagatctattgaggctgtttgagtatggaggcttcccacctacagctaactatttattcttaggagattacgtagacaggggcaagcagagtttggagactatttgtcttctgcttgcttacaaaatcaaataccctgagaacttttttcttctaagaggaaaccacgaatgtgcttctattaacagaatctatggattctatgatgaatgtaaacgtcgattcagtgtgagactctggaaagtgtttacagattcttttaactgtctccctgttgctgctgttatagacgataagatattatgtatgcacggtggcctttctcccgatttgaccaacgtggaacagattaagaacattaagcgacctactgatgttcctgactctggtttgctctgtgatctgctttggtctgatccaagcaaagatgtcaaaggttgggggatgaatgaccgtggagtctcttacacgtttggccctgacaaagtcgcggagtttctaataaagaatgatatggatctcatctgccgtgcccaccaggttgtagaggatggatatgagtttttcgccgatagacagcttgttacgatattttctgctcccaactactgtggtgaatttgacaatgctggtgctatgatgagtgttgatgaaagtttaatgtgctctttccaaattcttaagcctgctgatcgaaagccccggttcttatgaagtaaagagttgaaacctcgcgggaaagaagaggaaaaaggcgatacgaaagcgggagagacatttgaagctccctgagactttgtccggaggccttgcaaaggcaaaaaaacataatttacatgttatattatcttatttgaactcttgccatttcttttctcaaaacactttatgttcttatgatcttctcctctgactctatatagacagtaaaaaaagtctgcaaattttcattctttttcaacaaccaatttcctcagtgtacatactaaattgttctgtatccatacacacatatacttggg

SEQ ID NO: 99070 - protein, 312 aa, Arabidopsis thaliana; identical to SEQ ID NO: 27497
  peptide (1)..(312): Ceres Seq. ID no. 13602109
  misc_feature (63)..(258): Pfam Name: Calcineurin-like phosphoesterase Pfam Description: Calcineurin-like phosphoesterase
  misc_feature (1)..(312): Homolog of NCBI NO: 15237829 NR Description: protein phosphatase 1A [Arabidopsis thaliana] protein phosphatase 1A [Arabidopsis thaliana] Serine/threonine protein phosphatase PP1 isozyme 2
  misc_feature (1)..(312): Homolog of NCBI NO: 99751 NR Description: phosphoprotein phosphatase (EC 3.1.3.16) 1A
  misc_feature (1)..(311): Homolog of NCBI NO: 15232651 NR Description: phosphoprotein phosphatase 1, PP1 [Arabidopsis >gi|1346759|sp|P48485|PP15_ARATH Serine/threonine protein PP1 isozyme 5 >gi|421854|pir||S31089 phosphoprotein phosphatase
  misc_feature (9)..(311): Homolog of NCBI NO: 21592807 NR Description: phosphoprotein phosphatase [Arabidopsis thaliana]
  misc_feature (1)..(312): Homolog of NCBI NO: 5917726 NR Description: serine/threonine protein phosphatase 1; PP1
  misc_feature (1)..(312): Homolog of NCBI NO: 11133833 NR Description: Serine/threonine protein phosphatase PP1 isozyme 2
  misc_feature (3)..(312): Homolog of NCBI NO: 11133831 NR Description: Serine/threonine protein phosphatase PP1 isozyme 1
  misc_feature (7)..(312): Homolog of NCBI NO: 1346764 NR Description: SERINE/THREONINE PROTEIN PHOSPHATASE PP1
  misc_feature (4)..(312): Homolog of NCBI NO: 15225576 NR Description: phosphoprotein phosphatase type 1 catalytic [Arabidopsis thaliana] >gi|1346758|sp|P48484|PP14_ARATH protein phosphatase PP1 isozyme 4 >gi|421853|pir||S31088
  misc_feature (4)..(312): Homolog of NCBI NO: 7209508 NR Description: type 1 protein phosphatase-1 [Vicia faba]

SEQ ID NO: 99071 - protein, 304 aa, Arabidopsis thaliana; identical to SEQ ID NO: 27498
  peptide (1)..(304): Ceres Seq. ID no. 13602110
  misc_feature (55)..(250): Pfam Name: Calcineurin-like phosphoesterase Pfam Description: Calcineurin-like phosphoesterase
  misc_feature (1)..(304): Homolog of NCBI NO: 15237829 NR Description: protein phosphatase 1A [Arabidopsis thaliana] protein phosphatase 1A [Arabidopsis thaliana] Serine/threonine protein phosphatase PP1 isozyme 2
  misc_feature (1)..(304): Homolog of NCBI NO: 99751 NR Description: phosphoprotein phosphatase (EC 3.1.3.16) 1A
  misc_feature (1)..(303): Homolog of NCBI NO: 15232651 NR Description: phosphoprotein phosphatase 1, PP1 [Arabidopsis >gi|1346759|sp|P48485|PP15_ARATH Serine/threonine protein PP1 isozyme 5 >gi|421854|pir||S31089 phosphoprotein phosphatase
  misc_feature (1)..(303): Homolog of NCBI NO: 21592807 NR Description: phosphoprotein phosphatase [Arabidopsis thaliana]
  misc_feature (1)..(304): Homolog of NCBI NO: 5917726 NR Description: serine/threonine protein phosphatase 1; PP1
  misc_feature (1)..(304): Homolog of NCBI NO: 11133833 NR Description: Serine/threonine protein phosphatase PP1 isozyme 2
  misc_feature (1)..(304): Homolog of NCBI NO: 11133831 NR Description: Serine/threonine protein phosphatase PP1 isozyme 1
  misc_feature (1)..(304): Homolog of NCBI NO: 1346764 NR Description: SERINE/THREONINE PROTEIN PHOSPHATASE PP1
  misc_feature (1)..(304): Homolog of NCBI NO: 15225576 NR Description: phosphoprotein phosphatase type 1 catalytic [Arabidopsis thaliana] >gi|1346758|sp|P48484|PP14_ARATH protein phosphatase PP1 isozyme 4 >gi|421853|pir||S31088
  misc_feature (1)..(304): Homolog of NCBI NO: 7209508 NR Description: type 1 protein phosphatase-1 [Vicia faba]

SEQ ID NO: 99072 - protein, 278 aa, Arabidopsis thaliana; identical to SEQ ID NO: 27499
  peptide (1)..(278): Ceres Seq. ID no. 13602111
  misc_feature (29)..(224): Pfam Name: Calcineurin-like phosphoesterase Pfam Description: Calcineurin-like phosphoesterase
  misc_feature (1)..(278): Homolog of NCBI NO: 15237829 NR Description: protein phosphatase 1A [Arabidopsis thaliana] protein phosphatase 1A [Arabidopsis thaliana] Serine/threonine protein phosphatase PP1 isozyme 2
  misc_feature (1)..(278): Homolog of NCBI NO: 99751 NR Description: phosphoprotein phosphatase (EC 3.1.3.16) 1A
  misc_feature (1)..(277): Homolog of NCBI NO: 15232651 NR Description: phosphoprotein phosphatase 1, PP1 [Arabidopsis >gi|1346759|sp|P48485|PP15_ARATH Serine/threonine protein PP1 isozyme 5 >gi|421854|pir||S31089 phosphoprotein phosphatase
  misc_feature (1)..(277): Homolog of NCBI NO: 21592807 NR Description: phosphoprotein phosphatase [Arabidopsis thaliana]
  misc_feature (1)..(278): Homolog of NCBI NO: 5917726 NR Description: serine/threonine protein phosphatase 1; PP1
  misc_feature (1)..(278): Homolog of NCBI NO: 11133833 NR Description: Serine/threonine protein phosphatase PP1 isozyme 2
  misc_feature (1)..(278): Homolog of NCBI NO: 11133831 NR Description: Serine/threonine protein phosphatase PP1 isozyme 1
  misc_feature (1)..(278): Homolog of NCBI NO: 1346764 NR Description: SERINE/THREONINE PROTEIN PHOSPHATASE PP1
  misc_feature (1)..(278): Homolog of NCBI NO: 15225576 NR Description: phosphoprotein phosphatase type 1 catalytic [Arabidopsis thaliana] >gi|1346758|sp|P48484|PP14_ARATH protein phosphatase PP1 isozyme 4 >gi|421853|pir||S31088
  misc_feature (1)..(278): Homolog of NCBI NO: 7209508 NR Description: type 1 protein phosphatase-1 [Vicia faba]

SEQ ID NO: 99073 - DNA, 820 bp, Arabidopsis thaliana
  misc_feature (1)..(820): Ceres Seq. ID no. 13602112
  misc_feature: MA Experiment ID: 20000180 Result: Down-regulated in Transcription
  misc_feature: MA Experiment 20000180 PARAMETER Experiment Name: At_Germinating_Seeds_P Parameter: Age (hr) Value: 24 vs. 0
  misc_feature: MA Experiment 20000180 PARAMETER Experiment Name: At_Germinating_Seeds_P Parameter: Tissue Value: Germinating Seeds
  misc_feature: MA Experiment ID: 20000184 Result: Down-regulated in Transcription
  misc_feature: MA Experiment 20000184 PARAMETER Experiment Name: At_Shoots__P Parameter: Age (day) Value: 7
  misc_feature: MA Experiment 20000184 PARAMETER Experiment Name: At_Shoots__P Parameter: Tissue Value: Shoots vs. Whole Plant
  misc_feature: MA Experiment ID: 20000264 Result: Up-regulated in Transcription
  misc_feature: MA Experiment 20000264 PARAMETER Experiment Name: At_Open_Flower_P Parameter: Age (day) Value: 21
  misc_feature: MA Experiment 20000264 PARAMETER Experiment Name: At_Open_Flower_P Parameter: Plant Line Value: WS
  misc_feature: MA Experiment 20000264 PARAMETER Experiment Name: At_Open_Flower_P Parameter: Tissue Value: Open Flower vs. Whole Plant
  misc_feature: MA Experiment ID: 20000574 Result: Up-regulated in Transcription
  misc_feature: MA Experiment 20000574 PARAMETER Experiment Name: At_100uM_ABA_Mutants__P Parameter: Organism Value: A. thaliana
  misc_feature: MA Experiment 20000574 PARAMETER Experiment Name: At_100uM_ABA_Mutants__P Parameter: Plant Line Value: CS23 vs. Ler wt
  misc_feature: MA Experiment 20000574 PARAMETER Experiment Name: At_100uM_ABA_Mutants__P Parameter: Timepoint (hr) Value: N/A
  misc_feature: MA Experiment 20000574 PARAMETER Experiment Name: At_100uM_ABA_Mutants__P Parameter: Tissue Value: Whole Plant
  misc_feature: MA Experiment 20000574 PARAMETER Experiment Name: At_100uM_ABA_Mutants__P Parameter: Treatment Value: None
  misc_feature: MA Experiment ID: 20001248 Result: Down-regulated in Transcription
  misc_feature: MA Experiment 20001248 PARAMETER Experiment Name: At_Far-red-induction_P Parameter: Age (day) Value: 7
  misc_feature: MA Experiment 20001248 PARAMETER Experiment Name: At_Far-red-induction_P Parameter: Light Value: Far-red vs. White
  misc_feature: MA Experiment 20001248 PARAMETER Experiment Name: At_Far-red-induction_P Parameter: Organism Value: A. thaliana
  misc_feature: MA Experiment 20001248 PARAMETER Experiment Name: At_Far-red-induction_P Parameter: Plant Line Value: Columbia
  misc_feature: MA Experiment 20001248 PARAMETER Experiment Name: At_Far-red-induction_P Parameter: Timepoint (hr) Value: 4
  misc_feature: MA Experiment 20001248 PARAMETER Experiment Name: At_Far-red-induction_P Parameter: Tissue Value: Whole Plant
  misc_feature: MA Experiment ID: 20001450 Result: Down-regulated in Transcription
  misc_feature: MA Experiment 20001450 PARAMETER Experiment Name: At_Far-red-induction_P Parameter: Age (day) Value: 7
  misc_feature: MA Experiment 20001450 PARAMETER Experiment Name: At_Far-red-induction_P Parameter: Light Value: Far-red vs. White
  misc_feature: MA Experiment 20001450 PARAMETER Experiment Name: At_Far-red-induction_P Parameter: Organism Value: A. thaliana
  misc_feature: MA Experiment 20001450 PARAMETER Experiment Name: At_Far-red-induction_P Parameter: Plant Line Value: Columbia
  misc_feature: MA Experiment 20001450 PARAMETER Experiment Name: At_Far-red-induction_P Parameter: Timepoint (hr) Value: 8
  misc_feature: MA Experiment 20001450 PARAMETER Experiment Name: At_Far-red-induction_P Parameter: Tissue Value: Whole Plant
aaaacataatttgctctcaataagacattaacaaagtcccagaggcagagagagagaatcagagagagagaagtcgagatgtttttccacatagtattggagcggaacatgcagttgcatcctcgtttctttggtcgtaacctaaaagaaaacctcgtatctaagctcatgaaagatgtcgaaggcacttgcagtggccgacatggatttgtagtggcgataactggaatagatacaataggaaagggtttgatcagagatgggactggttttgtcacctttccagttaaataccaatgcgtcgttttcagacctttcaaaggcgagattttggaagctgttgtcactttggtcaataagatgggattcttcgctgaagctggccctgttcagatttttgtgtctaagcatttgattccagatgatatggagtttcaagctggagacatgcctaactataccacatcagatggatcagttaagatccagaaggagtgtgaagtgagactaaagattattggaacaagagttgatgccactgcgattttttgtgtgggtaccatcaaagacgattttttgggagtcataaacgaccctgcagcggcataaaaagtttcaagcagatttcaattttggtcttctttctttcacagagaatgctgtcttgtgataaagttgtattatagttgaagttttggatctatttaatccgaaagattggaaccacgcttgttggatttaacttatatgcaagtttagtgaacttcgtatttgatcaaaactgttgtcattttgagaacaatatagtaccgagtagtgg

SEQ ID NO: 99074 - protein, 176 aa, Arabidopsis thaliana; identical to SEQ ID NO: 37236
  peptide (1)..(176): Ceres Seq. ID no. 13602113
  misc_feature (78)..(160): Pfam Name: S1 RNA binding domain Pfam Description: S1 RNA binding domain
  misc_feature (1)..(176): Homolog of NCBI NO: 15237831 NR Description: RNA polymerase II [Arabidopsis thaliana]
  misc_feature (1)..(174): Homolog of NCBI NO: 1173137 NR Description: DNA-DIRECTED RNA POLYMERASE II 19 KD POLYPEPTIDE POLYMERASE II SUBUNIT 5) >gi|322700|pir||B44457 RNA polymerase II
  misc_feature (1)..(172): Homolog of NCBI NO: 24647020 NR Description: CG31155-PA [Drosophila melanogaster]
  misc_feature (1)..(169): Homolog of NCBI NO: 39595528 NR Description: Hypothetical protein CBG04195 [Caenorhabditis
  misc_feature (1)..(171): Homolog of NCBI NO: 4505947 NR Description: DNA directed RNA polymerase II polypeptide G; DNA RNA polymerase II 19 kda polypeptide [Homo sapiens] polymerase (RNA) II (DNA directed) polypeptide G [Mus musculus]
  misc_feature (1)..(169): Homolog of NCBI NO: 17510349 NR Description: RNA polymerase Rpb7, N-terminal domain and S1 RNA domain containing protein [Caenorhabditis elegans]
  misc_feature (1)..(171): Homolog of NCBI NO: 28278826 NR Description: Unknown (protein for MGC:55297) [Danio rerio]
  misc_feature (1)..(170): Homolog of NCBI NO: 31241005 NR Description: ENSANGP00000017695 [Anopheles gambiae]
  misc_feature (2)..(170): Homolog of NCBI NO: 19114885 NR Description: RNA polymerase II subunit rpb7
  misc_feature (1)..(168): Homolog of NCBI NO: 12655858 NR Description: RNA polymerase II subunit 7 [Candida albicans]

SEQ ID NO: 99075 - protein, 166 aa, Arabidopsis thaliana; identical to SEQ ID NO: 37237
  peptide (1)..(166): Ceres Seq. ID no. 13602114
  misc_feature (68)..(150): Pfam Name: S1 RNA binding domain Pfam Description: S1 RNA binding domain
  misc_feature (1)..(166): Homolog of NCBI NO: 15237831 NR Description: RNA polymerase II [Arabidopsis thaliana]
  misc_feature (1)..(164): Homolog of NCBI NO: 1173137 NR Description: DNA-DIRECTED RNA POLYMERASE II 19 KD POLYPEPTIDE POLYMERASE II SUBUNIT 5) >gi|322700|pir||B44457 RNA polymerase II
  misc_feature (1)..(162): Homolog of NCBI NO: 24647020 NR Description: CG31155-PA [Drosophila melanogaster]
  misc_feature (1)..(159): Homolog of NCBI NO: 39595528 NR Description: Hypothetical protein CBG04195 [Caenorhabditis
  misc_feature (1)..(161): Homolog of NCBI NO: 4505947 NR Description: DNA directed RNA polymerase II polypeptide G; DNA RNA polymerase II 19 kda polypeptide [Homo sapiens] polymerase (RNA) II (DNA directed) polypeptide G [Mus musculus]
  misc_feature (1)..(159): Homolog of NCBI NO: 17510349 NR Description: RNA polymerase Rpb7, N-terminal domain and S1 RNA domain containing protein [Caenorhabditis elegans]
  misc_feature (1)..(161): Homolog of NCBI NO: 28278826 NR Description: Unknown (protein for MGC:55297) [Danio rerio]
  misc_feature (1)..(160): Homolog of NCBI NO: 31241005 NR Description: ENSANGP00000017695 [Anopheles gambiae]
  misc_feature (1)..(160): Homolog of NCBI NO: 19114885 NR Description: RNA polymerase II subunit rpb7
  misc_feature (1)..(158): Homolog of NCBI NO: 12655858 NR Description: RNA polymerase II subunit 7 [Candida albicans]

SEQ ID NO: 99076 - protein, 146 aa, Arabidopsis thaliana; identical to SEQ ID NO: 37238
  peptide (1)..(146): Ceres Seq. ID no. 13602115
  misc_feature (48)..(130): Pfam Name: S1 RNA binding domain Pfam Description: S1 RNA binding domain
  misc_feature (1)..(146): Homolog of NCBI NO: 15237831 NR Description: RNA polymerase II [Arabidopsis thaliana]
  misc_feature (1)..(144): Homolog of NCBI NO: 1173137 NR Description: DNA-DIRECTED RNA POLYMERASE II 19 KD POLYPEPTIDE POLYMERASE II SUBUNIT 5) >gi|322700|pir||B44457 RNA polymerase II
  misc_feature (1)..(142): Homolog of NCBI NO: 24647020 NR Description: CG31155-PA [Drosophila melanogaster]
  misc_feature (1)..(139): Homolog of NCBI NO: 39595528 NR Description: Hypothetical protein CBG04195 [Caenorhabditis
  misc_feature (1)..(141): Homolog of NCBI NO: 4505947 NR Description: DNA directed RNA polymerase II polypeptide G; DNA RNA polymerase II 19 kda polypeptide [Homo sapiens] polymerase (RNA) II (DNA directed) polypeptide G [Mus musculus]
  misc_feature (1)..(141): Homolog of NCBI NO: 28278826 NR Description: Unknown (protein for MGC:55297) [Danio rerio]
  misc_feature (1)..(139): Homolog of NCBI NO: 17510349 NR Description: RNA polymerase Rpb7, N-terminal domain and S1 RNA domain containing protein [Caenorhabditis elegans]
  misc_feature (1)..(140): Homolog of NCBI NO: 31241005 NR Description: ENSANGP00000017695 [Anopheles gambiae]
  misc_feature (1)..(140): Homolog of NCBI NO: 19114885 NR Description: RNA polymerase II subunit rpb7
  misc_feature (1)..(138): Homolog of NCBI NO: 12655858 NR Description: RNA polymerase II subunit 7 [Candida albicans]

SEQ ID NO: 99077 - DNA, 1340 bp, Arabidopsis thaliana
  misc_feature (1)..(1340): Ceres Seq. ID no. 13602116
  misc_feature: MA Experiment ID: 108469 Result: Down-regulated in Transcription
  misc_feature: MA Experiment ID: 108488 Result: Up-regulated in Transcription
  misc_feature: MA Experiment ID: 108573 Result: Down-regulated in Transcription
  misc_feature: MA Experiment 108573 PARAMETER Experiment Name: At_Drought_cDNA_P Parameter: Timepoint (hr) Value: 6
  misc_feature: MA Experiment 108573 PARAMETER Experiment Name: At_Drought_cDNA_P Parameter: Tissue Value: Aerial
  misc_feature: MA Experiment 108573 PARAMETER Experiment Name: At_Drought_cDNA_P Parameter: Treatment Value: Drought vs. No Drought
  misc_feature: MA Experiment ID: 108577 Result: Down-regulated in Transcription
  misc_feature: MA Experiment 108577 PARAMETER Experiment Name: At_42deg_Heat_cDNA_P Parameter: Temperature (deg C) Value: 42 vs. 22
  misc_feature: MA Experiment 108577 PARAMETER Experiment Name: At_42deg_Heat_cDNA_P Parameter: Timepoint (hr) Value: 6
  misc_feature: MA Experiment 108577 PARAMETER Experiment Name: At_42deg_Heat_cDNA_P Parameter: Tissue Value: Aerial
  misc_feature: MA Experiment ID: 20000093 Result: Down-regulated in Transcription
  misc_feature: MA Experiment 20000093 PARAMETER Experiment Name: At_42deg_Heat_cDNA_P Parameter: Temperature (deg C) Value: 42 vs. 22
  misc_feature: MA Experiment 20000093 PARAMETER Experiment Name: At_42deg_Heat_cDNA_P Parameter: Timepoint (hr) Value: 0.5
  misc_feature: MA Experiment 20000093 PARAMETER Experiment Name: At_42deg_Heat_cDNA_P Parameter: Tissue Value: Aerial
  misc_feature: MA Experiment ID: 20000111 Result: Down-regulated in Transcription
  misc_feature: MA Experiment 20000111 PARAMETER Experiment Name: At_42deg_Heat_cDNA_P Parameter: Temperature (deg C) Value: 42 vs. 22
  misc_feature: MA Experiment 20000111 PARAMETER Experiment Name: At_42deg_Heat_cDNA_P Parameter: Timepoint (hr) Value: 6
  misc_feature: MA Experiment 20000111 PARAMETER Experiment Name: At_42deg_Heat_cDNA_P Parameter: Tissue Value: Aerial
  misc_feature: MA Experiment ID: 20000112 Result: Down-regulated in Transcription
  misc_feature: MA Experiment 20000112 PARAMETER Experiment Name: At_42deg_Heat_cDNA_P Parameter: Temperature (deg C) Value: 42 vs. 22
  misc_feature: MA Experiment 20000112 PARAMETER Experiment Name: At_42deg_Heat_cDNA_P Parameter: Timepoint (hr) Value: 2
  misc_feature: MA Experiment 20000112 PARAMETER Experiment Name: At_42deg_Heat_cDNA_P Parameter: Tissue Value: Aerial
  misc_feature: MA Experiment ID: 20000113 Result: Down-regulated in Transcription
  misc_feature: MA Experiment 20000113 PARAMETER Experiment Name: At_42deg_Heat_cDNA_P Parameter: Temperature (deg C) Value: 42 vs. 22
  misc_feature: MA Experiment 20000113 PARAMETER Experiment Name: At_42deg_Heat_cDNA_P Parameter: Timepoint (hr) Value: 8
  misc_feature: MA Experiment 20000113 PARAMETER Experiment Name: At_42deg_Heat_cDNA_P Parameter: Tissue Value: Aerial
  misc_feature: MA Experiment ID: 20000173 Result: Down-regulated in Transcription
  misc_feature: MA Experiment 20000173 PARAMETER Experiment Name: At_42deg_Heat_P Parameter: Age (day) Value: 14
  misc_feature: MA Experiment 20000173 PARAMETER Experiment Name: At_42deg_Heat_P Parameter: Organism Value: A. thaliana
  misc_feature: MA Experiment 20000173 PARAMETER Experiment Name: At_42deg_Heat_P Parameter: Plant Line Value: WS
  misc_feature: MA Experiment 20000173 PARAMETER Experiment Name: At_42deg_Heat_P Parameter: Temperature (deg C) Value: 42 vs. 22
  misc_feature: MA Experiment 20000173 PARAMETER Experiment Name: At_42deg_Heat_P Parameter: Timepoint (hr) Value: 6
  misc_feature: MA Experiment 20000173 PARAMETER Experiment Name: At_42deg_Heat_P Parameter: Tissue Value: Aerial
  misc_feature: MA Experiment ID: 20000224 Result: Up-regulated in Transcription
  misc_feature: MA Experiment ID: 20000573 Result: Down-regulated in Transcription
  misc_feature: MA Experiment 20000573 PARAMETER Experiment Name: At_100uM_ABA_Mutants__P Parameter: Organism Value: A. thaliana
  misc_feature: MA Experiment 20000573 PARAMETER Experiment Name: At_100uM_ABA_Mutants__P Parameter: Plant Line Value: CS22 vs. Ler wt
  misc_feature: MA Experiment 20000573 PARAMETER Experiment Name: At_100uM_ABA_Mutants__P Parameter: Timepoint (hr) Value: N/A
  misc_feature: MA Experiment 20000573 PARAMETER Experiment Name: At_100uM_ABA_Mutants__P Parameter: Tissue Value: Whole Plant
  misc_feature: MA Experiment 20000573 PARAMETER Experiment Name: At_100uM_ABA_Mutants__P Parameter: Treatment Value: None
  misc_feature: MA Experiment ID: 20000794 Result: Up-regulated in Transcription
  misc_feature: MA Experiment 20000794 PARAMETER Experiment Name: At_Petals_P Parameter: Age (day) Value: 23-25 days
  misc_feature: MA Experiment 20000794 PARAMETER Experiment Name: At_Petals_P Parameter: Plant Line Value: WS
  misc_feature: MA Experiment 20000794 PARAMETER Experiment Name: At_Petals_P Parameter: Tissue Value: Petals vs. Whole plant
  misc_feature: MA Experiment ID: 20001248 Result: Down-regulated in Transcription
  misc_feature: MA Experiment 20001248 PARAMETER Experiment Name: At_Far-red-induction_P Parameter: Age (day) Value: 7
  misc_feature: MA Experiment 20001248 PARAMETER Experiment Name: At_Far-red-induction_P Parameter: Light Value: Far-red vs. White
  misc_feature: MA Experiment 20001248 PARAMETER Experiment Name: At_Far-red-induction_P Parameter: Organism Value: A. thaliana
  misc_feature: MA Experiment 20001248 PARAMETER Experiment Name: At_Far-red-induction_P Parameter: Plant Line Value: Columbia
  misc_feature: MA Experiment 20001248 PARAMETER Experiment Name: At_Far-red-induction_P Parameter: Timepoint (hr) Value: 4
  misc_feature: MA Experiment 20001248 PARAMETER Experiment Name: At_Far-red-induction_P Parameter: Tissue Value: Whole Plant
  misc_feature: MA Experiment ID: 20001911 Result: Down-regulated in Transcription
  misc_feature: MA Experiment 20001911 PARAMETER Experiment Name: At_Drought_Reproduction_P Parameter: Age (day) Value: 40
  misc_feature: MA Experiment 20001911 PARAMETER Experiment Name: At_Drought_Reproduction_P Parameter: Organism Value: A. thaliana
  misc_feature: MA Experiment 20001911 PARAMETER Experiment Name: At_Drought_Reproduction_P Parameter: Plant Line Value: WS
  misc_feature: MA Experiment 20001911 PARAMETER Experiment Name: At_Drought_Reproduction_P Parameter: Timepoint (day) Value: 10
  misc_feature: MA Experiment 20001911 PARAMETER Experiment Name: At_Drought_Reproduction_P Parameter: Tissue Value: Flowers
  misc_feature: MA Experiment 20001911 PARAMETER Experiment Name: At_Drought_Reproduction_P Parameter: Treatment Value: Drought vs. No Drought
gctgtgaaagagatcgttcttctctctgtttcacataaaaggaaaacataagaaaagaaaaaaaaaaatctttctctttcacaatcttaatttctgctcaccatcaaggcaagtttccttcttttgatcctcaacaatttccattgctactaaaaatatcttctttccaaaacaattcacgcatttacgtttttctcaatctttacatatatggtaaccaactcttattccattcctctgtaactcacacaaattcctgtccaaaaattagttttttcttttcatgtgatgtgagaatttgggttacgagaaagatgaagactattagtggattaggtattgggttaagtttaatgtttgggtttcttctattagcacttgttggagaagtctactatcttctaagatgtaagaagcacaagaagagagtcataagccaagagagtgaagaagagaaagaagaagaacaacaacaaaacggatacgctaaagaactaatccagctcttctgcttcaaaaaacctcaatctctgcagcaaaacaatggaggaagagaaggtgaagtctcaatgaatgaagatgggaatccagatttagaacttgggttgatgaaacacttgaatggaggagatctagggtttgaagcagagcttatgaagcttcataaccagaggtttctattcacaatcatggaagagacaaaagcagatttggaatctgaagatgggggtaaatcaagattaggttcaagatcaagaagaagaagcttgagtgatgttcctaatgactgtaatacccctggattcactccattggcttctcctaaaaagtcatcatctcctctggagtcttatccacaccatggattcaatcctctgtttgagtcagacggtgagcttgagtttaacaagtttttcaggtcctcttcttcacctccaccgaagtttaagttcatgagagatgctgaagagaagctaaggaagagattgattgaagaagccaaaagaagagaactctcgattgtaacagaaggttcgtttctcaagtttatgaatcctgcgatgaacagagagaagaaacagagtattcaagaatgtgatgaaacggtgtcgttttctccttcttcttcctcatcaggtacaacaattacaaatcttagaacgttagtggttgtttagtattagcatctctgtggctttactcttttaatttttatttttggttgaatttttgtttccaaaaatttcaattatattgtgtgaaaattctatctttcctttctctcattcttgttatttaggaatgatttcttctgtacgtatcaatctgaaattttttgc

SEQ ID NO: 99078 - protein, 287 aa, Arabidopsis thaliana; identical to SEQ ID NO: 42567
  peptide (1)..(287): Ceres Seq. ID no. 13602117
  misc_feature (1)..(287): Homolog of NCBI NO: 15238384 NR Description: expressed protein [Arabidopsis thaliana] gene_id:F2O15.1~unknown protein [Arabidopsis thaliana] unknown protein [Arabidopsis thaliana]
  misc_feature (1)..(287): Homolog of NCBI NO: 21553514 NR Description: unknown [Arabidopsis thaliana]
  misc_feature (1)..(228): Homolog of NCBI NO: 15225496 NR Description: expressed protein [Arabidopsis thaliana]

SEQ ID NO: 99079 - protein, 274 aa, Arabidopsis thaliana; identical to SEQ ID NO: 42568
  peptide (1)..(274): Ceres Seq. ID no. 13602118
  misc_feature (1)..(274): Homolog of NCBI NO: 15238384 NR Description: expressed protein [Arabidopsis thaliana] gene_id:F2O15.1~unknown protein [Arabidopsis thaliana] unknown protein [Arabidopsis thaliana]
  misc_feature (1)..(274): Homolog of NCBI NO: 21553514 NR Description: unknown [Arabidopsis thaliana]
  misc_feature (1)..(215): Homolog of NCBI NO: 15225496 NR Description: expressed protein [Arabidopsis thaliana]

SEQ ID NO: 99080 - protein, 202 aa, Arabidopsis thaliana; identical to SEQ ID NO: 42569
  peptide (1)..(202): Ceres Seq. ID no. 13602119
  misc_feature (1)..(202): Homolog of NCBI NO: 15238384 NR Description: expressed protein [Arabidopsis thaliana] gene_id:F2O15.1~unknown protein [Arabidopsis thaliana] unknown protein [Arabidopsis thaliana]
  misc_feature (1)..(202): Homolog of NCBI NO: 21553514 NR Description: unknown [Arabidopsis thaliana]
  misc_feature (1)..(143): Homolog of NCBI NO: 15225496 NR Description: expressed protein [Arabidopsis thaliana]

SEQ ID NO: 99081 - DNA, 1724 bp, Arabidopsis thaliana
  misc_feature (1)..(1724): Ceres Seq. ID no. 13602132
  misc_feature: MA Experiment ID: 108434 Result: Down-regulated in Transcription
  misc_feature: MA Experiment 108434 PARAMETER Experiment Name: At_Root_Tips_cDNA_P Parameter: Tissue Value: Root Tips
  misc_feature: MA Experiment ID: 108573 Result: Up-regulated in Transcription
  misc_feature: MA Experiment 108573 PARAMETER Experiment Name: At_Drought_cDNA_P Parameter: Timepoint (hr) Value: 6
  misc_feature: MA Experiment 108573 PARAMETER Experiment Name: At_Drought_cDNA_P Parameter: Tissue Value: Aerial
  misc_feature: MA Experiment 108573 PARAMETER Experiment Name: At_Drought_cDNA_P Parameter: Treatment Value: Drought vs. No Drought
  misc_feature: MA Experiment ID: 108577 Result: Up-regulated in Transcription
  misc_feature: MA Experiment 108577 PARAMETER Experiment Name: At_42deg_Heat_cDNA_P Parameter: Temperature (deg C) Value: 42 vs. 22
  misc_feature: MA Experiment 108577 PARAMETER Experiment Name: At_42deg_Heat_cDNA_P Parameter: Timepoint (hr) Value: 6
  misc_feature: MA Experiment 108577 PARAMETER Experiment Name: At_42deg_Heat_cDNA_P Parameter: Tissue Value: Aerial
  misc_feature: MA Experiment ID: 108585 Result: Up-regulated in Transcription
  misc_feature: MA Experiment 108585 PARAMETER Experiment Name: At_5mM_NaNP_cDNA_P Parameter: Timepoint (hr) Value: 6
  misc_feature: MA Experiment 108585 PARAMETER Experiment Name: At_5mM_NaNP_cDNA_P Parameter: Tissue Value: Aerial
  misc_feature: MA Experiment 108585 PARAMETER Experiment Name: At_5mM_NaNP_cDNA_P Parameter: Treatment Value: null
  misc_feature: MA Experiment ID: 20000093 Result: Up-regulated in Transcription
  misc_feature: MA Experiment 20000093 PARAMETER Experiment Name: At_42deg_Heat_cDNA_P Parameter: Temperature (deg C) Value: 42 vs. 22
  misc_feature: MA Experiment 20000093 PARAMETER Experiment Name: At_42deg_Heat_cDNA_P Parameter: Timepoint (hr) Value: 0.5
  misc_feature: MA Experiment 20000093 PARAMETER Experiment Name: At_42deg_Heat_cDNA_P Parameter: Tissue Value: Aerial
  misc_feature: MA Experiment ID: 20000112 Result: Up-regulated in Transcription
  misc_feature: MA Experiment 20000112 PARAMETER Experiment Name: At_42deg_Heat_cDNA_P Parameter: Temperature (deg C) Value: 42 vs. 22
  misc_feature: MA Experiment 20000112 PARAMETER Experiment Name: At_42deg_Heat_cDNA_P Parameter: Timepoint (hr) Value: 2
  misc_feature: MA Experiment 20000112 PARAMETER Experiment Name: At_42deg_Heat_cDNA_P Parameter: Tissue Value: Aerial
  misc_feature: MA Experiment ID: 20000794 Result: Up-regulated in Transcription
  misc_feature: MA Experiment 20000794 PARAMETER Experiment Name: At_Petals_P Parameter: Age (day) Value: 23-25 days
  misc_feature: MA Experiment 20000794 PARAMETER Experiment Name: At_Petals_P Parameter: Plant Line Value: WS
  misc_feature: MA Experiment 20000794 PARAMETER Experiment Name: At_Petals_P Parameter: Tissue Value: Petals vs. Whole plant
  misc_feature: MA Experiment ID: 20001560 Result: Down-regulated in Transcription
  misc_feature: MA Experiment 20001560 PARAMETER Experiment Name: At_Drought_Soil_Dry_P Parameter: Age (day) Value: 28
  misc_feature: MA Experiment 20001560 PARAMETER Experiment Name: At_Drought_Soil_Dry_P Parameter: Organism Value: A. thaliana
  misc_feature: MA Experiment 20001560 PARAMETER Experiment Name: At_Drought_Soil_Dry_P Parameter: Plant Line Value: WS
  misc_feature: MA Experiment 20001560 PARAMETER Experiment Name: At_Drought_Soil_Dry_P Parameter: Post Timepoint (hr) Value: None
  misc_feature: MA Experiment 20001560 PARAMETER Experiment Name: At_Drought_Soil_Dry_P Parameter: Post-Treatment Value: None
  misc_feature: MA Experiment 20001560 PARAMETER Experiment Name: At_Drought_Soil_Dry_P Parameter: Timepoint (day) Value: 14
  misc_feature: MA Experiment 20001560 PARAMETER Experiment Name: At_Drought_Soil_Dry_P Parameter: Treatment Value: Drought vs. No Drought
  misc_feature: MA Experiment ID: 20001905 Result: Up-regulated in Transcription
  misc_feature: MA Experiment 20001905 PARAMETER Experiment Name: At_Drought_Reproduction_P Parameter: Age (day) Value: 40
  misc_feature: MA Experiment 20001905 PARAMETER Experiment Name: At_Drought_Reproduction_P Parameter: Organism Value: A. thaliana
  misc_feature: MA Experiment 20001905 PARAMETER Experiment Name: At_Drought_Reproduction_P Parameter: Plant Line Value: WS
  misc_feature: MA Experiment 20001905 PARAMETER Experiment Name: At_Drought_Reproduction_P Parameter: Timepoint (day) Value: 10
  misc_feature: MA Experiment 20001905 PARAMETER Experiment Name: At_Drought_Reproduction_P Parameter: Tissue Value: Rosettes
  misc_feature: MA Experiment 20001905 PARAMETER Experiment Name: At_Drought_Reproduction_P Parameter: Treatment Value: Drought vs. No Drought
tttttagtctccctccgcgtagaagcttctccgagacttgtctctgctttgattgaagaagacgcttgatcgaaaattcccttagatttcgtaaatagggttttacagaaggtgagattacacagagatcggatttgcgaaaaaaaaaaatgggaagtccaaagaagaacgagaacaaaggcttcttcgccgccatgacttctggcttctccatgttcggtaccgccgtgtcgagatccgttaacggcgtgcaaggtaatgaaggagttgaggtcataaatccagaaggtggcaaggaagatgctgaagaggaagctcagaaaggaaggtggaaggacgaggaacgagatagttactggaagatgatgcagaaatatataggttcggatattacgtcaatggtgactcttcctgttgttatatttgagcctatgactatgctccagaagatggctgagataatggagtattctcatttgttggatcaagcagatgaatgcgaagatccatacttgcgtttagtatatgcttcatcatgggctatatctgtttactatgccttccaacgaacttggaagcctttcaatcctattcttggggagacatatgagatggtcaaccatggtgggatttcttttatttctgagcaggttagccatcatccaccaatgagtgctggtcatgccgagaacgagcacttcatttacgacatcacatcaaagttgaaaactaaacttttgggtaactctgttgatgtttaccctgtgggaagaacgcgtgtaaccctcaagaaagatggtgtggttctggatttggtgccgcctctcactaagattcacaatctaatatttggacgaacctgggttgactcacctggggaaatggtcatgacaaatttaaccactggagacaaagttgtgctttatttccagccatgtggctggttcggttctggccgctatgaagttgatggctacgtttacagcgcagctgaagaaccgaaaatcatgatgacaggaaaatggaatgagaaaatgagctaccaaccttgtgatgccgaaggggaaccccttccaggaacagagctgaaagaggtgtggcatttggctgatgtccccaaaaacgacaactttcagtacactcactttgctcacaagataaacagcttcgacacagcgcctgctaagctcttggcttcagactcacgtatccgtcctgatagatattcccttgagcagggtgacctttctaaagctggttccgagaaacacagccttgaggagagacaaagggccgaaaagaggaccagagagacaaagggacaaaagttcactccaagatggttcgatctaacggatgagatcacacctactccatggggagatattgaagtataccaatacaacgggaagtacaatgaacaccgagacacggcagagagctcaagtagtgcctccaacgaaacggacctcaaatcgatcgagtttaatccttggcaatatggtaatatctcaaccgaatgaagtaactcttatagtttaatttgttatctctatatacgaatgctgtgattcatgttcacttgaaagtgagtcccatgttgtttttaactttgtttcagactgaaaaatctgattatgtagtttgagtgataaaacataagttttgtgtttctgtctcattgtatctttgttccatttcgatcaatagtaattatgtttgtt

SEQ ID NO: 99082 - protein, 457 aa, Arabidopsis thaliana; identical to SEQ ID NO: 21784
  peptide (1)..(457): Ceres Seq. ID no. 13602133
  misc_feature (37)..(428): Pfam Name: Oxysterol-binding protein Pfam Description: Oxysterol-binding protein
  misc_feature (1)..(457): Homolog of NCBI NO: 15238398 NR Description: oxysterol-binding protein - like [Arabidopsis
  misc_feature (1)..(457): Homolog of NCBI NO: 8885548 NR Description: oxysterol-binding protein [Arabidopsis thaliana]
  misc_feature (4)..(456): Homolog of NCBI NO: 15232633 NR Description: oxysterol-binding protein -related [Arabidopsis
  misc_feature (1)..(455): Homolog of NCBI NO: 15241681 NR Description: expressed protein [Arabidopsis thaliana]
  misc_feature (11)..(451): Homolog of NCBI NO: 38639323 NR Description: oxysterol-binding protein [Solanum tuberosum]
  misc_feature (77)..(294): Homolog of NCBI NO: 38639321 NR Description: putative oxysterol-binding protein [Solanum
  misc_feature (68)..(327): Homolog of NCBI NO: 27469640 NR Description: Similar to oxysterol binding protein-like 2
  misc_feature (308)..(399): Homolog of NCBI NO: 27469640 NR Description: Similar to oxysterol binding protein-like 2
  misc_feature (68)..(294): Homolog of NCBI NO: 17529997 NR Description: oxysterol-binding protein-like protein OSBPL1A
  misc_feature (282)..(422): Homolog of NCBI NO: 17529997 NR Description: oxysterol-binding protein-like protein OSBPL1A

SEQ ID NO: 99083 - protein, 442 aa, Arabidopsis thaliana; identical to SEQ ID NO: 21785
  peptide (1)..(442): Ceres Seq. ID no. 13602134
  misc_feature (22)..(413): Pfam Name: Oxysterol-binding protein Pfam Description: Oxysterol-binding protein
  misc_feature (1)..(442): Homolog of NCBI NO: 15238398 NR Description: oxysterol-binding protein - like [Arabidopsis
  misc_feature (1)..(442): Homolog of NCBI NO: 8885548 NR Description: oxysterol-binding protein [Arabidopsis thaliana]
  misc_feature (1)..(441): Homolog of NCBI NO: 15232633 NR Description: oxysterol-binding protein -related [Arabidopsis
  misc_feature (1)..(440): Homolog of NCBI NO: 15241681 NR Description: expressed protein [Arabidopsis thaliana]
  misc_feature (1)..(436): Homolog of NCBI NO: 38639323 NR Description: oxysterol-binding protein [Solanum tuberosum]
  misc_feature (62)..(279): Homolog of NCBI NO: 38639321 NR Description: putative oxysterol-binding protein [Solanum
  misc_feature (53)..(312): Homolog of NCBI NO: 27469640 NR Description: Similar to oxysterol binding protein-like 2
  misc_feature (293)..(384): Homolog of NCBI NO: 27469640 NR Description: Similar to oxysterol binding protein-like 2
  misc_feature (53)..(279): Homolog of NCBI NO: 17529997 NR Description: oxysterol-binding protein-like protein OSBPL1A
  misc_feature (267)..(407): Homolog of NCBI NO: 17529997 NR Description: oxysterol-binding protein-like protein OSBPL1A

SEQ ID NO: 99084 - protein, 436 aa, Arabidopsis thaliana; identical to SEQ ID NO: 21786
  peptide (1)..(436): Ceres Seq. ID no. 13602135
  misc_feature (16)..(407): Pfam Name: Oxysterol-binding protein Pfam Description: Oxysterol-binding protein
  misc_feature (1)..(436): Homolog of NCBI NO: 15238398 NR Description: oxysterol-binding protein - like [Arabidopsis
  misc_feature (1)..(436): Homolog of NCBI NO: 8885548 NR Description: oxysterol-binding protein [Arabidopsis thaliana]
  misc_feature (1)..(435): Homolog of NCBI NO: 15232633 NR Description: oxysterol-binding protein -related [Arabidopsis
  misc_feature (1)..(434): Homolog of NCBI NO: 15241681 NR Description: expressed protein [Arabidopsis thaliana]
  misc_feature (1)..(430): Homolog of NCBI NO: 38639323 NR Description: oxysterol-binding protein [Solanum tuberosum]
  misc_feature (56)..(273): Homolog of NCBI NO: 38639321 NR Description: putative oxysterol-binding protein [Solanum
  misc_feature (47)..(306): Homolog of NCBI NO: 27469640 NR Description: Similar to oxysterol binding protein-like 2
  misc_feature (287)..(378): Homolog of NCBI NO: 27469640 NR Description: Similar to oxysterol binding protein-like 2
  misc_feature (47)..(273): Homolog of NCBI NO: 17529997 NR Description: oxysterol-binding protein-like protein OSBPL1A
  misc_feature (261)..(401): Homolog of NCBI NO: 17529997 NR Description: oxysterol-binding protein-like protein OSBPL1A

SEQ ID NO: 99085 - DNA, 2234 bp, Arabidopsis thaliana
  misc_feature (1)..(2234): Ceres Seq. ID no. 13602136
  misc_feature: MA Experiment ID: 108595 Result: Up-regulated in Transcription
  misc_feature: MA Experiment 108595 PARAMETER Experiment Name: At_Ler-pi_Ovule_cDNA_P Parameter: Plant Line Value: null
  misc_feature: MA Experiment ID: 20000112 Result: Up-regulated in Transcription
  misc_feature: MA Experiment 20000112 PARAMETER Experiment Name: At_42deg_Heat_cDNA_P Parameter: Temperature (deg C) Value: 42 vs. 22
  misc_feature: MA Experiment 20000112 PARAMETER Experiment Name: At_42deg_Heat_cDNA_P Parameter: Timepoint (hr) Value: 2
  misc_feature: MA Experiment 20000112 PARAMETER Experiment Name: At_42deg_Heat_cDNA_P Parameter: Tissue Value: Aerial
  misc_feature: MA Experiment ID: 20000315 Result: Down-regulated in Transcription
  misc_feature: MA Experiment 20000315 PARAMETER Experiment Name: At_14day_Shoots-Roots_Sub_P Parameter: Age (day) Value: 14
  misc_feature: MA Experiment 20000315 PARAMETER Experiment Name: At_14day_Shoots-Roots_Sub_P Parameter: Organism Value: A. thaliana
  misc_feature: MA Experiment 20000315 PARAMETER Experiment Name: At_14day_Shoots-Roots_Sub_P Parameter: Plant Line Value: WS
  misc_feature: MA Experiment 20000315 PARAMETER Experiment Name: At_14day_Shoots-Roots_Sub_P Parameter: Tissue Value: Shoots vs. Whole Plant
  misc_feature: MA Experiment ID: 20000355 Result: Down-regulated in Transcription
  misc_feature: MA Experiment 20000355 PARAMETER Experiment Name: At_Siliques_Sub_P Parameter: Age (day) Value: 21
  misc_feature: MA Experiment 20000355 PARAMETER Experiment Name: At_Siliques_Sub_P Parameter: Organism Value: A. thaliana
  misc_feature: MA Experiment 20000355 PARAMETER Experiment Name: At_Siliques_Sub_P Parameter: Plant Line Value: WS
  misc_feature: MA Experiment 20000355 PARAMETER Experiment Name: At_Siliques_Sub_P Parameter: Tissue Value: Less Than 5mm Siliques vs. Whole Plant
atccactttttgtggctgcttactgttttcctcgaaagttccatttttttcttttgctctgcaaacgaaaaagaaccataaatttttctcatatttaaagctctctctttctctcacaactgtgttcacatgaactttctcaccgctttcttctcttcattgaacaaaaaaaaaagctcttaacttttttttcttctttaggtaaaatttgacaaaagctctcaactttcaaactctgtttcttcatcatcatcatcatcaccatggacgccctgcttcaagtttcagttgatgggtttagatttgagaacggatctggatcttgctgcaaacccagaaacaatctcgaatctgggaacaatctcttccctgatttccacgagtctcagaatcagtcttcaccaaacgattcacctccaacggtgtgtttggataactctcctgttctgaagtacatcaatgatatgttgatggacgaagaagacttcgtaggtatatctcgtgacgatttagctttacaagccgctgagagatccttctacgagataattcaacagcaatctccagaatctgatcagaacactagctcctcctccgatcaaaactccggtgaccaagatttctgttttcccagcacaacaacagattcatcagcgttggtttcgagcggagaatcacagagaaagtaccgtcatcggaatgatgaagaagatgatcttgagaacaatcggagaaacaaacaaccagcgatatttgtctcggagatggaagagttagcagtgaagttagaacatgtgttgttggtatgcaaaacgaaccaagaagaagaagaagaaagaacagtaataacgaaacagagtactccaaacagagcaggaagagcaaaaggttcatcgaacaaatcaaagacgcacaaaactaataccgttgatctacgaagtctcttgacgcaatgtgctcaagctgtagcgagctttgaccagagaagagctacagataaactcaaggagataagagcacactcttctagcaatggagatggaacacaaagactagctttttactttgcagaggcgcttgaggcacgtatcactggaaacatctcaccgcctgtttctaatccgtttccttcaagcacgacatcgatggtggacattttgaaagcgtacaagctgtttgttcatacttgtcccatctatgtaactgattacttcgctgcgaacaaatcgatttacgaacttgctatgaaagcaactaagcttcacatagttgattttggagttctctacggctttcaatggccttgtttgttacgagctctgtctaaacgaccgggcggaccaccaatgcttcgggtgactggaatcgagctgccacaagcgggttttcgtccttcagaccgcgttgaagagactggtcgaagactgaaaaggttctgcgatcagtttaatgttccttttgagttcaacttcatagccaaaaaatgggaaaccatcactcttgatgaacttatgatcaatccaggagagacaacggtcgtcaactgcattcatcggttacaatacactcctgatgaaactgtgtcattagactctccaagagacacggttctgaagctattcagagatatcaatcctgacctctttgtgtttgcagagattaacggaatgtacaactctcctttcttcatgacgaggttccgagaagcgctttttcattactcttcactctttgacatgtttgacaccacaatacacgcagaggatgagtacaaaaacaggtcactgttggagagagagttacttgtgagagacgcgatgagcgtgatttcctgcgagggtgcagagcggtttgcgaggcctgaaacctacaagcaatggcgagttaggattttgagagccgggtttaagccagcaactattagcaaacagatcatgaaggaggctaaggaaattgtgaggaaacgttaccatagagattttgtgatcgatagcgataacaattggatgcttcaaggatggaaaggaagagtcatctatgctttttcttgctggaaacctgctgagaagttcacaaacaataatttaaacatctgaaaaatgttacttctcaattacatcatttttgtttcccaatggttttgtagaatatgtttgatcccgtgagtggatgcaactcttttttcctgcaagtacatattgtattcaaatccttgtggaaatgataaattgttt

SEQ ID NO: 99086 - protein, 610 aa, Arabidopsis thaliana; identical to SEQ ID NO: 37968
  peptide (1)..(610): Ceres Seq. ID no. 13602137
  misc_feature (198)..(505): Pfam Name: GRAS family transcription factor Pfam Description: GRAS family transcription factor
  misc_feature (104)..(602): Homolog of NCBI NO: 15232593 NR Description: scarecrow transcription factor family
  misc_feature (104)..(602): Homolog of NCBI NO: 21593017 NR Description: scarecrow-like protein [Arabidopsis thaliana]
  misc_feature (136)..(599): Homolog of NCBI NO: 32813435 NR Description: SCARECROW-like protein [Lilium longiflorum]
  misc_feature (61)..(599): Homolog of NCBI NO: 38346720 NR Description: OSJNBa0086O06.18 [Oryza sativa (japonica
  misc_feature (145)..(602): Homolog of NCBI NO: 15224338 NR Description: scarecrow transcription factor family
  misc_feature (32)..(132): Homolog of NCBI NO: 15224338 NR Description: scarecrow transcription factor family
  misc_feature (141)..(600): Homolog of NCBI NO: 15222433 NR Description: scarecrow-like transcription factor 14 (SCL14)
  misc_feature (23)..(599): Homolog of NCBI NO: 34908186 NR Description: P0406G08.7 [Oryza sativa (japonica
  misc_feature (141)..(596): Homolog of NCBI NO: 8778540 NR Description: F22G5.9 [Arabidopsis thaliana]
  misc_feature (406)..(610): Homolog of NCBI NO: 11358823 NR Description: scarecrow-like protein 11 [imported] -

SEQ ID NO: 99087 - protein, 543 aa, Arabidopsis thaliana; identical to SEQ ID NO: 37969
  peptide (1)..(543): Ceres Seq. ID no. 13602138
  misc_feature (131)..(438): Pfam Name: GRAS family transcription factor Pfam Description: GRAS family transcription factor
  misc_feature (37)..(535): Homolog of NCBI NO: 15232593 NR Description: scarecrow transcription factor family
  misc_feature (37)..(535): Homolog of NCBI NO: 21593017 NR Description: scarecrow-like protein [Arabidopsis thaliana]
  misc_feature (69)..(532): Homolog of NCBI NO: 32813435 NR Description: SCARECROW-like protein [Lilium longiflorum]
  misc_feature (1)..(532): Homolog of NCBI NO: 38346720 NR Description: OSJNBa0086O06.18 [Oryza sativa (japonica
  misc_feature (78)..(535): Homolog of NCBI NO: 15224338 NR Description: scarecrow transcription factor family
  misc_feature (1)..(65): Homolog of NCBI NO: 15224338 NR Description: scarecrow transcription factor family
  misc_feature (74)..(533): Homolog of NCBI NO: 15222433 NR Description: scarecrow-like transcription factor 14 (SCL14)
  misc_feature (1)..(532): Homolog of NCBI NO: 34908186 NR Description: P0406G08.7 [Oryza sativa (japonica
  misc_feature (74)..(529): Homolog of NCBI NO: 8778540 NR Description: F22G5.9 [Arabidopsis thaliana]
  misc_feature (339)..(543): Homolog of NCBI NO: 11358823 NR Description: scarecrow-like protein 11 [imported] -

SEQ ID NO: 99088 - protein, 541 aa, Arabidopsis thaliana; identical to SEQ ID NO: 37970
  peptide (1)..(541): Ceres Seq. ID no. 13602139
  misc_feature (129)..(436): Pfam Name: GRAS family transcription factor Pfam Description: GRAS family transcription factor
  misc_feature (35)..(533): Homolog of NCBI NO: 15232593 NR Description: scarecrow transcription factor family
  misc_feature (35)..(533): Homolog of NCBI NO: 21593017 NR Description: scarecrow-like protein [Arabidopsis thaliana]
  misc_feature (67)..(530): Homolog of NCBI NO: 32813435 NR Description: SCARECROW-like protein [Lilium longiflorum]
  misc_feature (1)..(530): Homolog of NCBI NO: 38346720 NR Description: OSJNBa0086O06.18 [Oryza sativa (japonica
  misc_feature (76)..(533): Homolog of NCBI NO: 15224338 NR Description: scarecrow transcription factor family
  misc_feature (1)..(63): Homolog of NCBI NO: 15224338 NR Description: scarecrow transcription factor family
  misc_feature (72)..(531): Homolog of NCBI NO: 15222433 NR Description: scarecrow-like transcription factor 14 (SCL14)
  misc_feature (1)..(530): Homolog of NCBI NO: 34908186 NR Description: P0406G08.7 [Oryza sativa (japonica
  misc_feature (72)..(527): Homolog of NCBI NO: 8778540 NR Description: F22G5.9 [Arabidopsis thaliana]
  misc_feature (337)..(541): Homolog of NCBI NO: 11358823 NR Description: scarecrow-like protein 11 [imported] -

SEQ ID NO: 99089 - DNA, 1453 bp, Arabidopsis thaliana
  misc_feature (1)..(1453): Ceres Seq. ID no. 13602144
  misc_feature: MA Experiment ID: 20000171 Result: Down-regulated in Transcription
  misc_feature: MA Experiment 20000171 PARAMETER Experiment Name: At_42deg_Heat_P Parameter: Age (day) Value: 14
  misc_feature: MA Experiment 20000171 PARAMETER Experiment Name: At_42deg_Heat_P Parameter: Organism Value: A. thaliana
  misc_feature: MA Experiment 20000171 PARAMETER Experiment Name: At_42deg_Heat_P Parameter: Plant Line Value: WS
  misc_feature: MA Experiment 20000171 PARAMETER Experiment Name: At_42deg_Heat_P Parameter: Temperature (deg C) Value: 42 vs. 22
  misc_feature: MA Experiment 20000171 PARAMETER Experiment Name: At_42deg_Heat_P Parameter: Timepoint (hr) Value: 1
  misc_feature: MA Experiment 20000171 PARAMETER Experiment Name: At_42deg_Heat_P Parameter: Tissue Value: Aerial
  misc_feature: MA Experiment ID: 20000173 Result: Down-regulated in Transcription
  misc_feature: MA Experiment 20000173 PARAMETER Experiment Name: At_42deg_Heat_P Parameter: Age (day) Value: 14
  misc_feature: MA Experiment 20000173 PARAMETER Experiment Name: At_42deg_Heat_P Parameter: Organism Value: A. thaliana
  misc_feature: MA Experiment 20000173 PARAMETER Experiment Name: At_42deg_Heat_P Parameter: Plant Line Value: WS
  misc_feature: MA Experiment 20000173 PARAMETER Experiment Name: At_42deg_Heat_P Parameter: Temperature (deg C) Value: 42 vs. 22
  misc_feature: MA Experiment 20000173 PARAMETER Experiment Name: At_42deg_Heat_P Parameter: Timepoint (hr) Value: 6
  misc_feature: MA Experiment 20000173 PARAMETER Experiment Name: At_42deg_Heat_P Parameter: Tissue Value: Aerial
  misc_feature: MA Experiment ID: 20000185 Result: Down-regulated in Transcription
  misc_feature: MA Experiment 20000185 PARAMETER Experiment Name: At_Roots__P Parameter: Age (day) Value: 7 vs. 21
  misc_feature: MA Experiment 20000185 PARAMETER Experiment Name: At_Roots__P Parameter: Organism Value: A. thaliana
  misc_feature: MA Experiment 20000185 PARAMETER Experiment Name: At_Roots__P Parameter: Tissue Value: Roots vs. Whole Plant
  misc_feature: MA Experiment ID: 20000437 Result: Down-regulated in Transcription
  misc_feature: MA Experiment 20000437 PARAMETER Experiment Name: At_Drought_P Parameter: Age (day) Value: 8
  misc_feature: MA Experiment 20000437 PARAMETER Experiment Name: At_Drought_P Parameter: Organism Value: A. thaliana
  misc_feature: MA Experiment 20000437 PARAMETER Experiment Name: At_Drought_P Parameter: Plant Line Value: WS
  misc_feature: MA Experiment 20000437 PARAMETER Experiment Name: At_Drought_P Parameter: Timepoint (hr) Value: 24
  misc_feature: MA Experiment 20000437 PARAMETER Experiment Name: At_Drought_P Parameter: Tissue Value: Whole Plant
  misc_feature: MA Experiment 20000437 PARAMETER Experiment Name: At_Drought_P Parameter: Treatment Value: Drought vs. No Drought
  misc_feature: MA Experiment ID: 20001558 Result: Up-regulated in Transcription
  misc_feature: MA Experiment 20001558 PARAMETER Experiment Name: At_Drought_Soil_Dry_P Parameter: Age (day) Value: 27
  misc_feature: MA Experiment 20001558 PARAMETER Experiment Name: At_Drought_Soil_Dry_P Parameter: Organism Value: A. thaliana
  misc_feature: MA Experiment 20001558 PARAMETER Experiment Name: At_Drought_Soil_Dry_P Parameter: Plant Line Value: WS
  misc_feature: MA Experiment 20001558 PARAMETER Experiment Name: At_Drought_Soil_Dry_P Parameter: Post Timepoint (hr) Value: 6
  misc_feature: MA Experiment 20001558 PARAMETER Experiment Name: At_Drought_Soil_Dry_P Parameter: Post-Treatment Value: Re-Water vs. No Drought
  misc_feature: MA Experiment 20001558 PARAMETER Experiment Name: At_Drought_Soil_Dry_P Parameter: Timepoint (day) Value: 13
  misc_feature: MA Experiment 20001558 PARAMETER Experiment Name: At_Drought_Soil_Dry_P Parameter: Treatment Value: Drought vs. No Drought
  misc_feature: MA Experiment ID: 20001560 Result: Up-regulated in Transcription
  misc_feature: MA Experiment 20001560 PARAMETER Experiment Name: At_Drought_Soil_Dry_P Parameter: Age (day) Value: 28
  misc_feature: MA Experiment 20001560 PARAMETER Experiment Name: At_Drought_Soil_Dry_P Parameter: Organism Value: A. thaliana
  misc_feature: MA Experiment 20001560 PARAMETER Experiment Name: At_Drought_Soil_Dry_P Parameter: Plant Line Value: WS
  misc_feature: MA Experiment 20001560 PARAMETER Experiment Name: At_Drought_Soil_Dry_P Parameter: Post Timepoint (hr) Value: None
  misc_feature: MA Experiment 20001560 PARAMETER Experiment Name: At_Drought_Soil_Dry_P Parameter: Post-Treatment Value: None
  misc_feature: MA Experiment 20001560 PARAMETER Experiment Name: At_Drought_Soil_Dry_P Parameter: Timepoint (day) Value: 14
  misc_feature: MA Experiment 20001560 PARAMETER Experiment Name: At_Drought_Soil_Dry_P Parameter: Treatment Value: Drought vs. No Drought
  misc_feature: MA Experiment ID: 20001757 Result: Up-regulated in Transcription
  misc_feature: MA Experiment 20001757 PARAMETER Experiment Name: At_50mM_NH4NO3_L-to-H_P Parameter: Timepoint (hr) Value: 6
  misc_feature: MA Experiment 20001757 PARAMETER Experiment Name: At_50mM_NH4NO3_L-to-H_P Parameter: Tissue Value: Leaf
  misc_feature: MA Experiment 20001757 PARAMETER Experiment Name: At_50mM_NH4NO3_L-to-H_P Parameter: Treatment Value: 50mM NH4NO3 vs 100mM Mannitol
  misc_feature: MA Experiment ID: 20001911 Result: Down-regulated in Transcription
  misc_feature: MA Experiment 20001911 PARAMETER Experiment Name: At_Drought_Reproduction_P Parameter: Age (day) Value: 40
  misc_feature: MA Experiment 20001911 PARAMETER Experiment Name: At_Drought_Reproduction_P Parameter: Organism Value: A. thaliana
  misc_feature: MA Experiment 20001911 PARAMETER Experiment Name: At_Drought_Reproduction_P Parameter: Plant Line Value: WS
  misc_feature: MA Experiment 20001911 PARAMETER Experiment Name: At_Drought_Reproduction_P Parameter: Timepoint (day) Value: 10
  misc_feature: MA Experiment 20001911 PARAMETER Experiment Name: At_Drought_Reproduction_P Parameter: Tissue Value: Flowers
  misc_feature: MA Experiment 20001911 PARAMETER Experiment Name: At_Drought_Reproduction_P Parameter: Treatment Value: Drought vs. No Drought
atctgttttccagtttcgatttcgaatcaaatatgaagctgaaagagtttttctgaatctttgtctttgtatccgttatctgaattctattcgccatggaagctgtgcttctctgctcgaagcttgttcctagagcggcgtcgttggaagggaaccaaaagttttcgttcaggcatttgaacaaacaccttaagtgcaattcccttcgtgctgattccagagacactccgttgctccgaggttttgaagcgataaagagtccgtctatctggagttgtgcgccgttcccagtgagaaaaggttcatgggttccacccagatgctcgatttctagctcgactgtttccgattccgataaccctttccttagccaatttcgaaccttctcttttgggtcaatggtgaagaaagttcgtgagttgaaagtgaagcccatggatgttgtgaagttaactcttttgctatcgattttgactgtggctgcaaaaaagactttgactttggtcttggacccattcttctggatgtattttagctggacatggttgttctggccttggtttatcgctgtgggtcttgcgggttatggaatttactgtttccgtaagcattggcttggcgaagccaatgcctttgagcagcttggtattgtaacttcagtcttcacatggctaacacttgtgcctcctgcttatttcaatggttatcttgaaggctggccttatgtgttcttcttggcgtatcattacttctttttcttcaatgttagcgtgagaaaacgcctctatggagatttctatgctcgcactcatgatcccaaatgggatgtgaacacgcctctgtggtctcggattttgtttggtgttggcatcatggttggacattggcttgcagcttttgaagggcctgagcttcaccgattaccagggggttgggccaatgtagggatatggattttgattgtgattacaatgcttatgcattatgattcaacgctatatcttgctagatattctgaaaaggttgttgttccaacggctgttgtgcaatttggtccttatagatgggtcaggcatccgatatatgcttctacgatgcttcttttcgctgcatactgcactgctctgcgtgcgcctttgagtctgttgtttcttttagcggtttgtttggtttactacaacaagaaggcaaagatggaagaagaattgatggtggagagtttcggacaaagctattcggattatgctgataaggttaggcacaagttcattccttttgtttactagtagtggtatagaggaacctgtgttgtgtctaattttctggtatctatcagccaaagatgtatgaatgaagatgagttctcatttttattggaatgttaggcttgtgaaaaggatatgcttttatgctattcatggttctcttaaattctatttcaagttatttttcc

SEQ ID NO: 99090 - protein, 396 aa, Arabidopsis thaliana; identical to SEQ ID NO: 24664
  peptide (1)..(396): Ceres Seq. ID no. 13602145
  misc_feature (1)..(396): Homolog of NCBI NO: 15238431 NR Description: expressed protein [Arabidopsis thaliana] gene_id:F2O15.18~unknown protein [Arabidopsis thaliana]
  misc_feature (1)..(396): Homolog of NCBI NO: 21593420 NR Description: unknown [Arabidopsis thaliana]
  misc_feature (133)..(396): Homolog of NCBI NO: 19347912 NR Description: unknown protein [Arabidopsis thaliana]
  misc_feature (198)..(396): Homolog of NCBI NO: 15921450 NR Description: 199aa long conserved hypothetical protein tokodaii] >gi|15622236|dbj|BAB66228.1| 199aa long conserved
  misc_feature (211)..(396): Homolog of NCBI NO: 15896653 NR Description: Predicted protein-S-isoprenylcysteine

SEQ ID NO: 99091 - protein, 295 aa, Arabidopsis thaliana; identical to SEQ ID NO: 24665
  peptide (1)..(295): Ceres Seq. ID no. 13602146
  misc_feature (1)..(295): Homolog of NCBI NO: 15238431 NR Description: expressed protein [Arabidopsis thaliana] gene_id:F2O15.18~unknown protein [Arabidopsis thaliana]
  misc_feature (1)..(295): Homolog of NCBI NO: 21593420 NR Description: unknown [Arabidopsis thaliana]
  misc_feature (32)..(295): Homolog of NCBI NO: 19347912 NR Description: unknown protein [Arabidopsis thaliana]
  misc_feature (97)..(295): Homolog of NCBI NO: 15921450 NR Description: 199aa long conserved hypothetical protein tokodaii] >gi|15622236|dbj|BAB66228.1| 199aa long conserved
  misc_feature (110)..(295): Homolog of NCBI NO: 15896653 NR Description: Predicted protein-S-isoprenylcysteine

SEQ ID NO: 99092 - protein, 283 aa, Arabidopsis thaliana; identical to SEQ ID NO: 24666
  peptide (1)..(283): Ceres Seq. ID no. 13602147
  misc_feature (1)..(283): Homolog of NCBI NO: 15238431 NR Description: expressed protein [Arabidopsis thaliana] gene_id:F2O15.18~unknown protein [Arabidopsis thaliana]
  misc_feature (1)..(283): Homolog of NCBI NO: 21593420 NR Description: unknown [Arabidopsis thaliana]
  misc_feature (20)..(283): Homolog of NCBI NO: 19347912 NR Description: unknown protein [Arabidopsis thaliana]
  misc_feature (85)..(283): Homolog of NCBI NO: 15921450 NR Description: 199aa long conserved hypothetical protein tokodaii] >gi|15622236|dbj|BAB66228.1| 199aa long conserved
  misc_feature (98)..(283): Homolog of NCBI NO: 15896653 NR Description: Predicted protein-S-isoprenylcysteine

SEQ ID NO: 99093 - DNA, 1633 bp, Arabidopsis thaliana
  misc_feature (1)..(1633): Ceres Seq. ID no. 13602150
  misc_feature: MA Experiment ID: 108434 Result: Down-regulated in Transcription
  misc_feature: MA Experiment 108434 PARAMETER Experiment Name: At_Root_Tips_cDNA_P Parameter: Tissue Value: Root Tips
  misc_feature: MA Experiment ID: 108463 Result: Up-regulated in Transcription
  misc_feature: MA Experiment 108463 PARAMETER Experiment Name: At_Germinating_Seeds_cDNA_P Parameter: Age (day) Value: 3 vs. 0
  misc_feature: MA Experiment 108463 PARAMETER Experiment Name: At_Germinating_Seeds_cDNA_P Parameter: Tissue Value: Germinating Seeds
  misc_feature: MA Experiment ID: 108464 Result: Up-regulated in Transcription
  misc_feature: MA Experiment 108464 PARAMETER Experiment Name: At_Germinating_Seeds_cDNA_P Parameter: Age (day) Value: 4 vs. 0
  misc_feature: MA Experiment 108464 PARAMETER Experiment Name: At_Germinating_Seeds_cDNA_P Parameter: Tissue Value: Germinating Seeds
  misc_feature: MA Experiment ID: 108488 Result: Down-regulated in Transcription
  misc_feature: MA Experiment ID: 108573 Result: Up-regulated in Transcription
  misc_feature: MA Experiment 108573 PARAMETER Experiment Name: At_Drought_cDNA_P Parameter: Timepoint (hr) Value: 6
  misc_feature: MA Experiment 108573 PARAMETER Experiment Name: At_Drought_cDNA_P Parameter: Tissue Value: Aerial
  misc_feature: MA Experiment 108573 PARAMETER Experiment Name: At_Drought_cDNA_P Parameter: Treatment Value: Drought vs. No Drought
  misc_feature: MA Experiment ID: 108577 Result: Down-regulated in Transcription
  misc_feature: MA Experiment 108577 PARAMETER Experiment Name: At_42deg_Heat_cDNA_P Parameter: Temperature (deg C) Value: 42 vs. 22
  misc_feature: MA Experiment 108577 PARAMETER Experiment Name: At_42deg_Heat_cDNA_P Parameter: Timepoint (hr) Value: 6
  misc_feature: MA Experiment 108577 PARAMETER Experiment Name: At_42deg_Heat_cDNA_P Parameter: Tissue Value: Aerial
  misc_feature: MA Experiment ID: 108585 Result: Up-regulated in Transcription
  misc_feature: MA Experiment 108585 PARAMETER Experiment Name: At_5mM_NaNP_cDNA_P Parameter: Timepoint (hr) Value: 6
  misc_feature: MA Experiment 108585 PARAMETER Experiment Name: At_5mM_NaNP_cDNA_P Parameter: Tissue Value: Aerial
  misc_feature: MA Experiment 108585 PARAMETER Experiment Name: At_5mM_NaNP_cDNA_P Parameter: Treatment Value: null
  misc_feature: MA Experiment ID: 108595 Result: Up-regulated in Transcription
  misc_feature: MA Experiment 108595 PARAMETER Experiment Name: At_Ler-pi_Ovule_cDNA_P Parameter: Plant Line Value: null
  misc_feature: MA Experiment ID: 108667 Result: Up-regulated in Transcription
  misc_feature: MA Experiment 108667 PARAMETER Experiment Name: At_2mM_SA_cDNA_P Parameter: Plant Line Value: WS
  misc_feature: MA Experiment 108667 PARAMETER Experiment Name: At_2mM_SA_cDNA_P Parameter: Timepoint (hr) Value: 1
  misc_feature: MA Experiment 108667 PARAMETER Experiment Name: At_2mM_SA_cDNA_P Parameter: Treatment Value: 2mM SA vs. No Treatment
  misc_feature: MA Experiment ID: 20000088 Result: Up-regulated in Transcription
  misc_feature: MA Experiment 20000088 PARAMETER Experiment Name: At_100uM_ABA_Mutants_cDNA_P Parameter: Plant Line Value: Landsberg
  misc_feature: MA Experiment 20000088 PARAMETER Experiment Name: At_100uM_ABA_Mutants_cDNA_P Parameter: Timepoint (hr) Value: 6
  misc_feature: MA Experiment 20000088 PARAMETER Experiment Name: At_100uM_ABA_Mutants_cDNA_P Parameter: Tissue Value: Aerial
  misc_feature: MA Experiment 20000088 PARAMETER Experiment Name: At_100uM_ABA_Mutants_cDNA_P Parameter: Treatment Value: 100uM ABA vs. No Treatment
  misc_feature: MA Experiment ID: 20000185 Result: Down-regulated in Transcription
  misc_feature: MA Experiment 20000185 PARAMETER Experiment Name: At_Roots__P Parameter: Age (day) Value: 7 vs. 21
  misc_feature: MA Experiment 20000185 PARAMETER Experiment Name: At_Roots__P Parameter: Organism Value: A. thaliana
  misc_feature: MA Experiment 20000185 PARAMETER Experiment Name: At_Roots__P Parameter: Tissue Value: Roots vs. Whole Plant
  misc_feature: MA Experiment ID: 20000234 Result: Down-regulated in Transcription
  misc_feature: MA Experiment 20000234 PARAMETER Experiment Name: At_Siliques_P Parameter: Age (day) Value: 21
  misc_feature: MA Experiment 20000234 PARAMETER Experiment Name: At_Siliques_P Parameter: Organism Value: A. thaliana
  misc_feature: MA Experiment 20000234 PARAMETER Experiment Name: At_Siliques_P Parameter: Plant Line Value: WS
  misc_feature: MA Experiment 20000234 PARAMETER Experiment Name: At_Siliques_P Parameter: Tissue Value: Less Than 5mm Siliques vs. Whole Plant
  misc_feature: MA Experiment ID: 20000235 Result: Down-regulated in Transcription
  misc_feature: MA Experiment 20000235 PARAMETER Experiment Name: At_Siliques_P Parameter: Age (day) Value: 21
  misc_feature: MA Experiment 20000235 PARAMETER Experiment Name: At_Siliques_P Parameter: Organism Value: A. thaliana
  misc_feature: MA Experiment 20000235 PARAMETER Experiment Name: At_Siliques_P Parameter: Plant Line Value: WS
  misc_feature: MA Experiment 20000235 PARAMETER Experiment Name: At_Siliques_P Parameter: Tissue Value: 5-10mm Siliques vs. Whole Plant
  misc_feature: MA Experiment ID: 20000264 Result: Down-regulated in Transcription
  misc_feature: MA Experiment 20000264 PARAMETER Experiment Name: At_Open_Flower_P Parameter: Age (day) Value: 21
  misc_feature: MA Experiment 20000264 PARAMETER Experiment Name: At_Open_Flower_P Parameter: Plant Line Value: WS
  misc_feature: MA Experiment 20000264 PARAMETER Experiment Name: At_Open_Flower_P Parameter: Tissue Value: Open Flower vs. Whole Plant
  misc_feature: MA Experiment ID: 20000265 Result: Down-regulated in Transcription
  misc_feature: MA Experiment 20000265 PARAMETER Experiment Name: At_Open_Flower_P Parameter: Age (day) Value: 21
  misc_feature: MA Experiment 20000265 PARAMETER Experiment Name: At_Open_Flower_P Parameter: Plant Line Value: WS
  misc_feature: MA Experiment 20000265 PARAMETER Experiment Name: At_Open_Flower_P Parameter: Tissue Value: Closed Flower vs. Whole Plant
  misc_feature: MA Experiment ID: 20000286 Result: Down-regulated in Transcription
  misc_feature: MA Experiment 20000286 PARAMETER Experiment Name: At_Open_Flower_P Parameter: Age (day) Value: 21
  misc_feature: MA Experiment 20000286 PARAMETER Experiment Name: At_Open_Flower_P Parameter: Plant Line Value: WS
  misc_feature: MA Experiment 20000286 PARAMETER Experiment Name: At_Open_Flower_P Parameter: Tissue Value: Half Open vs. Whole Plant
  misc_feature: MA Experiment ID: 20000439 Result: Down-regulated in Transcription
  misc_feature: MA Experiment 20000439 PARAMETER Experiment Name: At_Roots__P Parameter: Age (day) Value: 14 vs. 21
  misc_feature: MA Experiment 20000439 PARAMETER Experiment Name: At_Roots__P Parameter: Organism Value: A. thaliana
  misc_feature: MA Experiment 20000439 PARAMETER Experiment Name: At_Roots__P Parameter: Tissue Value: Roots vs. Whole Plant
  misc_feature: MA Experiment ID: 20000460 Result: Up-regulated in Transcription
  misc_feature: MA Experiment 20000460 PARAMETER Experiment Name: At_10percent_PEG_P Parameter: Age (day) Value: 12
  misc_feature: MA Experiment 20000460 PARAMETER Experiment Name: At_10percent_PEG_P Parameter: Organism Value: A. thaliana
  misc_feature: MA Experiment 20000460 PARAMETER Experiment Name: At_10percent_PEG_P Parameter: Plant Line Value: WS
  misc_feature: MA Experiment 20000460 PARAMETER Experiment Name: At_10percent_PEG_P Parameter: Timepoint (day) Value: 12
  misc_feature: MA Experiment 20000460 PARAMETER Experiment Name: At_10percent_PEG_P Parameter: Tissue Value: Whole Plant
  misc_feature: MA Experiment 20000460 PARAMETER Experiment Name: At_10percent_PEG_P Parameter: Treatment Value: 10percent PEG vs. No Treatment
  misc_feature: MA Experiment ID: 20000527 Result: Up-regulated in Transcription
  misc_feature: MA Experiment 20000527 PARAMETER Experiment Name: At_10percent_PEG_P Parameter: Age (day) Value: 20
  misc_feature: MA Experiment 20000527 PARAMETER Experiment Name: At_10percent_PEG_P Parameter: Organism Value: A. thaliana
  misc_feature: MA Experiment 20000527 PARAMETER Experiment Name: At_10percent_PEG_P Parameter: Plant Line Value: WS
  misc_feature: MA Experiment 20000527 PARAMETER Experiment Name: At_10percent_PEG_P Parameter: Timepoint (day) Value: 20
  misc_feature: MA Experiment 20000527 PARAMETER Experiment Name: At_10percent_PEG_P Parameter: Tissue Value: Whole Plant
  misc_feature: MA Experiment 20000527 PARAMETER Experiment Name: At_10percent_PEG_P Parameter: Treatment Value: 10percent PEG vs. No Treatment
  misc_feature: MA Experiment ID: 20000794 Result: Down-regulated in Transcription
  misc_feature: MA Experiment 20000794 PARAMETER Experiment Name: At_Petals_P Parameter: Age (day) Value: 23-25 days
  misc_feature: MA Experiment 20000794 PARAMETER Experiment Name: At_Petals_P Parameter: Plant Line Value: WS
  misc_feature: MA Experiment 20000794 PARAMETER Experiment Name: At_Petals_P Parameter: Tissue Value: Petals vs. Whole plant
  misc_feature: MA Experiment ID: 20001247 Result: Up-regulated in Transcription
  misc_feature: MA Experiment 20001247 PARAMETER Experiment Name: At_Far-red-induction_P Parameter: Age (day) Value: 7
  misc_feature: MA Experiment 20001247 PARAMETER Experiment Name: At_Far-red-induction_P Parameter: Light Value: Far-red vs. White
  misc_feature: MA Experiment 20001247 PARAMETER Experiment Name: At_Far-red-induction_P Parameter: Organism Value: A. thaliana
  misc_feature: MA Experiment 20001247 PARAMETER Experiment Name: At_Far-red-induction_P Parameter: Plant Line Value: Columbia
  misc_feature: MA Experiment 20001247 PARAMETER Experiment Name: At_Far-red-induction_P Parameter: Timepoint (hr) Value: 1
  misc_feature: MA Experiment 20001247 PARAMETER Experiment Name: At_Far-red-induction_P Parameter: Tissue Value: Whole Plant
atggatcccacaaacagcagacacggcgcttcttttgaattttctactcggcgttttacactttccacgtttggtcaaaacgctccttctctatacgtaacgaccgtttataactccgctatcatctacccagtcaaacactcaccacgtgtctatttaccgtctaatccgacaccgttaattccgctcctaagaatcgccttaaaaaccacgttttcattttctcatcttcaaacctctctgtcattactctggtcagcgattcttctttcttcttcttctcagatcctttcaccgagtaagaagattttaaagatgccgtcaacgccgacgacgccgactacaacaacgccgatcacggcttcgtattggtgttacagctgtacgcgtttcgtcagcgtttgggctgatcaaggcacaacaaccgtcggtagcgtcgcttgccctcactgcgacggcggttttatcgaacagattaacgattcttcctccgccgctaccgaattaacgattccggcttctactgaagtaagatcgatcaataacaaccgtagatccgtgattagacgccggagatccggtcgtcgtccgtcctttaatccggtcatcgtacttcaaggaggcgccggcgagagagaagagggagaagaaggagatgcggctagagatcgacgcgcttttgagttttattacgatgacggatccggatcgggtcttagaccgcttccggattctgtatctgagatcttgatgggatctggattcgagcggttacttgaacagctaagccaaatcgaagcgtcggctactggaattggtagatctggaaaccctccggcgtctaaatcggcgattgagtctttacctagagtcgaaatctcggattgccacataggctcggaggctaattgcgctgtttgcacggagattttcgagacggagacggaggcgcgtgagatgccgtgtaaacaccttttccacgacgattgcatcgtaccgtggctatcgattcgaaactcttgtcccgtgtgcagattcgagctaccttcagagcctaatcgacggagcaacaacaacgaggaggataacgccgtggggatgacgatttggagacttcccggtggtggattcgccgtagggaggtttaacgcagcaatgagagacggagagagagttttgccagtggtgttaacagaaatggatggtggtgggattggtaatagccaggatggtcctagacggatctcatgggttaggtcacacggtacactcgaatcggatagtaacggtactggctcaggttccggctccggtggaagattgaggaggatggttcgtggaatggtgtcgttaatgaggagagtgagaccaaaccgtagctcttcttcttcatcagctgcgatatcaacttcttctgataatctggatttgaacattgaagtagaatctagggttttggataggtcaaattcagtgatgagaagatacttcagaagaaacagaagtaacagggattcttcgtcttcagttcttcattgattcagaaatatatatatattattttttggtttgttcattcaacaatgtaaatataagattcagaagaaaaagattggtgcttcgttttctatta

SEQ ID NO: 99094 - protein, 512 aa, Arabidopsis thaliana
  peptide (1)..(512): Ceres Seq. ID no. 13602151
  misc_feature (304)..(344): Pfam Name: Zinc finger, C3HC4 type (RING finger) Pfam Description: Zinc finger, C3HC4 type (RING finger)
  misc_feature (1)..(512): Homolog of NCBI NO: 8885559 NR Description: emb|CAB62332.1~gene_id:F2O15.22~strong similarity
  misc_feature (106)..(512): Homolog of NCBI NO: 18424254 NR Description: expressed protein [Arabidopsis thaliana] AT5g59550/f2o15_210 [Arabidopsis thaliana]
  misc_feature (108)..(497): Homolog of NCBI NO: 15232595 NR Description: expressed protein [Arabidopsis thaliana]
  misc_feature (107)..(491): Homolog of NCBI NO: 14719329 NR Description: putative RING-H2 finger protein [Oryza sativa]
  misc_feature (120)..(500): Homolog of NCBI NO: 18405141 NR Description: RING-H2 finger protein (RHC2a) [Arabidopsis
  misc_feature (207)..(425): Homolog of NCBI NO: 34902106 NR Description: unknown protein [Oryza sativa (japonica
  misc_feature (243)..(430): Homolog of NCBI NO: 34906008 NR Description: putative RING-H2 finger protein RHC2a [Oryza
  misc_feature (118)..(381): Homolog of NCBI NO: 34908968 NR Description: P0003D09.21 [Oryza sativa (japonica
  misc_feature (119)..(364): Homolog of NCBI NO: 18410530 NR Description: expressed protein [Arabidopsis thaliana] unknown protein [Arabidopsis thaliana]
  misc_feature (122)..(359): Homolog of NCBI NO: 18405518 NR Description: RING-H2 finger protein (RHC1a) [Arabidopsis
MDPTNSRHGASFEFSTRRFTLSTFGQNAPSLYVTTVYNSAIIYPVKHSPRVYLPSNPTPLIPLLRIALKTTFSFSHLQTSLSLLWSAILLSSSSQILSPSKKILKMPSTPTTPTTTTPITASYWCYSCTRFVSVWADQGTTTVGSVACPHCDGGFIEQINDSSSAATELTIPASTEVRSINNNRRSVIRRRRSGRRPSFNPVIVLQGGAGEREEGEEGDAARDRRAFEFYYDDGSGSGLRPLPDSVSEILMGSGFERLLEQLSQIEASATGIGRSGNPPASKSAIESLPRVEISDCHIGSEANCAVCTEIFETETEAREMPCKHLFHDDCIVPWLSIRNSCPVCRFELPSEPNRRSNNNEEDNAVGMTIWRLPGGGFAVGRFNAAMRDGERVLPVVLTEMDGGGIGNSQDGPRRISWVRSHGTLESDSNGTGSGSGSGGRLRRMVRGMVSLMRRVRPNRSSSSSSAAISTSSDNLDLNIEVESRVLDRSNSVMRRYFRRNRSNRDSSSSVLH

SEQ ID NO: 99095 - protein, 407 aa, Arabidopsis thaliana; identical to SEQ ID NO: 35169
  peptide (1)..(407): Ceres Seq. ID no. 13602152
  misc_feature (199)..(239): Pfam Name: Zinc finger, C3HC4 type (RING finger) Pfam Description: Zinc finger, C3HC4 type (RING finger)
  misc_feature (1)..(407): Homolog of NCBI NO: 8885559 NR Description: emb|CAB62332.1~gene_id:F2O15.22~strong similarity
  misc_feature (1)..(407): Homolog of NCBI NO: 18424254 NR Description: expressed protein [Arabidopsis thaliana] AT5g59550/f2o15_210 [Arabidopsis thaliana]
  misc_feature (3)..(392): Homolog of NCBI NO: 15232595 NR Description: expressed protein [Arabidopsis thaliana]
  misc_feature (2)..(386): Homolog of NCBI NO: 14719329 NR Description: putative RING-H2 finger protein [Oryza sativa]
  misc_feature (15)..(395): Homolog of NCBI NO: 18405141 NR Description: RING-H2 finger protein (RHC2a) [Arabidopsis
  misc_feature (102)..(320): Homolog of NCBI NO: 34902106 NR Description: unknown protein [Oryza sativa (japonica
  misc_feature (138)..(325): Homolog of NCBI NO: 34906008 NR Description: putative RING-H2 finger protein RHC2a [Oryza
  misc_feature (13)..(276): Homolog of NCBI NO: 34908968 NR Description: P0003D09.21 [Oryza sativa (japonica
  misc_feature (14)..(259): Homolog of NCBI NO: 18410530 NR Description: expressed protein [Arabidopsis thaliana] unknown protein [Arabidopsis thaliana]
  misc_feature (17)..(254): Homolog of NCBI NO: 18405518 NR Description: RING-H2 finger protein (RHC1a) [Arabidopsis

SEQ ID NO: 99096 - protein, 262 aa, Arabidopsis thaliana; identical to SEQ ID NO: 35170
  peptide (1)..(262): Ceres Seq. ID no. 13602153
  misc_feature (54)..(94): Pfam Name: Zinc finger, C3HC4 type (RING finger) Pfam Description: Zinc finger, C3HC4 type (RING finger)
  misc_feature (1)..(262): Homolog of NCBI NO: 8885559 NR Description: emb|CAB62332.1~gene_id:F2O15.22~strong similarity
  misc_feature (1)..(262): Homolog of NCBI NO: 18424254 NR Description: expressed protein [Arabidopsis thaliana] AT5g59550/f2o15_210 [Arabidopsis thaliana]
  misc_feature (1)..(247): Homolog of NCBI NO: 15232595 NR Description: expressed protein [Arabidopsis thaliana]
  misc_feature (1)..(241): Homolog of NCBI NO: 14719329 NR Description: putative RING-H2 finger protein [Oryza sativa]
  misc_feature (1)..(250): Homolog of NCBI NO: 18405141 NR Description: RING-H2 finger protein (RHC2a) [Arabidopsis
  misc_feature (1)..(175): Homolog of NCBI NO: 34902106 NR Description: unknown protein [Oryza sativa (japonica
  misc_feature (1)..(180): Homolog of NCBI NO: 34906008 NR Description: putative RING-H2 finger protein RHC2a [Oryza
  misc_feature (1)..(131): Homolog of NCBI NO: 34908968 NR Description: P0003D09.21 [Oryza sativa (japonica
  misc_feature (1)..(114): Homolog of NCBI NO: 18410530 NR Description: expressed protein [Arabidopsis thaliana] unknown protein [Arabidopsis thaliana]
  misc_feature (1)..(109): Homolog of NCBI NO: 18405518 NR Description: RING-H2 finger protein (RHC1a) [Arabidopsis

SEQ ID NO: 99097 - DNA, 965 bp, Arabidopsis thaliana
  misc_feature (1)..(965): Ceres Seq. ID no. 13602166
  misc_feature: MA Experiment ID: 20000307 Result: Up-regulated in Transcription
  misc_feature: MA Experiment 20000307 PARAMETER Experiment Name: At_Germinating_Seeds_Sub_P Parameter: Age (hr) Value: 24 vs. 0
  misc_feature: MA Experiment 20000307 PARAMETER Experiment Name: At_Germinating_Seeds_Sub_P Parameter: Organism Value: A. thaliana
  misc_feature: MA Experiment 20000307 PARAMETER Experiment Name: At_Germinating_Seeds_Sub_P Parameter: Plant Line Value: WS
  misc_feature: MA Experiment 20000307 PARAMETER Experiment Name: At_Germinating_Seeds_Sub_P Parameter: Tissue Value: Germinating Seeds
  misc_feature: MA Experiment ID: 20000349 Result: Up-regulated in Transcription
  misc_feature: MA Experiment 20000349 PARAMETER Experiment Name: At_100uM_ABA_Sub_P Parameter: Age (day) Value: 14
  misc_feature: MA Experiment 20000349 PARAMETER Experiment Name: At_100uM_ABA_Sub_P Parameter: Organism Value: A. thaliana
  misc_feature: MA Experiment 20000349 PARAMETER Experiment Name: At_100uM_ABA_Sub_P Parameter: Plant Line Value: WS
  misc_feature: MA Experiment 20000349 PARAMETER Experiment Name: At_100uM_ABA_Sub_P Parameter: Timepoint (hr) Value: 6
  misc_feature: MA Experiment 20000349 PARAMETER Experiment Name: At_100uM_ABA_Sub_P Parameter: Tissue Value: Aerial
  misc_feature: MA Experiment 20000349 PARAMETER Experiment Name: At_100uM_ABA_Sub_P Parameter: Treatment Value: 100uM ABA vs. No Treatment
gttttttctctgctcatttactataaccaacaaggtctcttctcttctcttctcctctctgcatcattttgatccgattcgatggctgctccacctgctagagctagagccgattatgattatctcattaagcttcttctcatcggtgatagcggtgttggtaaaagttgtttgcttctaaggttctctgatggctctttcaccactagcttcatcactaccattggtattgattttaagataagaactattgagcttgatggcaaacgtatcaagcttcagatttgggacactgctggtcaagaacgttttcgaaccatcaccactgcttattaccgcggggcaatggggattttactggtgtatgatgtcacagacgagtcatccttcaacaacattagaaactggattcgtaatattgaacagcacgcttcagataatgtcaacaaaatcttggtaggaaacaaagctgatatggacgagagcaagagggctgtgccaaaatcaaagggtcaagcacttgctgacgaatatggaatcaagttctttgaaacaagtgccaaaactaatctgaatgtggaagaagttttcttctccatagcaaaggacataaagcagagactcgctgatactgactctagagcagagcctgcaacgatcaagatcagccaaacagaccaggctgctggagccggacaggccacacagaagtctgcatgctgtggaagttaatcagtcccaaaaggctccaaagttgaagtgaagtgaaaaacagatttatcttggggtgcttttgtatttttttttcttttgattatttgttcttatttgacttcttctagtttgttcatgagggtaatagaatcttttaagaaatttttccttctcagacagattcgatgtcacagaagctgaatctgtgactgaattgttaatcttttacgcataactcttcaagtctcttc

SEQ ID NO: 99098 - protein, 216 aa, Arabidopsis thaliana
  peptide (1)..(216): Ceres Seq. ID no. 13602167
  misc_feature (17)..(179): Pfam Name: Ras family Pfam Description: Ras family
  misc_feature (1)..(216): Homolog of NCBI NO: 15238542 NR Description: Ras family GTP-binding protein [Arabidopsis
  misc_feature (1)..(216): Homolog of NCBI NO: 15231322 NR Description: Ras family GTP-binding protein [Arabidopsis
  misc_feature (1)..(216): Homolog of NCBI NO: 15231847 NR Description: Ras-related GTP-binding protein, putative
  misc_feature (1)..(216): Homolog of NCBI NO: 18447917 NR Description: ras-related protein RAB8-3 [Nicotiana tabacum]
  misc_feature (1)..(216): Homolog of NCBI NO: 1362066 NR Description: GTP-binding protein GTP6 - garden pea
  misc_feature (1)..(216): Homolog of NCBI NO: 18447913 NR Description: ras-related protein RAB8-1 [Nicotiana tabacum]
  misc_feature (1)..(216): Homolog of NCBI NO: 18447921 NR Description: ras-related protein RAB8-5 [Nicotiana tabacum]
  misc_feature (1)..(216): Homolog of NCBI NO: 5669640 NR Description: ethylene-responsive small GTP-binding protein
  misc_feature (1)..(215): Homolog of NCBI NO: 1362067 NR Description: GTP-binding protein GTP13 - garden pea
  misc_feature (1)..(215): Homolog of NCBI NO: 1370196 NR Description: RAB8D [Lotus japonicus]
MAAPPARARADYDYLIKLLLIGDSGVGKSCLLLRFSDGSFTTSFITTIGIDFKIRTIELDGKRIKLQIWDTAGQERFRTITTAYYRGAMGILLVYDVTDESSFNNIRNWIRNIEQHASDNVNKILVGNKADMDESKRAVPKSKGQALADEYGIKFFETSAKTNLNVEEVFFSIAKDIKQRLADTDSRAEPATIKISQTDQAAGAGQATQKSACCGS

SEQ ID NO: 99099 - protein, 128 aa, Arabidopsis thaliana
  peptide (1)..(128): Ceres Seq. ID no. 13602168
  misc_feature (1)..(91): Pfam Name: Ras family Pfam Description: Ras family
  misc_feature (1)..(128): Homolog of NCBI NO: 15238542 NR Description: Ras family GTP-binding protein [Arabidopsis
  misc_feature (1)..(128): Homolog of NCBI NO: 15231322 NR Description: Ras family GTP-binding protein [Arabidopsis
  misc_feature (1)..(128): Homolog of NCBI NO: 15231847 NR Description: Ras-related GTP-binding protein, putative
  misc_feature (1)..(128): Homolog of NCBI NO: 18447917 NR Description: ras-related protein RAB8-3 [Nicotiana tabacum]
  misc_feature (1)..(128): Homolog of NCBI NO: 1362066 NR Description: GTP-binding protein GTP6 - garden pea
  misc_feature (1)..(128): Homolog of NCBI NO: 18447913 NR Description: ras-related protein RAB8-1 [Nicotiana tabacum]
  misc_feature (1)..(128): Homolog of NCBI NO: 18447921 NR Description: ras-related protein RAB8-5 [Nicotiana tabacum]
  misc_feature (1)..(128): Homolog of NCBI NO: 5669640 NR Description: ethylene-responsive small GTP-binding protein
  misc_feature (1)..(127): Homolog of NCBI NO: 1362067 NR Description: GTP-binding protein GTP13 - garden pea
  misc_feature (1)..(127): Homolog of NCBI NO: 1370196 NR Description: RAB8D [Lotus japonicus]
MGILLVYDVTDESSFNNIRNWIRNIEQHASDNVNKILVGNKADMDESKRAVPKSKGQALADEYGIKFFETSAKTNLNVEEVFFSIAKDIKQRLADTDSRAEPATIKISQTDQAAGAGQATQKSACCGS

SEQ ID NO: 99100 - DNA, 910 bp, Arabidopsis thaliana
  misc_feature (1)..(910): Ceres Seq. ID no. 13602182
  misc_feature: MA Experiment ID: 108474 Result: Down-regulated in Transcription
  misc_feature: MA Experiment 108474 PARAMETER Experiment Name: At_Drought_Flowers_cDNA_P Parameter: Timepoint (hr) Value: null
  misc_feature: MA Experiment 108474 PARAMETER Experiment Name: At_Drought_Flowers_cDNA_P Parameter: Treatment Value: Drought vs. No Drought
  misc_feature: MA Experiment ID: 20000264 Result: Up-regulated in Transcription
  misc_feature: MA Experiment 20000264 PARAMETER Experiment Name: At_Open_Flower_P Parameter: Age (day) Value: 21
  misc_feature: MA Experiment 20000264 PARAMETER Experiment Name: At_Open_Flower_P Parameter: Plant Line Value: WS
  misc_feature: MA Experiment 20000264 PARAMETER Experiment Name: At_Open_Flower_P Parameter: Tissue Value: Open Flower vs. Whole Plant
  misc_feature: MA Experiment ID: 20000265 Result: Up-regulated in Transcription
  misc_feature: MA Experiment 20000265 PARAMETER Experiment Name: At_Open_Flower_P Parameter: Age (day) Value: 21
  misc_feature: MA Experiment 20000265 PARAMETER Experiment Name: At_Open_Flower_P Parameter: Plant Line Value: WS
  misc_feature: MA Experiment 20000265 PARAMETER Experiment Name: At_Open_Flower_P Parameter: Tissue Value: Closed Flower vs. Whole Plant
  misc_feature: MA Experiment ID: 20000286 Result: Up-regulated in Transcription
  misc_feature: MA Experiment 20000286 PARAMETER Experiment Name: At_Open_Flower_P Parameter: Age (day) Value: 21
  misc_feature: MA Experiment 20000286 PARAMETER Experiment Name: At_Open_Flower_P Parameter: Plant Line Value: WS
  misc_feature: MA Experiment 20000286 PARAMETER Experiment Name: At_Open_Flower_P Parameter: Tissue Value: Half Open vs. Whole Plant
  misc_feature: MA Experiment ID: 20000439 Result: Down-regulated in Transcription
  misc_feature: MA Experiment 20000439 PARAMETER Experiment Name: At_Roots__P Parameter: Age (day) Value: 14 vs. 21
  misc_feature: MA Experiment 20000439 PARAMETER Experiment Name: At_Roots__P Parameter: Organism Value: A. thaliana
  misc_feature: MA Experiment 20000439 PARAMETER Experiment Name: At_Roots__P Parameter: Tissue Value: Roots vs. Whole Plant
  misc_feature: MA Experiment ID: 20000443 Result: Down-regulated in Transcription
  misc_feature: MA Experiment 20000443 PARAMETER Experiment Name: At_1uM_BR-BRZ__P Parameter: Tissue Value: Shoot Apices
  misc_feature: MA Experiment 20000443 PARAMETER Experiment Name: At_1uM_BR-BRZ__P Parameter: Treatment Value: 1uM BRZ vs. No Treatment
  misc_feature: MA Experiment ID: 20000794 Result: Up-regulated in Transcription
  misc_feature: MA Experiment 20000794 PARAMETER Experiment Name: At_Petals_P Parameter: Age (day) Value: 23-25 days
  misc_feature: MA Experiment 20000794 PARAMETER Experiment Name: At_Petals_P Parameter: Plant Line Value: WS
  misc_feature: MA Experiment 20000794 PARAMETER Experiment Name: At_Petals_P Parameter: Tissue Value: Petals vs. Whole plant
  misc_feature: MA Experiment ID: 20001911 Result: Down-regulated in Transcription
  misc_feature: MA Experiment 20001911 PARAMETER Experiment Name: At_Drought_Reproduction_P Parameter: Age (day) Value: 40
  misc_feature: MA Experiment 20001911 PARAMETER Experiment Name: At_Drought_Reproduction_P Parameter: Organism Value: A. thaliana
  misc_feature: MA Experiment 20001911 PARAMETER Experiment Name: At_Drought_Reproduction_P Parameter: Plant Line Value: WS
  misc_feature: MA Experiment 20001911 PARAMETER Experiment Name: At_Drought_Reproduction_P Parameter: Timepoint (day) Value: 10
  misc_feature: MA Experiment 20001911 PARAMETER Experiment Name: At_Drought_Reproduction_P Parameter: Tissue Value: Flowers
  misc_feature: MA Experiment 20001911 PARAMETER Experiment Name: At_Drought_Reproduction_P Parameter: Treatment Value: Drought vs. No Drought
atcaactctctctctcactttcacaactctccctttctatttctctctctagaaaaatatcatcatctatcaattatatagagtacttatttagattcatttcataaaaatggagaaaagagaaagtagtggtgggtctggatcaggagatgcagaggtgagaaaagggccatggacgatggaagaagatttgattctcatcaattatatcgccaatcatggtgaaggtgtttggaactctctcgccaaatctgcaggactaaaacgcaccgggaaaagttgccggctccggtggctgaactacctccgacctgatgtgcgacggggaaatatcacaccagaagaacagctcaccatcatggaacttcatgcaaaatggggaaataggtggtcaaaaattgcaaagcatttaccaggaagaaccgacaatgagataaagaatttttggaggactaagatccagaaatacatcatcaagagcggagaaacgacgaccgttggatcacaaagctccgagtttataaaccatcatgcgacaacgagccatgtcatgaatgatactcaagaaaccatggatatgtattctccaacgacgtcgtatcaacatgccagcaatattaatcagcagcttaattatggtaattatgtgcctgaatccggttcgatcatgatgccattatctgttgatcaatccgaacaaaactattggagcgtcgatgatctttggcccatgaatatatataatggtaattaataaataagttcgttaaaacttatatatatttacggtccaaagagggttctatataaacagagtactgtatgggattgcctcattgtttagaggtaggtacttaatataaggttggagatcttagatgtattaataaataactcgtatttactagat

SEQ ID NO: 99101 - protein, 214 aa, Arabidopsis thaliana
  peptide (1)..(214): Ceres Seq. ID no. 13602183
  misc_feature (19)..(66): Pfam Name: Myb-like DNA-binding domain Pfam Description: Myb-like DNA-binding domain
  misc_feature (1)..(214): Homolog of NCBI NO: 15242669 NR Description: myb family transcription factor [Arabidopsis >gi|5823307|gb|AAD53092.1|AF175987_1 putative transcription [Arabidopsis thaliana] >gi|10178145|dbj|BAB11590.1| transcription
  misc_feature (1)..(214): Homolog of NCBI NO: 21554734 NR Description: putative transcription factor MYB24 [Arabidopsis
  misc_feature (1)..(214): Homolog of NCBI NO: 30688935 NR Description: myb family transcription factor (ATMYB3) thaliana] >gi|26451911|dbj|BAC43048.1| putative myb family
  misc_feature (1)..(214): Homolog of NCBI NO: 2280528 NR Description: ATMYB3 [Arabidopsis thaliana]
  misc_feature (10)..(214): Homolog of NCBI NO: 7438338 NR Description: Myb26 protein - garden pea
  misc_feature (12)..(214): Homolog of NCBI NO: 82306 NR Description: myb-related protein 305 - garden snapdragon
  misc_feature (12)..(212): Homolog of NCBI NO: 82311 NR Description: myb-related protein 340 - garden snapdragon
  misc_feature (1)..(168): Homolog of NCBI NO: 40643882 NR Description: MYB8 protein [Gerbera hybrid cv. 'Terra Regina']
  misc_feature (14)..(171): Homolog of NCBI NO: 13537530 NR Description: LhMyb [Lilium hybrid division I]
  misc_feature (14)..(179): Homolog of NCBI NO: 15232137 NR Description: myb family transcription factor [Arabidopsis >gi|6016712|gb|AAF01538.1|AC009325_8 putative transcription [Arabidopsis thaliana] >gi|26451234|dbj|BAC42719.1| putative
MEKRESSGGSGSGDAEVRKGPWTMEEDLILINYIANHGEGVWNSLAKSAGLKRTGKSCRLRWLNYLRPDVRRGNITPEEQLTIMELHAKWGNRWSKIAKHLPGRTDNEIKNFWRTKIQKYIIKSGETTTVGSQSSEFINHHATTSHVMNDTQETMDMYSPTTSYQHASNINQQLNYGNYVPESGSIMMPLSVDQSEQNYWSVDDLWPMNIYNGN

SEQ ID NO: 99102 - protein, 191 aa, Arabidopsis thaliana
  peptide (1)..(191): Ceres Seq. ID no. 13602184
  misc_feature (1)..(43): Pfam Name: Myb-like DNA-binding domain Pfam Description: Myb-like DNA-binding domain
  misc_feature (1)..(191): Homolog of NCBI NO: 15242669 NR Description: myb family transcription factor [Arabidopsis >gi|5823307|gb|AAD53092.1|AF175987_1 putative transcription [Arabidopsis thaliana] >gi|10178145|dbj|BAB11590.1| transcription
  misc_feature (1)..(191): Homolog of NCBI NO: 21554734 NR Description: putative transcription factor MYB24 [Arabidopsis
  misc_feature (1)..(191): Homolog of NCBI NO: 30688935 NR Description: myb family transcription factor (ATMYB3) thaliana] >gi|26451911|dbj|BAC43048.1| putative myb family
  misc_feature (1)..(191): Homolog of NCBI NO: 2280528 NR Description: ATMYB3 [Arabidopsis thaliana]
  misc_feature (1)..(191): Homolog of NCBI NO: 7438338 NR Description: Myb26 protein - garden pea
  misc_feature (1)..(191): Homolog of NCBI NO: 82306 NR Description: myb-related protein 305 - garden snapdragon
  misc_feature (1)..(189): Homolog of NCBI NO: 82311 NR Description: myb-related protein 340 - garden snapdragon
  misc_feature (1)..(145): Homolog of NCBI NO: 40643882 NR Description: MYB8 protein [Gerbera hybrid cv. 'Terra Regina']
  misc_feature (1)..(148): Homolog of NCBI NO: 13537530 NR Description: LhMyb [Lilium hybrid division I]
  misc_feature (1)..(156): Homolog of NCBI NO: 15232137 NR Description: myb family transcription factor [Arabidopsis >gi|6016712|gb|AAF01538.1|AC009325_8 putative transcription [Arabidopsis thaliana] >gi|26451234|dbj|BAC42719.1| putative
MEEDLILINYIANHGEGVWNSLAKSAGLKRTGKSCRLRWLNYLRPDVRRGNITPEEQLTIMELHAKWGNRWSKIAKHLPGRTDNEIKNFWRTKIQKYIIKSGETTTVGSQSSEFINHHATTSHVMNDTQETMDMYSPTTSYQHASNINQQLNYGNYVPESGSIMMPLSVDQSEQNYWSVDDLWPMNIYNGN

SEQ ID NO: 99103 - protein, 131 aa, Arabidopsis thaliana
  peptide (1)..(131): Ceres Seq. ID no. 13602185
  misc_feature (1)..(131): Homolog of NCBI NO: 15242669 NR Description: myb family transcription factor [Arabidopsis >gi|5823307|gb|AAD53092.1|AF175987_1 putative transcription [Arabidopsis thaliana] >gi|10178145|dbj|BAB11590.1| transcription
  misc_feature (1)..(131): Homolog of NCBI NO: 21554734 NR Description: putative transcription factor MYB24 [Arabidopsis
  misc_feature (1)..(131): Homolog of NCBI NO: 30688935 NR Description: myb family transcription factor (ATMYB3) thaliana] >gi|26451911|dbj|BAC43048.1| putative myb family
  misc_feature (1)..(131): Homolog of NCBI NO: 2280528 NR Description: ATMYB3 [Arabidopsis thaliana]
  misc_feature (1)..(131): Homolog of NCBI NO: 7438338 NR Description: Myb26 protein - garden pea
  misc_feature (1)..(131): Homolog of NCBI NO: 82306 NR Description: myb-related protein 305 - garden snapdragon
  misc_feature (1)..(129): Homolog of NCBI NO: 82311 NR Description: myb-related protein 340 - garden snapdragon
  misc_feature (1)..(85): Homolog of NCBI NO: 40643882 NR Description: MYB8 protein [Gerbera hybrid cv. 'Terra Regina']
  misc_feature (1)..(88): Homolog of NCBI NO: 13537530 NR Description: LhMyb [Lilium hybrid division I]
  misc_feature (1)..(96): Homolog of NCBI NO: 15232137 NR Description: myb family transcription factor [Arabidopsis >gi|6016712|gb|AAF01538.1|AC009325_8 putative transcription [Arabidopsis thaliana] >gi|26451234|dbj|BAC42719.1| putative
MELHAKWGNRWSKIAKHLPGRTDNEIKNFWRTKIQKYIIKSGETTTVGSQSSEFINHHATTSHVMNDTQETMDMYSPTTSYQHASNINQQLNYGNYVPESGSIMMPLSVDQSEQNYWSVDDLWPMNIYNGN

SEQ ID NO: 99104 - DNA, 2026 bp, Arabidopsis thaliana
  misc_feature (1)..(2026): Ceres Seq. ID no. 13602192
  misc_feature: MA Experiment ID: 108434 Result: Up-regulated in Transcription
  misc_feature: MA Experiment 108434 PARAMETER Experiment Name: At_Root_Tips_cDNA_P Parameter: Tissue Value: Root Tips
  misc_feature: MA Experiment ID: 20000111 Result: Down-regulated in Transcription
  misc_feature: MA Experiment 20000111 PARAMETER Experiment Name: At_42deg_Heat_cDNA_P Parameter: Temperature (deg C) Value: 42 vs. 22
  misc_feature: MA Experiment 20000111 PARAMETER Experiment Name: At_42deg_Heat_cDNA_P Parameter: Timepoint (hr) Value: 6
  misc_feature: MA Experiment 20000111 PARAMETER Experiment Name: At_42deg_Heat_cDNA_P Parameter: Tissue Value: Aerial
  misc_feature: MA Experiment ID: 20000113 Result: Down-regulated in Transcription
  misc_feature: MA Experiment 20000113 PARAMETER Experiment Name: At_42deg_Heat_cDNA_P Parameter: Temperature (deg C) Value: 42 vs. 22
  misc_feature: MA Experiment 20000113 PARAMETER Experiment Name: At_42deg_Heat_cDNA_P Parameter: Timepoint (hr) Value: 8
  misc_feature: MA Experiment 20000113 PARAMETER Experiment Name: At_42deg_Heat_cDNA_P Parameter: Tissue Value: Aerial
  misc_feature: MA Experiment ID: 20000173 Result: Down-regulated in Transcription
  misc_feature: MA Experiment 20000173 PARAMETER Experiment Name: At_42deg_Heat_P Parameter: Age (day) Value: 14
  misc_feature: MA Experiment 20000173 PARAMETER Experiment Name: At_42deg_Heat_P Parameter: Organism Value: A. thaliana
  misc_feature: MA Experiment 20000173 PARAMETER Experiment Name: At_42deg_Heat_P Parameter: Plant Line Value: WS
  misc_feature: MA Experiment 20000173 PARAMETER Experiment Name: At_42deg_Heat_P Parameter: Temperature (deg C) Value: 42 vs. 22
  misc_feature: MA Experiment 20000173 PARAMETER Experiment Name: At_42deg_Heat_P Parameter: Timepoint (hr) Value: 6
  misc_feature: MA Experiment 20000173 PARAMETER Experiment Name: At_42deg_Heat_P Parameter: Tissue Value: Aerial
  misc_feature: MA Experiment ID: 20000234 Result: Up-regulated in Transcription
  misc_feature: MA Experiment 20000234 PARAMETER Experiment Name: At_Siliques_P Parameter: Age (day) Value: 21
  misc_feature: MA Experiment 20000234 PARAMETER Experiment Name: At_Siliques_P Parameter: Organism Value: A. thaliana
  misc_feature: MA Experiment 20000234 PARAMETER Experiment Name: At_Siliques_P Parameter: Plant Line Value: WS
  misc_feature: MA Experiment 20000234 PARAMETER Experiment Name: At_Siliques_P Parameter: Tissue Value: Less Than 5mm Siliques vs. Whole Plant
  misc_feature: MA Experiment ID: 20000235 Result: Up-regulated in Transcription
  misc_feature: MA Experiment 20000235 PARAMETER Experiment Name: At_Siliques_P Parameter: Age (day) Value: 21
  misc_feature: MA Experiment 20000235 PARAMETER Experiment Name: At_Siliques_P Parameter: Organism Value: A. thaliana
  misc_feature: MA Experiment 20000235 PARAMETER Experiment Name: At_Siliques_P Parameter: Plant Line Value: WS
  misc_feature: MA Experiment 20000235 PARAMETER Experiment Name: At_Siliques_P Parameter: Tissue Value: 5-10mm Siliques vs. Whole Plant
  misc_feature: MA Experiment ID: 20000264 Result: Up-regulated in Transcription
  misc_feature: MA Experiment 20000264 PARAMETER Experiment Name: At_Open_Flower_P Parameter: Age (day) Value: 21
  misc_feature: MA Experiment 20000264 PARAMETER Experiment Name: At_Open_Flower_P Parameter: Plant Line Value: WS
  misc_feature: MA Experiment 20000264 PARAMETER Experiment Name: At_Open_Flower_P Parameter: Tissue Value: Open Flower vs. Whole Plant
  misc_feature: MA Experiment ID: 20000265 Result: Up-regulated in Transcription
  misc_feature: MA Experiment 20000265 PARAMETER Experiment Name: At_Open_Flower_P Parameter: Age (day) Value: 21
  misc_feature: MA Experiment 20000265 PARAMETER Experiment Name: At_Open_Flower_P Parameter: Plant Line Value: WS
  misc_feature: MA Experiment 20000265 PARAMETER Experiment Name: At_Open_Flower_P Parameter: Tissue Value: Closed Flower vs. Whole Plant
  misc_feature: MA Experiment ID: 20000286 Result: Up-regulated in Transcription
  misc_feature: MA Experiment 20000286 PARAMETER Experiment Name: At_Open_Flower_P Parameter: Age (day) Value: 21
  misc_feature: MA Experiment 20000286 PARAMETER Experiment Name: At_Open_Flower_P Parameter: Plant Line Value: WS
  misc_feature: MA Experiment 20000286 PARAMETER Experiment Name: At_Open_Flower_P Parameter: Tissue Value: Half Open vs. Whole Plant
  misc_feature: MA Experiment ID: 20000438 Result: Down-regulated in Transcription
  misc_feature: MA Experiment 20000438 PARAMETER Experiment Name: At_Shoots__P Parameter: Age (day) Value: 14
  misc_feature: MA Experiment 20000438 PARAMETER Experiment Name: At_Shoots__P Parameter: Tissue Value: Shoots vs. Whole Plant
  misc_feature: MA Experiment ID: 20000439 Result: Up-regulated in Transcription
  misc_feature: MA Experiment 20000439 PARAMETER Experiment Name: At_Roots__P Parameter: Age (day) Value: 14 vs. 21
  misc_feature: MA Experiment 20000439 PARAMETER Experiment Name: At_Roots__P Parameter: Organism Value: A. thaliana
  misc_feature: MA Experiment 20000439 PARAMETER Experiment Name: At_Roots__P Parameter: Tissue Value: Roots vs. Whole Plant
  misc_feature: MA Experiment ID: 20000495 Result: Up-regulated in Transcription
  misc_feature: MA Experiment 20000495 PARAMETER Experiment Name: At_Guard_Cells_P Parameter: Harvest Date Value: 8/2/2002
  misc_feature: MA Experiment 20000495 PARAMETER Experiment Name: At_Guard_Cells_P Parameter: Organism Value: A. thaliana
  misc_feature: MA Experiment 20000495 PARAMETER Experiment Name: At_Guard_Cells_P Parameter: Tissue Value: Guard Cells vs. Leaves
  misc_feature: MA Experiment ID: 20000573 Result: Up-regulated in Transcription
  misc_feature: MA Experiment 20000573 PARAMETER Experiment Name: At_100uM_ABA_Mutants__P Parameter: Organism Value: A. thaliana
  misc_feature: MA Experiment 20000573 PARAMETER Experiment Name: At_100uM_ABA_Mutants__P Parameter: Plant Line Value: CS22 vs. Ler wt
  misc_feature: MA Experiment 20000573 PARAMETER Experiment Name: At_100uM_ABA_Mutants__P Parameter: Timepoint (hr) Value: N/A
  misc_feature: MA Experiment 20000573 PARAMETER Experiment Name: At_100uM_ABA_Mutants__P Parameter: Tissue Value: Whole Plant
  misc_feature: MA Experiment 20000573 PARAMETER Experiment Name: At_100uM_ABA_Mutants__P Parameter: Treatment Value: None
  misc_feature: MA Experiment ID: 20000574 Result: Up-regulated in Transcription
  misc_feature: MA Experiment 20000574 PARAMETER Experiment Name: At_100uM_ABA_Mutants__P Parameter: Organism Value: A. thaliana
  misc_feature: MA Experiment 20000574 PARAMETER Experiment Name: At_100uM_ABA_Mutants__P Parameter: Plant Line Value: CS23 vs. Ler wt
  misc_feature: MA Experiment 20000574 PARAMETER Experiment Name: At_100uM_ABA_Mutants__P Parameter: Timepoint (hr) Value: N/A
  misc_feature: MA Experiment 20000574 PARAMETER Experiment Name: At_100uM_ABA_Mutants__P Parameter: Tissue Value: Whole Plant
  misc_feature: MA Experiment 20000574 PARAMETER Experiment Name: At_100uM_ABA_Mutants__P Parameter: Treatment Value: None
  misc_feature: MA Experiment ID: 20000794 Result: Up-regulated in Transcription
  misc_feature: MA Experiment 20000794 PARAMETER Experiment Name: At_Petals_P Parameter: Age (day) Value: 23-25 days
  misc_feature: MA Experiment 20000794 PARAMETER Experiment Name: At_Petals_P Parameter: Plant Line Value: WS
  misc_feature: MA Experiment 20000794 PARAMETER Experiment Name: At_Petals_P Parameter: Tissue Value: Petals vs. Whole plant
  misc_feature: MA Experiment ID: 20001451 Result: Down-regulated in Transcription
  misc_feature: MA Experiment 20001451 PARAMETER Experiment Name: At_Far-red-induction_P Parameter: Age (day) Value: 7
  misc_feature: MA Experiment 20001451 PARAMETER Experiment Name: At_Far-red-induction_P Parameter: Light Value: Far-red vs. White
  misc_feature: MA Experiment 20001451 PARAMETER Experiment Name: At_Far-red-induction_P Parameter: Organism Value: A. thaliana
  misc_feature: MA Experiment 20001451 PARAMETER Experiment Name: At_Far-red-induction_P Parameter: Plant Line Value: Columbia
  misc_feature: MA Experiment 20001451 PARAMETER Experiment Name: At_Far-red-induction_P Parameter: Timepoint (hr) Value: 24
  misc_feature: MA Experiment 20001451 PARAMETER Experiment Name: At_Far-red-induction_P Parameter: Tissue Value: Whole Plant
atgattattacaaacgctcatgtggtggctaatcacatattggtgctagtcataaagcgtggctcaccaaagaagtacaaagcagaagttaaagctattgggcgtgaatgtgatttggctattttggtgatcgaaagcaaagagttttgggaagatatgaatcctttggagcttggagacatgccctttttgcaagaatcagtaaatgttattggctatccaacaggtggtgagaatatctccgttacaaaaggtgttgtgtctagaatagaatcaatggattatgctcacggtgccattaatctaccggcaatacaaacagatgcagcaatgaaccctggcaatagtggtggtccggtttgcataggaaacaaagttgttggtgtagcatttcaaacccttggacattctaataacatagggtgcttaatcccagctccagtggttaaacattttataaccggtgttgaaaaaaccggtcaatacgttggcttctgctcgctaaatctatcataccaacatatggatgcacaaactcgtagtcattttaagatgaattctgagatgacagggatccttatatacaatattaatcaacattcggatgctctcaatattcttaaaaaatatgacgttattctttcaatcgatggcgttgctatagaaaatgatggtacagttattataccaaacagagaaaggacaaggttggatgatttggtttctttgaagcaattaggtgaaacaatcttacttaaaattttaagagagggaaaaatgcatgagttcaatattactctgaggccagtgcaacggctagttccagcaggtcaaattgacaacaacccaagttattacatattcgctggttttgtctttgtgcctctccgtaaacaacattttaaaggttccaacggtgaacaaattgtagtgatttctgaggtattagctgatgtgatcaatgtagaatactacatgtacaagcatttgaaggtgaacagcgtcaacaaagtgaaggtggagaatctaaagcatttgtgtgaactcatagagaaatgttgcaccaaggatttgaggctagaattaggagatggtcgagtaataatcttggattatcagtttgcgaaaagttccacttctttgattttggaacgtcatagagtaccatgggccatgtccaaagatctcatgactgatcaatcgaccacttgttcgaagagagtctatgcttccttaagcttaagtgaatcggtgacgatgatgaaggagaaggcgaaagaagggaagagtctgtttgggtctccgacgttcgttgatcttggaaacggacggctcagatgcgtcgagactggtcacgaggttttagcgggagacgtagaatcatacgctcgtaacaaacggtgtcgtttaggactcatcaatcacgctttgtctctaggaaagcctcctctcaacatgttctcgcaatgcccactttctcgcatcgaaaatggtttaaagttctcgaaacttgtgtgcaagctaactggagatactgtgaacaagaacgaggaacatatctggaaacacgtgaatgggaaaagatttcttcacaaattagagcaagtggaaagaggagctggatcaagcggaaggactgaggaaacacaagtaaacaatccaagacacaataaggaagattctggttctgaggaatccgacttttggatgcctaagtcaagttctgattcagagttagatgaagagactgatgaagaaaactgtaaaggttctcattgtgatgacaaagaatctgaagagctctcagaaagaacaaagagaatgtcactagagattggaccaagtagctttgcttctaggaagaaaaagagtaagaatgatgagttgtcttaagatgttgtggacaaaaaaagaaagagcacaattttgtttgtaagaaagagctcttttgaaaattatgtgagagctaaatttcaaaaccgaatcatccataatcattaatcacaagttcaagccaaatttaaag

SEQ ID NO: 99105 - protein, 630 aa, Arabidopsis thaliana
  peptide (1)..(630): Ceres Seq. ID no. 13602193
  misc_feature (421)..(621): Pfam Name: Surfeit locus protein 2 (SURF2) Pfam Description: Surfeit locus protein 2 (SURF2)
  misc_feature (1)..(409): Homolog of NCBI NO: 9758082 NR Description: contains similarity to serine
  misc_feature (1)..(409): Homolog of NCBI NO: 18421999 NR Description: DegP protease [Arabidopsis thaliana]
  misc_feature (2)..(300): Homolog of NCBI NO: 18421592 NR Description: DegP protease [Arabidopsis thaliana]
  misc_feature (306)..(401): Homolog of NCBI NO: 18421592 NR Description: DegP protease [Arabidopsis thaliana]
  misc_feature (2)..(395): Homolog of NCBI NO: 18408329 NR Description: DegP protease [Arabidopsis thaliana]
  misc_feature (2)..(406): Homolog of NCBI NO: 18408327 NR Description: DegP protease [Arabidopsis thaliana]
  misc_feature (420)..(630): Homolog of NCBI NO: 9758083 NR Description: emb|CAB87783.1~gene_id:MNF13.9~similar to unknown
  misc_feature (420)..(630): Homolog of NCBI NO: 15237449 NR Description: hypothetical protein [Arabidopsis thaliana]
  misc_feature (2)..(300): Homolog of NCBI NO: 2190549 NR Description: F5I14.17 gene product [Arabidopsis thaliana]
  misc_feature (2)..(396): Homolog of NCBI NO: 9279653 NR Description: gb|AAF23847.1~gene_id:MDC8.17~strong similarity
MIITNAHVVANHILVLVIKRGSPKKYKAEVKAIGRECDLAILVIESKEFWEDMNPLELGDMPFLQESVNVIGYPTGGENISVTKGVVSRIESMDYAHGAINLPAIQTDAAMNPGNSGGPVCIGNKVVGVAFQTLGHSNNIGCLIPAPVVKHFITGVEKTGQYVGFCSLNLSYQHMDAQTRSHFKMNSEMTGILIYNINQHSDALNILKKYDVILSIDGVAIENDGTVIIPNRERTRLDDLVSLKQLGETILLKILREGKMHEFNITLRPVQRLVPAGQIDNNPSYYIFAGFVFVPLRKQHFKGSNGEQIVVISEVLADVINVEYYMYKHLKVNSVNKVKVENLKHLCELIEKCCTKDLRLELGDGRVIILDYQFAKSSTSLILERHRVPWAMSKDLMTDQSTTCSKRVYASLSLSESVTMMKEKAKEGKSLFGSPTFVDLGNGRLRCVETGHEVLAGDVESYARNKRCRLGLINHALSLGKPPLNMFSQCPLSRIENGLKFSKLVCKLTGDTVNKNEEHIWKHVNGKRFLHKLEQVERGAGSSGRTEETQVNNPRHNKEDSGSEESDFWMPKSSSDSELDEETDEENCKGSHCDDKESEELSERTKRMSLEIGPSSFASRKKKSKNDELS

SEQ ID NO: 99106 - protein, 578 aa, Arabidopsis thaliana
  peptide (1)..(578): Ceres Seq. ID no. 13602194
  misc_feature (369)..(569): Pfam Name: Surfeit locus protein 2 (SURF2) Pfam Description: Surfeit locus protein 2 (SURF2)
  misc_feature (1)..(357): Homolog of NCBI NO: 9758082 NR Description: contains similarity to serine
  misc_feature (1)..(357): Homolog of NCBI NO: 18421999 NR Description: DegP protease [Arabidopsis thaliana]
  misc_feature (1)..(248): Homolog of NCBI NO: 18421592 NR Description: DegP protease [Arabidopsis thaliana]
  misc_feature (254)..(349): Homolog of NCBI NO: 18421592 NR Description: DegP protease [Arabidopsis thaliana]
  misc_feature (1)..(343): Homolog of NCBI NO: 18408329 NR Description: DegP protease [Arabidopsis thaliana]
  misc_feature (1)..(354): Homolog of NCBI NO: 18408327 NR Description: DegP protease [Arabidopsis thaliana]
  misc_feature (368)..(578): Homolog of NCBI NO: 9758083 NR Description: emb|CAB87783.1~gene_id:MNF13.9~similar to unknown
  misc_feature (368)..(578): Homolog of NCBI NO: 15237449 NR Description: hypothetical protein [Arabidopsis thaliana]
  misc_feature (1)..(248): Homolog of NCBI NO: 2190549 NR Description: F5I14.17 gene product [Arabidopsis thaliana]
  misc_feature (1)..(344): Homolog of NCBI NO: 9279653 NR Description: gb|AAF23847.1~gene_id:MDC8.17~strong similarity
MNPLELGDMPFLQESVNVIGYPTGGENISVTKGVVSRIESMDYAHGAINLPAIQTDAAMNPGNSGGPVCIGNKVVGVAFQTLGHSNNIGCLIPAPVVKHFITGVEKTGQYVGFCSLNLSYQHMDAQTRSHFKMNSEMTGILIYNINQHSDALNILKKYDVILSIDGVAIENDGTVIIPNRERTRLDDLVSLKQLGETILLKILREGKMHEFNITLRPVQRLVPAGQIDNNPSYYIFAGFVFVPLRKQHFKGSNGEQIVVISEVLADVINVEYYMYKHLKVNSVNKVKVENLKHLCELIEKCCTKDLRLELGDGRVIILDYQFAKSSTSLILERHRVPWAMSKDLMTDQSTTCSKRVYASLSLSESVTMMKEKAKEGKSLFGSPTFVDLGNGRLRCVETGHEVLAGDVESYARNKRCRLGLINHALSLGKPPLNMFSQCPLSRIENGLKFSKLVCKLTGDTVNKNEEHIWKHVNGKRFLHKLEQVERGAGSSGRTEETQVNNPRHNKEDSGSEESDFWMPKSSSDSELDEETDEENCKGSHCDDKESEELSERTKRMSLEIGPSSFASRKKKSKNDELS

SEQ ID NO: 99107 - protein, 570 aa, Arabidopsis thaliana
  peptide (1)..(570): Ceres Seq. ID no. 13602195
  misc_feature (361)..(561): Pfam Name: Surfeit locus protein 2 (SURF2) Pfam Description: Surfeit locus protein 2 (SURF2)
  misc_feature (1)..(349): Homolog of NCBI NO: 9758082 NR Description: contains similarity to serine
  misc_feature (1)..(349): Homolog of NCBI NO: 18421999 NR Description: DegP protease [Arabidopsis thaliana]
  misc_feature (1)..(240): Homolog of NCBI NO: 18421592 NR Description: DegP protease [Arabidopsis thaliana]
  misc_feature (246)..(341): Homolog of NCBI NO: 18421592 NR Description: DegP protease [Arabidopsis thaliana]
  misc_feature (1)..(335): Homolog of NCBI NO: 18408329 NR Description: DegP protease [Arabidopsis thaliana]
  misc_feature (1)..(346): Homolog of NCBI NO: 18408327 NR Description: DegP protease [Arabidopsis thaliana]
  misc_feature (360)..(570): Homolog of NCBI NO: 9758083 NR Description: emb|CAB87783.1~gene_id:MNF13.9~similar to unknown
  misc_feature (360)..(570): Homolog of NCBI NO: 15237449 NR Description: hypothetical protein [Arabidopsis thaliana]
  misc_feature (1)..(240): Homolog of NCBI NO: 2190549 NR Description: F5I14.17 gene product [Arabidopsis thaliana]
  misc_feature (1)..(336): Homolog of NCBI NO: 9279653 NR Description: gb|AAF23847.1~gene_id:MDC8.17~strong similarity
MPFLQESVNVIGYPTGGENISVTKGVVSRIESMDYAHGAINLPAIQTDAAMNPGNSGGPVCIGNKVVGVAFQTLGHSNNIGCLIPAPVVKHFITGVEKTGQYVGFCSLNLSYQHMDAQTRSHFKMNSEMTGILIYNINQHSDALNILKKYDVILSIDGVAIENDGTVIIPNRERTRLDDLVSLKQLGETILLKILREGKMHEFNITLRPVQRLVPAGQIDNNPSYYIFAGFVFVPLRKQHFKGSNGEQIVVISEVLADVINVEYYMYKHLKVNSVNKVKVENLKHLCELIEKCCTKDLRLELGDGRVIILDYQFAKSSTSLILERHRVPWAMSKDLMTDQSTTCSKRVYASLSLSESVTMMKEKAKEGKSLFGSPTFVDLGNGRLRCVETGHEVLAGDVESYARNKRCRLGLINHALSLGKPPLNMFSQCPLSRIENGLKFSKLVCKLTGDTVNKNEEHIWKHVNGKRFLHKLEQVERGAGSSGRTEETQVNNPRHNKEDSGSEESDFWMPKSSSDSELDEETDEENCKGSHCDDKESEELSERTKRMSLEIGPSSFASRKKKSKNDELS

SEQ ID NO: 99108 - DNA, 1128 bp, Arabidopsis thaliana
  misc_feature (1)..(1128): Ceres Seq. ID no. 13602196
  misc_feature: MA Experiment ID: 108434 Result: Up-regulated in Transcription
  misc_feature: MA Experiment 108434 PARAMETER Experiment Name: At_Root_Tips_cDNA_P Parameter: Tissue Value: Root Tips
  misc_feature: MA Experiment ID: 108461 Result: Down-regulated in Transcription
  misc_feature: MA Experiment 108461 PARAMETER Experiment Name: At_Germinating_Seeds_cDNA_P Parameter: Age (day) Value: 1 vs. 0
  misc_feature: MA Experiment 108461 PARAMETER Experiment Name: At_Germinating_Seeds_cDNA_P Parameter: Tissue Value: Germinating Seeds
  misc_feature: MA Experiment ID: 108462 Result: Down-regulated in Transcription
  misc_feature: MA Experiment 108462 PARAMETER Experiment Name: At_Germinating_Seeds_cDNA_P Parameter: Age (day) Value: 2 vs. 0
  misc_feature: MA Experiment 108462 PARAMETER Experiment Name: At_Germinating_Seeds_cDNA_P Parameter: Tissue Value: Germinating Seeds
  misc_feature: MA Experiment ID: 108463 Result: Down-regulated in Transcription
  misc_feature: MA Experiment 108463 PARAMETER Experiment Name: At_Germinating_Seeds_cDNA_P Parameter: Age (day) Value: 3 vs. 0
  misc_feature: MA Experiment 108463 PARAMETER Experiment Name: At_Germinating_Seeds_cDNA_P Parameter: Tissue Value: Germinating Seeds
  misc_feature: MA Experiment ID: 108464 Result: Down-regulated in Transcription
  misc_feature: MA Experiment 108464 PARAMETER Experiment Name: At_Germinating_Seeds_cDNA_P Parameter: Age (day) Value: 4 vs. 0
  misc_feature: MA Experiment 108464 PARAMETER Experiment Name: At_Germinating_Seeds_cDNA_P Parameter: Tissue Value: Germinating Seeds
  misc_feature: MA Experiment ID: 20000179 Result: Down-regulated in Transcription
  misc_feature: MA Experiment 20000179 PARAMETER Experiment Name: At_Germinating_Seeds_P Parameter: Age (hr) Value: 6 vs. 0
  misc_feature: MA Experiment 20000179 PARAMETER Experiment Name: At_Germinating_Seeds_P Parameter: Tissue Value: Germinating Seeds
  misc_feature: MA Experiment ID: 20000180 Result: Down-regulated in Transcription
  misc_feature: MA Experiment 20000180 PARAMETER Experiment Name: At_Germinating_Seeds_P Parameter: Age (hr) Value: 24 vs. 0
  misc_feature: MA Experiment 20000180 PARAMETER Experiment Name: At_Germinating_Seeds_P Parameter: Tissue Value: Germinating Seeds
aaagttgcttgctttcttcttcttctccgattcgagcttccttcctctcagcaaaaccttcaagtaaagagtggtgaatcggaaaatgtcgcagtcttccgtcgatataccgccaaaaggtgggtttagcttcgatctgtgcaaaaggaatgatatgctgacacagaagggtcttaaagcgccgtcgtttctcaagactggaacgactatcgttggattgatatttaaggatggtgtaatacttggggctgatacacgggcaactgaagggcctattgtggctgataagaactgtgagaagattcactacatggcaccaaacatttactgttgtggtgcaggaaccgctgctgacactgaagcagtaactgatatggtcagctcacagctgcggttgcatagataccagactggccgagattctcgagtcgttactgcattgacccttctcaaaaaacatcttttcagctaccaaggccatgtctcagctgctcttgtgcttggtggagttgatattaccgggcctcatcttcacacgatatacccacacggttctactgacactctaccatttgctacaatgggttctggttcccttgctgccatgtcagtgtttgaagcaaagtataaagaaggtctaactagagatgaaggaatcaagttggttgctgaagccatatgctctggtatattcaacgaccttggtagtggtagcaatgtggatatctgtgtgatcactaaggggcacaaggaatacttgaggaattacatggaaccaaacccaagaacctatgttagcagcaaaggctattcattcaccaagaaaaccgaggttctactcaccaaaattacaccattattggagcgagtcgaaattgtagaagtggctggtgaagctatggaggaatgaatctcgtgtgagagacagatactaagagtgaaaccattgttctacctcacatgacagtcatgtttacattttctactttgttcaatatgaacgactaaaatcgaatcgtagttgcctccatttcgtctttaaatttggcttgaacttgtgattaatgattatggatgattcggttttgaaatttagctctcacataattttcaaaagagctctttctt

SEQ ID NO: 99109 - protein, 274 aa, Arabidopsis thaliana; identical to SEQ ID NO: 24362
  peptide (1)..(274): Ceres Seq. ID no. 13602197
  misc_feature (36)..(217): Pfam Name: Proteasome A-type and B-type Pfam Description: Proteasome A-type and B-type
  misc_feature (1)..(274): Homolog of NCBI NO: 15237451 NR Description: 20S proteasome beta subunit B (PBB2) [Arabidopsis >gi|30693626|ref|NP_851108.1| 20S proteasome beta subunit B [Arabidopsis thaliana] >gi|25529007|pir||T51979 C 3.4.25.1
  misc_feature (1)..(274): Homolog of NCBI NO: 20260224 NR Description: 20S proteasome beta subunit PBB2 [Arabidopsis >gi|21387013|gb|AAM47910.1| 20S proteasome beta subunit PBB2
  misc_feature (1)..(274): Homolog of NCBI NO: 21593337 NR Description: 20S proteasome beta subunit PBB2 [Arabidopsis
  misc_feature (1)..(274): Homolog of NCBI NO: 18405364 NR Description: 20S proteasome beta subunit B (PBB1) [Arabidopsis >gi|25529005|pir||T51977 C 3.4.25.1 proteasome endopeptidase
  misc_feature (1)..(274): Homolog of NCBI NO: 2511578 NR Description: multicatalytic endopeptidase [Arabidopsis
  misc_feature (1)..(248): Homolog of NCBI NO: 30688785 NR Description: 20S proteasome beta subunit B (PBB1) [Arabidopsis
  misc_feature (5)..(274): Homolog of NCBI NO: 8671504 NR Description: beta 2 subunit of 20S proteasome [Oryza sativa
  misc_feature (57)..(274): Homolog of NCBI NO: 2511576 NR Description: multicatalytic endopeptidase [Arabidopsis
  misc_feature (10)..(265): Homolog of NCBI NO: 24664391 NR Description: Proteasome beta2 subunit CG3329-PA [Drosophila
  misc_feature (10)..(265): Homolog of NCBI NO: 2582506 NR Description: 20S proteasome beta2 subunit [Drosophila

SEQ ID NO: 99110 - protein, 251 aa, Arabidopsis thaliana; identical to SEQ ID NO: 24363
  peptide (1)..(251): Ceres Seq. ID no. 13602198
  misc_feature (13)..(194): Pfam Name: Proteasome A-type and B-type Pfam Description: Proteasome A-type and B-type
  misc_feature (1)..(251): Homolog of NCBI NO: 15237451 NR Description: 20S proteasome beta subunit B (PBB2) [Arabidopsis >gi|30693626|ref|NP_851108.1| 20S proteasome beta subunit B [Arabidopsis thaliana] >gi|25529007|pir||T51979 C 3.4.25.1
  misc_feature (1)..(251): Homolog of NCBI NO: 20260224 NR Description: 20S proteasome beta subunit PBB2 [Arabidopsis >gi|21387013|gb|AAM47910.1| 20S proteasome beta subunit PBB2
  misc_feature (1)..(251): Homolog of NCBI NO: 21593337 NR Description: 20S proteasome beta subunit PBB2 [Arabidopsis
  misc_feature (1)..(251): Homolog of NCBI NO: 18405364 NR Description: 20S proteasome beta subunit B (PBB1) [Arabidopsis >gi|25529005|pir||T51977 C 3.4.25.1 proteasome endopeptidase
  misc_feature (1)..(251): Homolog of NCBI NO: 2511578 NR Description: multicatalytic endopeptidase [Arabidopsis
  misc_feature (1)..(225): Homolog of NCBI NO: 30688785 NR Description: 20S proteasome beta subunit B (PBB1) [Arabidopsis
  misc_feature (1)..(251): Homolog of NCBI NO: 8671504 NR Description: beta 2 subunit of 20S proteasome [Oryza sativa
  misc_feature (34)..(251): Homolog of NCBI NO: 2511576 NR Description: multicatalytic endopeptidase [Arabidopsis
  misc_feature (1)..(242): Homolog of NCBI NO: 24664391 NR Description: Proteasome beta2 subunit CG3329-PA [Drosophila
  misc_feature (1)..(242): Homolog of NCBI NO: 2582506 NR Description: 20S proteasome beta2 subunit [Drosophila

SEQ ID NO: 99111 - protein, 199 aa, Arabidopsis thaliana; identical to SEQ ID NO: 24364
  peptide (1)..(199): Ceres Seq. ID no. 13602199
  misc_feature (1)..(142): Pfam Name: Proteasome A-type and B-type Pfam Description: Proteasome A-type and B-type
  misc_feature (1)..(199): Homolog of NCBI NO: 15237451 NR Description: 20S proteasome beta subunit B (PBB2) [Arabidopsis >gi|30693626|ref|NP_851108.1| 20S proteasome beta subunit B [Arabidopsis thaliana] >gi|25529007|pir||T51979 C 3.4.25.1
  misc_feature (1)..(199): Homolog of NCBI NO: 20260224 NR Description: 20S proteasome beta subunit PBB2 [Arabidopsis >gi|21387013|gb|AAM47910.1| 20S proteasome beta subunit PBB2
  misc_feature (1)..(199): Homolog of NCBI NO: 21593337 NR Description: 20S proteasome beta subunit PBB2 [Arabidopsis
  misc_feature (1)..(199): Homolog of NCBI NO: 18405364 NR Description: 20S proteasome beta subunit B (PBB1) [Arabidopsis >gi|25529005|pir||T51977 C 3.4.25.1 proteasome endopeptidase
  misc_feature (1)..(199): Homolog of NCBI NO: 2511578 NR Description: multicatalytic endopeptidase [Arabidopsis
  misc_feature (1)..(173): Homolog of NCBI NO: 30688785 NR Description: 20S proteasome beta subunit B (PBB1) [Arabidopsis
  misc_feature (1)..(199): Homolog of NCBI NO: 8671504 NR Description: beta 2 subunit of 20S proteasome [Oryza sativa
  misc_feature (1)..(199): Homolog of NCBI NO: 2511576 NR Description: multicatalytic endopeptidase [Arabidopsis
  misc_feature (1)..(190): Homolog of NCBI NO: 24664391 NR Description: Proteasome beta2 subunit CG3329-PA [Drosophila
  misc_feature (1)..(190): Homolog of NCBI NO: 2582506 NR Description: 20S proteasome beta2 subunit [Drosophila

SEQ ID NO: 99112 - DNA, 2010 bp, Arabidopsis thaliana
  misc_feature (1)..(2010): Ceres Seq. ID no. 13602208
  misc_feature: MA Experiment ID: 20000184 Result: Down-regulated in Transcription
  misc_feature: MA Experiment 20000184 PARAMETER Experiment Name: At_Shoots__P Parameter: Age (day) Value: 7
  misc_feature: MA Experiment 20000184 PARAMETER Experiment Name: At_Shoots__P Parameter: Tissue Value: Shoots vs. Whole Plant
  misc_feature: MA Experiment ID: 20000227 Result: Down-regulated in Transcription
  misc_feature: MA Experiment 20000227 PARAMETER Experiment Name: At_Root-Tips-vs-Tops_P Parameter: Tissue Value: Root Tips vs. Root Tops
  misc_feature: MA Experiment ID: 20000265 Result: Up-regulated in Transcription
  misc_feature: MA Experiment 20000265 PARAMETER Experiment Name: At_Open_Flower_P Parameter: Age (day) Value: 21
  misc_feature: MA Experiment 20000265 PARAMETER Experiment Name: At_Open_Flower_P Parameter: Plant Line Value: WS
  misc_feature: MA Experiment 20000265 PARAMETER Experiment Name: At_Open_Flower_P Parameter: Tissue Value: Closed Flower vs. Whole Plant
  misc_feature: MA Experiment ID: 20000436 Result: Up-regulated in Transcription
  misc_feature: MA Experiment 20000436 PARAMETER Experiment Name: At_Drought_P Parameter: Age (day) Value: 7
  misc_feature: MA Experiment 20000436 PARAMETER Experiment Name: At_Drought_P Parameter: Organism Value: A. thaliana
  misc_feature: MA Experiment 20000436 PARAMETER Experiment Name: At_Drought_P Parameter: Plant Line Value: WS
  misc_feature: MA Experiment 20000436 PARAMETER Experiment Name: At_Drought_P Parameter: Timepoint (hr) Value: 12
  misc_feature: MA Experiment 20000436 PARAMETER Experiment Name: At_Drought_P Parameter: Tissue Value: Whole Plant
  misc_feature: MA Experiment 20000436 PARAMETER Experiment Name: At_Drought_P Parameter: Treatment Value: Drought vs. No Drought
  misc_feature: MA Experiment ID: 20000437 Result: Up-regulated in Transcription
  misc_feature: MA Experiment 20000437 PARAMETER Experiment Name: At_Drought_P Parameter: Age (day) Value: 8
  misc_feature: MA Experiment 20000437 PARAMETER Experiment Name: At_Drought_P Parameter: Organism Value: A. thaliana
  misc_feature: MA Experiment 20000437 PARAMETER Experiment Name: At_Drought_P Parameter: Plant Line Value: WS
  misc_feature: MA Experiment 20000437 PARAMETER Experiment Name: At_Drought_P Parameter: Timepoint (hr) Value: 24
  misc_feature: MA Experiment 20000437 PARAMETER Experiment Name: At_Drought_P Parameter: Tissue Value: Whole Plant
  misc_feature: MA Experiment 20000437 PARAMETER Experiment Name: At_Drought_P Parameter: Treatment Value: Drought vs. No Drought
  misc_feature: MA Experiment ID: 20000495 Result: Up-regulated in Transcription
  misc_feature: MA Experiment 20000495 PARAMETER Experiment Name: At_Guard_Cells_P Parameter: Harvest Date Value: 8/2/2002
  misc_feature: MA Experiment 20000495 PARAMETER Experiment Name: At_Guard_Cells_P Parameter: Organism Value: A. thaliana
  misc_feature: MA Experiment 20000495 PARAMETER Experiment Name: At_Guard_Cells_P Parameter: Tissue Value: Guard Cells vs. Leaves
  misc_feature: MA Experiment ID: 20000496 Result: Up-regulated in Transcription
  misc_feature: MA Experiment 20000496 PARAMETER Experiment Name: At_Guard_Cells_P Parameter: Harvest Date Value: 7/19/2002
  misc_feature: MA Experiment 20000496 PARAMETER Experiment Name: At_Guard_Cells_P Parameter: Organism Value: Canola
  misc_feature: MA Experiment 20000496 PARAMETER Experiment Name: At_Guard_Cells_P Parameter: Tissue Value: Guard Cells vs. Leaves
  misc_feature: MA Experiment ID: 20000794 Result: Up-regulated in Transcription
  misc_feature: MA Experiment 20000794 PARAMETER Experiment Name: At_Petals_P Parameter: Age (day) Value: 23-25 days
  misc_feature: MA Experiment 20000794 PARAMETER Experiment Name: At_Petals_P Parameter: Plant Line Value: WS
  misc_feature: MA Experiment 20000794 PARAMETER Experiment Name: At_Petals_P Parameter: Tissue Value: Petals vs. Whole plant
  misc_feature: MA Experiment ID: 20001904 Result: Up-regulated in Transcription
  misc_feature: MA Experiment 20001904 PARAMETER Experiment Name: At_Drought_Reproduction_P Parameter: Age (day) Value: 37
  misc_feature: MA Experiment 20001904 PARAMETER Experiment Name: At_Drought_Reproduction_P Parameter: Organism Value: A. thaliana
  misc_feature: MA Experiment 20001904 PARAMETER Experiment Name: At_Drought_Reproduction_P Parameter: Plant Line Value: WS
  misc_feature: MA Experiment 20001904 PARAMETER Experiment Name: At_Drought_Reproduction_P Parameter: Timepoint (day) Value: 7
  misc_feature: MA Experiment 20001904 PARAMETER Experiment Name: At_Drought_Reproduction_P Parameter: Tissue Value: Rosettes
  misc_feature: MA Experiment 20001904 PARAMETER Experiment Name: At_Drought_Reproduction_P Parameter: Treatment Value: Drought vs. No Drought
  misc_feature: MA Experiment ID: 20001905 Result: Up-regulated in Transcription
  misc_feature: MA Experiment 20001905 PARAMETER Experiment Name: At_Drought_Reproduction_P Parameter: Age (day) Value: 40
  misc_feature: MA Experiment 20001905 PARAMETER Experiment Name: At_Drought_Reproduction_P Parameter: Organism Value: A. thaliana
  misc_feature: MA Experiment 20001905 PARAMETER Experiment Name: At_Drought_Reproduction_P Parameter: Plant Line Value: WS
  misc_feature: MA Experiment 20001905 PARAMETER Experiment Name: At_Drought_Reproduction_P Parameter: Timepoint (day) Value: 10
  misc_feature: MA Experiment 20001905 PARAMETER Experiment Name: At_Drought_Reproduction_P Parameter: Tissue Value: Rosettes
  misc_feature: MA Experiment 20001905 PARAMETER Experiment Name: At_Drought_Reproduction_P Parameter: Treatment Value: Drought vs. No Drought
ataagaatctctgctttaccttttcttttcaaagggtttcattttgattctagggttgttctaaatgcgacattttgactgatgggtctttgttgaatttgaagagagcaaaagagaaagagattgttctaatggagcctccaacgggaatcttggcttctctgtggcaatttatactcttcattccttatttcactggtttactgcttctcggtgtcattaaaggtatcgttttatgcccgcttatatgccttactgtggctattggaaactctgcaatcatcttaggccttttaccagtacacgcgatttggactctatattcgatagcgagtgctaaacagttaggaccaatcctgaagatctttctgtgtttatgcgttcctcttggtgtcattctctggcttgtggttagtatcttaggaagtgttcttggaggagctatttatggatttctttctccaatatttgctactttcgatgctgttggtgaagggaagtctaatccgtttttccattgcttttatgatggaacttggagcactgttcaaggcagtttcaccgttgtttgtgattttaaagatgtttgctttcactcctacttttcttttatggatgatcttcgaacatctactgcgaaccgtcactattatgaaataaggttacttcaaattccaggtgctgtgattgttgcggttctcggaattcttgttgatttcccagtgatttcactcttagcattgtgtaaaagcccgtacatgttgttcaaagggtggcaccgtttgtttcatgatctcattggacgtgaaggtcctttcttggaaacaatgtgtgtcccaatcgctggccttgtgatcttactctggcctttagctgttgttggagcagttttaggatccgtggtctctagtgtcttccttggtgcttatggcggtgtagtctcatatcaggagtcatcgttcttcttcggtctctgctatgttgttgcttctgtttctatttacgatgagtatagcaacgatgttcttgatatgcctgaaggttcttgctttcccaggccaatatatcgaagaaacgaagagggcgctagtacggcattttctggtggtctttcaagaccgaactccttcaagacaactccatcaagaggaggatcaaacaaaggcccaatgattgacctgaaaccgcttgatcttttggaggctctatttgtggaatgtaggcggcacggagagattatggtaacgaaagggattataaattcaaaagacattgaagaagctaaatctagcaaaggcagtcaagtgatcagctttggcttacctgcttattctcttcttcacgagcttttacgctctatcaaatctaactccaccggtttattactcggtgacggtgtaacggagataactaccagaaaccgcccaaaagatgcgttttttgattggtttctgaatccgtttttgatccttaaagaccagatcgaagctgcaaacctatccgaggaagaagaagagtatcttggtaaattggtattactctttggagattcagagagacttaaaagctccattgttgaatctgaatctcctcctctaactgaactcagaaaagccgaacttgatgcctttgctcgcaggcttcaaggattaaccaaatcagtatcaagatatccaacattcagaagacattttgtggaactagtcaagaaactatcaaatgatctagacaataaacataaccgttttgaaggcggttcgagatcagttccacgtcccgggaaaacggtgtctcggattttcagccaaaaatcgttcaagaaaaagacaagtagcaatgggtcagatcaagattcaccaaacagagggttaagagacattgatattgtgtaagtaaatgttatgcgaccagaattagaccgaaacttcgtctgcttttagctctgtaatgataaatttatacagattccaagtgaatatgaaactgtttcatttatctaacaaatgtttt

SEQ ID NO: 99113 - protein, 586 aa, Arabidopsis thaliana
  peptide (1)..(586): Ceres Seq. ID no. 13602209
  misc_feature (1)..(586): Homolog of NCBI NO: 30693640 NR Description: expressed protein [Arabidopsis thaliana] unknown protein [Arabidopsis thaliana]
  misc_feature (1)..(586): Homolog of NCBI NO: 9758091 NR Description: dbj|BAA95714.1~gene_id:MNF13.19~strong similarity
  misc_feature (1)..(586): Homolog of NCBI NO: 30688768 NR Description: expressed protein [Arabidopsis thaliana]
  misc_feature (1)..(586): Homolog of NCBI NO: 27311557 NR Description: Unknown protein [Arabidopsis thaliana]
  misc_feature (99)..(355): Homolog of NCBI NO: 7939511 NR Description: emb|CAB40985.1~gene_id:K1G2.10~similar to unknown
  misc_feature (353)..(586): Homolog of NCBI NO: 7939511 NR Description: emb|CAB40985.1~gene_id:K1G2.10~similar to unknown
  misc_feature (1)..(574): Homolog of NCBI NO: 38345330 NR Description: OSJNBa0081L15.3 [Oryza sativa (japonica
  misc_feature (4)..(547): Homolog of NCBI NO: 38344840 NR Description: OSJNBa0064H22.21 [Oryza sativa (japonica
  misc_feature (1)..(528): Homolog of NCBI NO: 15235450 NR Description: hypothetical protein [Arabidopsis thaliana]
  misc_feature (14)..(503): Homolog of NCBI NO: 15234594 NR Description: hypothetical protein [Arabidopsis thaliana]
MEPPTGILASLWQFILFIPYFTGLLLLGVIKGIVLCPLICLTVAIGNSAIILGLLPVHAIWTLYSIASAKQLGPILKIFLCLCVPLGVILWLVVSILGSVLGGAIYGFLSPIFATFDAVGEGKSNPFFHCFYDGTWSTVQGSFTVVCDFKDVCFHSYFSFMDDLRTSTANRHYYEIRLLQIPGAVIVAVLGILVDFPVISLLALCKSPYMLFKGWHRLFHDLIGREGPFLETMCVPIAGLVILLWPLAVVGAVLGSVVSSVFLGAYGGVVSYQESSFFFGLCYVVASVSIYDEYSNDVLDMPEGSCFPRPIYRRNEEGASTAFSGGLSRPNSFKTTPSRGGSNKGPMIDLKPLDLLEALFVECRRHGEIMVTKGIINSKDIEEAKSSKGSQVISFGLPAYSLLHELLRSIKSNSTGLLLGDGVTEITTRNRPKDAFFDWFLNPFLILKDQIEAANLSEEEEEYLGKLVLLFGDSERLKSSIVESESPPLTELRKAELDAFARRLQGLTKSVSRYPTFRRHFVELVKKLSNDLDNKHNRFEGGSRSVPRPGKTVSRIFSQKSFKKKTSSNGSDQDSPNRGLRDIDIV

SEQ ID NO: 99114 - protein, 426 aa, Arabidopsis thaliana; identical to SEQ ID NO: 75248
  peptide (1)..(426): Ceres Seq. ID no. 13602210
  misc_feature (1)..(426): Homolog of NCBI NO: 30693640 NR Description: expressed protein [Arabidopsis thaliana] unknown protein [Arabidopsis thaliana]
  misc_feature (1)..(426): Homolog of NCBI NO: 9758091 NR Description: dbj|BAA95714.1~gene_id:MNF13.19~strong similarity
  misc_feature (1)..(426): Homolog of NCBI NO: 30688768 NR Description: expressed protein [Arabidopsis thaliana]
  misc_feature (1)..(426): Homolog of NCBI NO: 27311557 NR Description: Unknown protein [Arabidopsis thaliana]
  misc_feature (1)..(195): Homolog of NCBI NO: 7939511 NR Description: emb|CAB40985.1~gene_id:K1G2.10~similar to unknown
  misc_feature (193)..(426): Homolog of NCBI NO: 7939511 NR Description: emb|CAB40985.1~gene_id:K1G2.10~similar to unknown
  misc_feature (1)..(414): Homolog of NCBI NO: 38345330 NR Description: OSJNBa0081L15.3 [Oryza sativa (japonica
  misc_feature (1)..(387): Homolog of NCBI NO: 38344840 NR Description: OSJNBa0064H22.21 [Oryza sativa (japonica
  misc_feature (1)..(368): Homolog of NCBI NO: 15235450 NR Description: hypothetical protein [Arabidopsis thaliana]
  misc_feature (1)..(343): Homolog of NCBI NO: 15234594 NR Description: hypothetical protein [Arabidopsis thaliana]

SEQ ID NO: 99115 - protein, 377 aa, Arabidopsis thaliana; identical to SEQ ID NO: 75249
  peptide (1)..(377): Ceres Seq. ID no. 13602211
  misc_feature (1)..(377): Homolog of NCBI NO: 30693640 NR Description: expressed protein [Arabidopsis thaliana] unknown protein [Arabidopsis thaliana]
  misc_feature (1)..(377): Homolog of NCBI NO: 9758091 NR Description: dbj|BAA95714.1~gene_id:MNF13.19~strong similarity
  misc_feature (1)..(377): Homolog of NCBI NO: 30688768 NR Description: expressed protein [Arabidopsis thaliana]
  misc_feature (1)..(377): Homolog of NCBI NO: 27311557 NR Description: Unknown protein [Arabidopsis thaliana]
  misc_feature (1)..(146): Homolog of NCBI NO: 7939511 NR Description: emb|CAB40985.1~gene_id:K1G2.10~similar to unknown
  misc_feature (144)..(377): Homolog of NCBI NO: 7939511 NR Description: emb|CAB40985.1~gene_id:K1G2.10~similar to unknown
  misc_feature (1)..(365): Homolog of NCBI NO: 38345330 NR Description: OSJNBa0081L15.3 [Oryza sativa (japonica
  misc_feature (1)..(338): Homolog of NCBI NO: 38344840 NR Description: OSJNBa0064H22.21 [Oryza sativa (japonica
  misc_feature (1)..(319): Homolog of NCBI NO: 15235450 NR Description: hypothetical protein [Arabidopsis thaliana]
  misc_feature (1)..(294): Homolog of NCBI NO: 15234594 NR Description: hypothetical protein [Arabidopsis thaliana]
